United States Patent Application Publication US 2023/0026259 A1 - sequence listing, part 73

SEQ ID NO: 174600 - DNA, 609 bp, Homo sapiens
  Payload ID: 14285
  Gene Symbol: RBPJ
  Gene Name: recombination signal binding protein for immunoglobulin kappa J region
  ENST ID: ENST00000512351
  CDS Start-End: 327-609
ttcattctgacatttttacttcctttgttgccaggcaaagtggccaccagattgggtggaaggggctctttctacggcatttcatgactgagcctccaagaacaacctgtattgagtttctctttgagatgattggactgctctatccagcatcattgagtcattgaaattatgagactatcattcaaatggaagcattatagttcttcggaaccattatgatctcaaaacgaaaggagaatgatacagatacactggctgaggtgttttgaggtgcatcgaagtgttccaagctgtgacttaccttaacatgttcttgaagtaccatggcgtggattaaaaggaaatttggtgagcggcctccacctaaacgacttactagggaagctatgcgaaattatttaaaagagcgaggggatcaaacagtacttattcttcatgcaaaagttgcacagaagtcatatggaaatgaaaaaaggtttttttgcccacctccttgtgtatatcttatgggcagtggatggaagaaaaaaaaagaacaaatggaacgcgatggttgttctgaacaagagtctcaaccgtgtgcatttattgggataggaaatagtg

SEQ ID NO: 174601 - DNA, 555 bp, Homo sapiens
  Payload ID: 14285
  Gene Symbol: RBPJ
  Gene Name: recombination signal binding protein for immunoglobulin kappa J region
  ENST ID: ENST00000509158
  CDS Start-End: 409-555
atcgcctgggtaggtttccagggaaggcagcgagcaggatcccctactctgcgggcggcgcgaggcgtctggctcttcgcggcggcggcgaggggaaagggagcgcgggggctgggtggaatcgaggagtgaggaaaaagggaaggggcgggggagagggaccagggaaggcgtcggggggaatctcgcgagggttggagttttggcgagagtttgtggaagatggcgcctgttgtgacaggtcattgaaattatgagactatcattcaaatggaagcattatagttcttcggaaccattatgatctcaaaacgaaaggagaatgatacagatacactggctgaggtgttttgaggtgcatcgaagtgttccaagctgtgacttaccttaacatgttcttgaagtaccatggcgtggattaaaaggaaatttggtgagcggcctccacctaaacgacttactagggaagctatgcgaaattatttaaaagagcgaggggatcaaacagtacttattcttcatgcaaaagttgcacagaagtcatatggaaatgaa

SEQ ID NO: 174602 - DNA, 340 bp, Homo sapiens
  Payload ID: 14285
  Gene Symbol: RBPJ
  Gene Name: recombination signal binding protein for immunoglobulin kappa J region
  ENST ID: ENST00000514807
  CDS Start-End: 196-340
gagccgcctgcgcatgctccatcgcctggtcattgaaattatgagactatcattcaaatggaagcattatagttcttcggaaccattatgatctcaaaacgaaaggagaatgatacagatacactggctgaggtgttttgaggtgcatcgaagtgttccaagctgtgacttaccttaacatgttcttgaagtaccatggcgtggattaaaaggaaatttggtgagcggcctccacctaaacgacttactagggaagctatgcgaaattatttaaaagagcgaggggatcaaacagtacttattcttcatgcaaaagttgcacagaagtcatatggaaatg

SEQ ID NO: 174603 - DNA, 569 bp, Homo sapiens
  Payload ID: 14285
  Gene Symbol: RBPJ
  Gene Name: recombination signal binding protein for immunoglobulin kappa J region
  ENST ID: ENST00000514730
  CDS Start-End: 231-569
gcaatctaggctgcctgaggatgattggagggtatcgtaggacggttagaaggaggctcaagattcattgaaattatgagactatcattcaaatggaagcattatagttcttcggaaccattatgatctcaaaacgaaaggagaatgatacagatacactggctgaggtgttttgaggtgcatcgaagtgttccaagctgtgacttaccttaacatgttcttgaagtaccatggcgtggattaaaaggaaatttggtgagcggcctccacctaaacgacttactagggaagctatgcgaaattatttaaaagagcgaggggatcaaacagtacttattcttcatgcaaaagttgcacagaagtcatatggaaatgaaaaaaggtttttttgcccacctccttgtgtatatcttatgggcagtggatggaagaaaaaaaaagaacaaatggaacgcgatggttgttctgaacaagagtctcaaccgtgtgcatttattgggataggaaatagtgaccaagaaatgcagcagctaaacttggaaggaaagaactattgcacagccaaaaca

SEQ ID NO: 174604 - DNA, 566 bp, Homo sapiens
  Payload ID: 14285
  Gene Symbol: RBPJ
  Gene Name: recombination signal binding protein for immunoglobulin kappa J region
  ENST ID: ENST00000506956
  CDS Start-End: 276-566
agtggaaggcggtgggaaggaggtgtagcgtgagactggactgcccgcattgggtacatgcgcagtgccgctcgcgcgggccgcgccaatcctgcagcgccttcaacagtcattgaaattatgagactatcattcaaatggaagcattatagttcttcggaaccattatgatctcaaaacgaaaggagaatgatacagatacactggctgaggtgttttgaggtgcatcgaagtgttccaagctgtgacttaccttaacatgttcttgaagtaccatggcgtggattaaaaggaaatttggtgagcggcctccacctaaacgacttactagggaagctatgcgaaattatttaaaagagcgaggggatcaaacagtacttattcttcatgcaaaagttgcacagaagtcatatggaaatgaaaaaaggtttttttgcccacctccttgtgtatatcttatgggcagtggatggaagaaaaaaaaagaacaaatggaacgcgatggttgttctgaacaagagtctcaaccgtgtgcatttattgggataggaaatagtgaccaagaa

SEQ ID NO: 174605 - DNA, 758 bp, Homo sapiens
  Payload ID: 14285
  Gene Symbol: RBPJ
  Gene Name: recombination signal binding protein for immunoglobulin kappa J region
  ENST ID: ENST00000505958
  CDS Start-End: 674-758
gggggccccgtgcatctttgttcctcgcggccgttgtcgccgcttcgccccgctagtgcccccggccccgggcgctttgtctttcaccgctacccgctgcgactctctacccccggccctttgtttcgccgccttgggcgctttgtccgacccgtggcgtcccgcatcccctctccatctcctcccctccgctgtccttcctcccgtgcccctttgttgtgccacactcttgtcgttagcccagtgacctgccacagcccgggcaccagatttctgccttaattgttcttccattgtctttctcctgtgggtcccctctcacctttctgtatggtcctggatcaccccccgaggctttgtctcccccatccacgggcttattctctcggcacccccttcctctcccgtcatcggttgatttatccacaacccacggtgtacgtctgctgaactgtctcagccccggggactccatctgctgcttctaagtgcacacaagactctacgtcattgaaattatgagactatcattcaaatggaagcattatagttcttcggaaccattatgatctcaaaacgaaaggagaatgatacagatacactggctgaggtgttttgaggtgcatcgaagtgttccaagctgtgacttaccttaacatgttcttgaagtaccatggcgtggattaaaaggaaatttggtgagcggcctccacctaaacgacttactagggaagctatgcgaaattatttaaaagagc

SEQ ID NO: 174606 - DNA, 716 bp, Homo sapiens
  Payload ID: 14285
  Gene Symbol: RBPJ
  Gene Name: recombination signal binding protein for immunoglobulin kappa J region
  ENST ID: ENST00000510778
  CDS Start-End: 28-716
aaaacaaaactacagatttggttgcagatgaacttgcattttgtcttcattttttccaaagtgattcattcttcctggttcttgaacacctgcttaaaaatagggcttacttttctctgtccttggggtgcaccaaccatatttgaaaccatgaggaaatttggtgagcggcctccacctaaacgacttactagggaagctatgcgaaattatttaaaagagcgaggggatcaaacagtacttattcttcatgcaaaagttgcacagaagtcatatggaaatgaaaaaaggtttttttgcccacctccttgtgtatatcttatgggcagtggatggaagaaaaaaaaagaacaaatggaacgcgatggttgttctgaacaagagtctcaaccgtgtgcatttattgggataggaaatagtgaccaagaaatgcagcagctaaacttggaaggaaagaactattgcacagccaaaacattgtatatatctgactcagacaagcgaaagcacttcatgttgtctgtaaagatgttctatggcaacagtgatgacattggtgtgttcctcagcaagcggataaaagtcatctccaaaccttccaaaaagaagcagtcattgaaaaatgctgacttatgcattgcctcaggaacaaaggtggctctgtttaatcgactacgatcccagacagttagtaccagatacttgcatgtagaagg

SEQ ID NO: 174607 - DNA, 537 bp, Homo sapiens
  Payload ID: 14285
  Gene Symbol: RBPJ
  Gene Name: recombination signal binding protein for immunoglobulin kappa J region
  ENST ID: ENST00000513182
  CDS Start-End: 23-184
ttttggcgagagtttgtggaagatggcgcctgttgtgacagggaaatttggtgagcggcctccacctaaacgacttactagggaagctatgcgaaattatttaaaagagcgaggggatcaaacagtacttattcttcatgcaaaagttgcacagaagtcatatggaaatgaaaaaaggtgttagtagtaaaggactgctaatgctaatctagccctctggatgtctgtcaaactgccctggattcagagaagtgttctgggctcttacttggtggtggagtgcacagtgggaagaggatctgtcttctttcttgccgatcctggttcaggcctttttgaagagttgcaaaggcgtaaggcgtgaggttacctgggggcatgatcacagtcctcttggctgtgtctttttggcatacaaaataactccagtttttttgcccacctccttgtgtatatcttatgggcagtggatggaagaaaaaaaaagaacaaatggaacgcgatggttgttctgaacaagagtctcaaccgtgtgca

SEQ ID NO: 174608 - DNA, 2489 bp, Homo sapiens
  Payload ID: 14286
  Gene Symbol: RBPJL
  Gene Name: recombination signal binding protein for immunoglobulin kappa J region-like
  Uniprot ID: Q9UBG7
  ENST ID: ENST00000343694
  CDS Start-End: 73-1626
ggttccagcgacagcagcactggactcgtccagagggcggcgggtgagcggctggggccccgtggagccaccatggaccccgcaggggcagcagacccctcagtgcctcccaatcctttgactcacctgagcctgcaggacagatcagagatgcagctgcagagcgaagccgacaggcggagcctcccgggcacttggaccaggtcatccccagagcacaccaccattctgaggggaggcgtgcgcaggtgcctgcagcaacagtgtgaacagactgtgcggatcctgcatgccaaggtggcccagaaatcatacggaaatgagaagcggttcttctgccccccgccctgtgtctacctctcggggcctggctggagggtgaagccagggcaggatcaagctcaccaggcgggggaaacggggcccacggtctgcggttacatgggactggacagcgcgtccggcagcgccactgagacgcagaagctgaatttcgagcagcagccggactccagggaattcggctgcgccaagaccctgtacatctcagatgcagacaagaggaagcactttcggctggtgctgcggctggtgctgcgcgggggccgggagctgggtaccttccacagccgccttatcaaggtcatctcgaagccctcgcagaagaagcagtcgctgaaaaacaccgatctgtgcatatcctccggctcaaaggtctccctcttcaaccgcctgcgctctcagacggtctccacacgctacctctctgtggaggatggggcctttgtggccagtgcacgacagtgggctgccttcacgctccacctggctgatgggcactctgcccaaggagacttcccaccgcgagagggctacgttcgctatggctccctggtgcagctcgtctgcacggtcaccggcatcacactacctcccatgatcatccgtaaagtagcaaaacagtgtgcgctccttgatgtggatgagcccatctcccagctgcacaagtgtgcattccagtttccaggcagtcccccaggagggggtggcacctacttatgccttgccacagagaaggtggtgcaatttcaggcctctccctgccccaaggaggcgaacagggctctgcttaacgacagctcttgctggaccatcatcggcaccgagtcggtggaattttccttcagcaccagcctggcgtgtaccctggagccggtcactccggtgcctctcatcagcaccctagagctgagcggcgggggcgacgtggccacgctggagctccacggagagaacttccacgcggggctcaaggtgtggtttggggacgtggaggcagaaaccatgtacaggagcccgcggtccctggtgtgcgtggtgccggacgtggcggccttctgcagcgactggcgctggctgcgcgctcccatcacaatccccatgagcctggtgcgcgccgacgggctcttctaccctagtgccttctccttcacctacaccccggaatacagcgtgcggccgggtcaccccggcgtccccgagcccgccaccgacgccgacgcgctcctggagagcatccatcaggagttcacgcgcaccaacttccacctcttcatccagacttaggcgcgcccggtagccccggctgcccaccctggagggctgcgcccgcgccaggcgcggggacgtgtttctgggttctaggccctgcttccttgcccctttgctgcagaagggcagctgaaggctcaccctagaaaccgggcctggtgggtcttacccggctcactccctcccttgtccttacacatacaggaagacaagacctgagtggtgctgtctttgtgtccgtcgtgtatggctctccctgtcttcatttcttctcactctgtctctaaacctctctctctctcccttccccctcagtacttagtctacagacctatgtgcgtgtccctatccttctgtccttttctctcttcagctctccctgcctctcacacacaattttacatgccccgaggagccaagtttgggacatttaccctccaggcatctgtgtcccctcttgaagagaaaacacacagcttcacacatccaggcatagggggcaagctcttggggcatcaggaccctggagcaccaggtccttcctggaatattagatccacctggagcaccgggtctctctaagtctcacctggggaattcggtcccacctggggcaccagttcccacctagagcactgtgtcctgccctagagcacaaagacctgctcctcccgagactctctctgactgcagccaggcatagtacctttgcctgtgtttgctccctggtccacagatttggtggctgggcaggtgcctggacagtgatgaggtcttgccgccttaactgtcccccccagtcacttctcccacaggcccagcaggacgcagtcctgaggatcagggattctacagctgcattaaaatcaatcctatcc

SEQ ID NO: 174609 - DNA, 1636 bp, Homo sapiens
  Payload ID: 14286
  Gene Symbol: RBPJL
  Gene Name: recombination signal binding protein for immunoglobulin kappa J region-like
  ENST ID: ENST00000372741
  CDS Start-End: 73-1488
ggttccagcgacagcagcactggactcgtccagagggcggcgggtgagcggctggggccccgtggagccaccatggaccccgcaggggcagcagacccctcagtgcctcccaatcctttgactcacctgagcctgcaggacagatcagagatgcagctgcagagcgaagccgacaggcggagcctcccgggcacttggaccaggtcatccccagagcacaccaccattctgaggggaggcgtgcgcaggtgcctgcagcaacagtgtgaacagactgtgcggatcctgcatgccaaggtggcccagaaatcatacggaaatgagaagcggttcttctgccccccgccctgtgtctacctctcggggcctggctggagggtgaagccagggcaggatcaagctcaccaggcgggggaaacggggcccacggtctgcggttacatgggactggacagcgcgtccggcagcgccactgagacgcagaagctgaatttcgagcagcagccggactccagggaattcggctgcgccaagaccctgtacatctcagatgcagacaagaggaagcactttcggctggtgctgcggctggtgctgcgcgggggccgggagctgggtaccttccacagccgccttatcaaggtcatctcgaagccctcgcagaagaagcagtcgctgaaaaacaccgatctgtgcatatcctccggctcaaaggtctccctcttcaaccgcctgcgctctcagacggtctccacacgctacctctctgtggaggatggggcctttgtggccagtgcacgacagtgggctgccttcacgctccacctggctgatgggcactctgcccaaggagacttcccaccgcgagagggctacgttcgctatggctccctggtgcagctcgtctgcacggtcaccggcatcacactacctcccatgatcatccgtaaagtagcaaaacagtgtgcgctccttgatgtggatgagcccatctcccagctgcacaagtgtgcattccagtttccaggcagtcccccaggagggggtggcacctacttatgccttgccacagagaaggtggtgcaatttcaggcctctccctgccccaaggaggcgaacagggctctgcttaacgacagctcttgctggaccatcatcggcaccgagtcggtggaattttccttcagcaccagcctggcgtgtaccctggagccggtcactccggtgcctctcatcagcaccctagagctgagcggcgggggcgacgtggccacgctggagctccacggagagaacttccacgcggggctcaaggtgtggtttggggacgtggaggcagaaaccatgtacaggtacggggtggagcccgcggtccctggtgtgcgtggtgccggacgtggcggccttctgcagcgactggcgctggctgcgcgctcccatcacaatccccatgagcctggtgcgcgccgacgggctcttctaccctagtgccttctccttcacctacaccccggaatacagcgtgcggccgggtcaccccggcgtccccgagcccgccaccgacgccgacgcgctcctggagagcatccatcaggagttcacgcgcaccaacttccacctcttcatccagacttag

SEQ ID NO: 174610 - DNA, 1623 bp, Homo sapiens
  Payload ID: 14286
  Gene Symbol: RBPJL
  Gene Name: recombination signal binding protein for immunoglobulin kappa J region-like
  Uniprot ID: Q9UBG7
  ENST ID: ENST00000372743
  CDS Start-End: 73-1623
ggttccagcgacagcagcactggactcgtccagagggcggcgggtgagcggctggggccccgtggagccaccatggaccccgcaggggcagcagacccctcagtgcctcccaatcctttgactcacctgagcctgcaggacagatcagagatgcagctgcagagcgaagccgacaggcggagcctcccgggcacttggaccaggtcatccccagagcacaccaccattctgaggggaggcgtgcgcaggtgcctgcagcaacagtgtgaacagactgtgcggatcctgcatgccaaggtggcccagaaatcatacggaaatgagaagcggttcttctgccccccgccctgtgtctacctctcggggcctggctggagggtgaagccagggcaggatcaagctcaccaggcgggggaaacggggcccacggtctgcggttacatgggactggacagcgcgtccggcagcgccactgagacgcagaagctgaatttcgagcagcagccggactccagggaattcggctgcgccaagaccctgtacatctcagatgcagacaagaggaagcactttcggctggtgctgcggctggtgctgcgcgggggccgggagctgggtaccttccacagccgccttatcaaggtcatctcgaagccctcgcagaagaagcagtcgctgaaaaacaccgatctgtgcatatcctccggctcaaaggtctccctcttcaaccgcctgcgctctcagacggtctccacacgctacctctctgtggaggatggggcctttgtggccagtgcacgacagtgggctgccttcacgctccacctggctgatgggcactctgcccaaggagacttcccaccgcgagagggctacgttcgctatggctccctggtgcagctcgtctgcacggtcaccggcatcacactacctcccatgatcatccgtaaagtagcaaaacagtgtgcgctccttgatgtggatgagcccatctcccagctgcacaagtgtgcattccagtttccaggcagtcccccaggagggggtggcacctacttatgccttgccacagagaaggtggtgcaatttcaggcctctccctgccccaaggaggcgaacagggctctgcttaacgacagctcttgctggaccatcatcggcaccgagtcggtggaattttccttcagcaccagcctggcgtgtaccctggagccggtcactccggtgcctctcatcagcaccctagagctgagcggcgggggcgacgtggccacgctggagctccacggagagaacttccacgcggggctcaaggtgtggtttggggacgtggaggcagaaaccatgtacagcccgcggtccctggtgtgcgtggtgccggacgtggcggccttctgcagcgactggcgctggctgcgcgctcccatcacaatccccatgagcctggtgcgcgccgacgggctcttctaccctagtgccttctccttcacctacaccccggaatacagcgtgcggccgggtcaccccggcgtccccgagcccgccaccgacgccgacgcgctcctggagagcatccatcaggagttcacgcgcaccaacttccacctcttcatccagacttag

SEQ ID NO: 174611 - DNA, 702 bp, Homo sapiens
  Payload ID: 14286
  Gene Symbol: RBPJL
  Gene Name: recombination signal binding protein for immunoglobulin kappa J region-like
  ENST ID: ENST00000464504
  CDS Start-End: 1-554
ctgatgggcactctgcccaaggagacttcccaccgcgagagggctacgttcgctatggctccctggtgcagctcgtctgcacggtcaccggcatcacactacctcccatgatcatccgtaaagtagcaaaacagtgtgcgctccttgatgtggatgagcccatctcccagctgcacaagtgtgcattccagtttccaggcagtcccccaggagggggtggcacctacttatgccttgccacagagaaggtggtgcaatttcagcaccagcctggcgtgtaccctggagccggtcactccggtgcctctcatcagcaccctagagctgagcggcgggggcgacgtggccacgctggagctccacggagagaacttccacgcggggctcaaggtgtggtttggggacgtggaggcagaaaccatgtacaggagcccgcggtccctggtgtgcgtggtgccggacgtggcggccttctgcagcgactggcgctggctgcgcgctcccatcacaatccccatgagcctggtgcgcgccgacgggctcttctaccctagtgccttctccttcacctacaccccggaatacagcgtgcggccgggtcaccccggcgtccccgagcccgccaccgacgccgacgcgctcctggagagcatccatcaggagttcacgcgcaccaacttccacctcttcatccagacttag

SEQ ID NO: 174612 - DNA, 2819 bp, Homo sapiens
  Payload ID: 14287
  Gene Symbol: RCVRN
  Gene Name: recoverin
  Uniprot ID: P35243
  ENST ID: ENST00000226193
  CDS Start-End: 442-1044
attgcattctagggcttgatatgagatgccagccccgccccgagatgctcagagttagtgaggaagagaaacagggaacatggctgctgttagagggctggggctgggggtgccggaggccccagctctgagggttccaacctcctgtcctgttctagtatcgtcccgggaggccgagatgaattgcctgcctgccctgggctctttattttaatctcactagggttctgggagcacccccccccaccgctcccgccctccacaaagctcctgggcccctcctcccttcaaggattgcgaagaactggtcgcaaatcctcctaagccaccagcatctcggtcttcagctcacaccagccttgagcccagcctgcggccaggggaccacgcacgtcccacccacccagcgactccccagccgctgcccactcttcctcactcatggggaacagcaaaagtggggccctgtccaaggagatcctggaggagctgcagctgaacaccaagttctcggaggaggagctgtgctcctggtaccagtccttcctgaaggactgtcccaccggccgcatcacccagcagcagttccagagcatctacgccaagttcttccccgacaccgaccccaaggcctacgcccagcatgtgttccgcagcttcgattccaacctcgacggcaccctggacttcaaggagtacgtcatcgccctgcacatgaccaccgcgggcaagaccaaccagaagctggagtgggccttctccctctacgacgtggacggtaacgggaccatcagcaagaatgaagtgctggagatcgtcatggctattttcaaaatgatcactcccgaggacgtgaagctccttccagacgatgaaaacacgccggaaaagcgagccgagaagatctggaagtactttggaaagaatgatgatgataaacttacagagaaagaattcattgaggggacactggccaataaggaaattctgcgactgatccagtttgagcctcaaaaagtgaaggaaaagatgaagaacgcctgatgccaactgttcagctgtcctccctccacctaccactcacatgacacccgtgagcgcctgtgcacacacacacacatgcacacacacgcgcgcgcacacacacacacacacatccaccccagggccaagagaaaggcctgcacacaagcccacagcacagctccctgccaaactgaagcatctgtagtgacccactggttccttcttcctgggtcttcagcattccctcccatcatgcccggtcccacccctccctctgtccaccagcccatggccctgtgctaatcccaggattaggccataggagtcctaagtgtcaccccgctgtaagctcctttgtggagtgctgggtaagcagtttccaataaacgcaagctgagctgggcacgtggctgctggtcatccttcaactggaaaaggaaatgatttctatcagtcacacctcaaagacaaggctgtgttgcgatggcagccctaggctgggctgctttggtgcggaatgagtctaatgcggtcctgctgtcatggagctcatggtccagaggggacaatgaacctggaaggagccatgaccagtggcccaggttaccatggaaacgtgcagagcaccaggggaggacacagtggaaggggctgacttgtcaggggggatcagggaccacatccctgacgaagggagatttaaattcagaaccactgcacacgaggcgggggacggggtcggggtggggaagtctcaaacagaaggcggccaacacagagccgctgaggcatgaatgaccatctcgagttccaggagaaggtcggggtggctggagggtagaaggaggagggagagcaaagtgtgagctgaatctaaaaggtaggcgggggctggaccacgcaaagccctccctgcagcctgtggtaagcacttgggggctcaccatggggacagcggtgccactgtggagttggaagtaggaggggtttatgtttgtaagagaagtccccagcaggctaaaataagtcagagaggagcaactgggggctccctggagtcagggagcccgatgaataagcttttgcagccactcagatggcctgggccaggggaaaggcaatgggatggagaggaccagatccagtgaggacacatttaggaggtagcatccacctggctggctgagggggcaggaggagagagggcaggaatggcagccaggcctgtagcttgggcagtgggtgaatagcaatgccatctatggagatgagaaatacagagagtctttggggtttcagggaacaatgatgaattcagcttcaatatagtatgaggtgaaggcagagccatagatggccctaaagccccttgttttagagacaaggaaaaggagtcccaatgacaggaagcagcttgcccaagggcagccagctgatgagcagaggtcaggcaagggctacccaccggcccccaactgcctcctcaaagctccagggcctgggatacccaggaactccatcagtgcattctccaagatccctggatttgttgctttgaaggcccatttattctccagcctcaagttccaagatgaggtcagaaaaatgcatggataccctggattcttgactgacctgtctgcaacctcttgaggctgaggagtctctagttgctggtattgtggtgatgcctccagaccccactttagccacagagatgacacaatcaccactgccaaagagcactcctctgtgtggagagcaaacgtgagaataaacacttatgaaccgtg

SEQ ID NO: 174613 - DNA, 1054 bp, Homo sapiens
  Payload ID: 14288
  Gene Symbol: RECQL
  Gene Name: RecQ helicase-like
  ENST ID: ENST00000314748
  CDS Start-End: 456-1054
atctgtgattggctgaacggaccgacccggaagggtggatgctctcagctggctggcgggaagattttactcccgagtagcggaaagatctgctcgaggcctgggtgctttggtgtcggagatccgagagtcggagatcggagagtcggacacaggacagtcggacaccggacagtcaaacaccggagagttagaccgggcttctcgggcgaggccggtctgtagcggatcacttcctttcgcccacacattggcggaggagaaaccggaaagttaatcactgccctgctctgagaactcgggcctttaggggcacgttcgcctgctgaccggtcttctgatctccccattcttttccatgcaggaggattggccaccaaagcctgtttattagcagctgccatttgttgaaagaaatttggattattttagaaacaaatttggaaagaaaaagaatggcgtccgtttcagctctaactgaggaactggattctataaccagtgagctacatgcagtagaaattcaaattcaagaacttacggaaaggcaacaagagcttattcagaaaaaaaaagtcctgacaaagaaaataaagcagtgtttagaggattctgatgccggggcaagcaatgaatatgattcttcacctgccgcttggaataaagaagattttccatggtctggtaaagttaaagatattctgcaaaatgtctttaaactggaaaagttcagaccacttcagcttgaaactattaacgtaacaatggctggaaaggaggtatttcttgttatgcctacaggaggtggaaagagcttatgttaccagttaccagcattatgttcagatggttttacactcgtcatttgcccattgatctctcttatggaagaccaattaatggttttaaaacaattaggaatttcagcaaccatgttaaatgcttctagttctaaggagcatgttaaatgggttcatgctgaaatggtaaataaaaactccgagttaaagctgatttatgtgactccagagaaaattgcaaaaagcaaaatgtt

SEQ ID NO: 174614 - DNA, 932 bp, Homo sapiens
  Payload ID: 14288
  Gene Symbol: RECQL
  Gene Name: RecQ helicase-like
  ENST ID: ENST00000396093
  CDS Start-End: 299-932
atctgtgattggctgaacggaccgacccggaagggtggatgctctcagctggctggcgggaagattttactcccgagtagcggaaagatctgctcgaggcctgggtgctttggtgtcggagatccgagagtcggagatcggagagtcggacacaggacagtcggacaccggacagtcaaacaccggagagttagaccgggcttctcggaggattggccaccaaagcctgtttattagcagctgccatttgttgaaagaaatttggattattttagaaacaaatttggaaagaaaaagaatggcgtccgtttcagctctaactgaggaactggattctataaccagtgagctacatgcagtagaaattcaaattcaagaacttacggaaaggcaacaagagcttattcagaaaaaaaaagtcctgacaaagaaaataaagcagtgtttagaggattctgatgccggggcaagcaatgaatatgattcttcacctgccgcttggaataaagaagattttccatggtctggtaaagttaaagatattctgcaaaatgtctttaaactggaaaagttcagaccacttcagcttgaaactattaacgtaacaatggctggaaaggaggtatttcttgttatgcctacaggaggtggaaagagcttatgttaccagttaccagcattatgttcagatggttttacactcgtcatttgcccattgatctctcttatggaagaccaattaatggttttaaaacaattaggaatttcagcaaccatgttaaatgcttctagttctaaggagcatgttaaatgggttcatgctgaaatggtaaataaaaactccgagttaaagctgatttatgtgactccagagaaaattgcaaaaagcaaaatgtttatgtcaagactagagaaagcctatgaagcaagga

SEQ ID NO: 174615 - DNA, 2572 bp, Homo sapiens
  Payload ID: 14288
  Gene Symbol: RECQL
  Gene Name: RecQ helicase-like
  Uniprot ID: P46063
  ENST ID: ENST00000421138
  CDS Start-End: 231-2180
gagatccgagagtcggagatcggagagtcggacacaggacagtcggacaccggacagtcaaacaccggagagttagaccgggcttctcggtggggagaggctctgggataactactgttacagctttgaagggtcaagggaggattggccaccaaagcctgtttattagcagctgccatttgttgaaagaaatttggattattttagaaacaaatttggaaagaaaaagaatggcgtccgtttcagctctaactgaggaactggattctataaccagtgagctacatgcagtagaaattcaaattcaagaacttacggaaaggcaacaagagcttattcagaaaaaaaaagtcctgacaaagaaaataaagcagtgtttagaggattctgatgccggggcaagcaatgaatatgattcttcacctgccgcttggaataaagaagattttccatggtctggtaaagttaaagatattctgcaaaatgtctttaaactggaaaagttcagaccacttcagcttgaaactattaacgtaacaatggctggaaaggaggtatttcttgttatgcctacaggaggtggaaagagcttatgttaccagttaccagcattatgttcagatggttttacactcgtcatttgcccattgatctctcttatggaagaccaattaatggttttaaaacaattaggaatttcagcaaccatgttaaatgcttctagttctaaggagcatgttaaatgggttcatgctgaaatggtaaataaaaactccgagttaaagctgatttatgtgactccagagaaaattgcaaaaagcaaaatgtttatgtcaagactagagaaagcctatgaagcaaggagatttactcgaattgctgtggatgaagttcactgctgtagtcagtggggacatgatttcagacctgattataaggcacttggtatcttaaagcggcagttccctaacgcatcactaattgggctgactgcaactgcaacaaatcacgttttgacggatgctcagaaaattttgtgcattgaaaagtgttttacttttacagcttcttttaataggccaaatctatattatgaggttcggcagaagccctcaaacactgaagattttattgaggatattgtaaagctcattaatgggagatacaaagggcaatcaggaatcatatattgtttttctcagaaagactctgaacaagttacggttagtttgcagaatctgggaattcatgcaggtgcttaccatgccaatttggagccagaagataagaccacagttcatagaaaatggtcagccaatgaaattcaggtagtagtggcaactgttgcatttggtatgggaattgataagccagatgtgaggtttgttatccatcattcaatgagtaaatccatggaaaattattaccaagagagtggacgtgcaggtcgagatgacatgaaagcagactgtattttgtactacggctttggagatatattcagaataagttcaatggtggtgatggaaaatgtgggacagcagaagctttatgagatggtatcatactgtcaaaacataagcaaatgtcgtcgtgtgttgatggctcaacattttgatgaagtatggaactcagaagcatgtaacaaaatgtgcgataactgctgtaaagacagtgcatttgaaagaaagaacataacagagtactgcagagatctaatcaagatcctgaagcaggcagaggaactgaatgaaaaactcactccattgaaactgattgattcttggatgggaaagggtgcagcaaaactgagagtagcaggtgttgtggctcccacacttcctcgtgaagatctggagaagattattgcacactttctaatacagcagtatcttaaagaagactacagttttacagcttatgctaccatttcgtatttgaaaataggacctaaagctaatcttctgaacaatgaggcacatgctattactatgcaagtgacaaagtccacgcagaactctttcagggctgaatcgtctcaaacttgtcattctgaacaaggtgataaaaagatggaggaaaaaaattcaggcaacttccagaagaaggctgcaaacatgcttcagcaatctggttctaagaatacaggagctaagaaaagaaaaatcgatgatgcctgatatgaatgttactaaattttctaattaaagatggtttatgcatgtatatgccattatttttgtagttagacaatagtttttaaaagaatttcatagatattttatatgtatggatctatattttcagagcttatctctgaagatctaaacttttgagaatgtttgaaaattagagatcatgaattatataattttccagtataaaacaagggaaaaatttttatgtaaaaccctttaaatgtaaaatatttgagaataagttcatacaatcgtcttaagttttttatgcctttatatacttagctatattttttcttttgacataactatctttttgaaagcaatattatactgacagaggctcactgagtgatactttaagttaaatatgt

SEQ ID NO: 174616 - DNA, 3702 bp, Homo sapiens
  Payload ID: 14288
  Gene Symbol: RECQL
  Gene Name: RecQ helicase-like
  Uniprot ID: P46063
  ENST ID: ENST00000444129
  CDS Start-End: 470-2419
gtagcggaaagatctgctcgaggcctgggtgctttggtgtcggagatccgagagtcggagatcggagagtcggacacaggacagtcggacaccggacagtcaaacaccggagagttagaccgggcttctcggtggggagaggctctgggataactactgttacagctttgaagggtcaagggtgtgcgctttttgtttcatccttccctttcctgctgcagggcgaggccggtctgtagcggatcacttcctttcgcccacacattggcggaggagaaaccggaaagttaatcactgccctgctctgagaactcgggcctttaggggcacgttcgcctgctgaccggtcttctgatctccccattcttttccatgcaggaggattggccaccaaagcctgtttattagcagctgccatttgttgaaagaaatttggattattttagaaacaaatttggaaagaaaaagaatggcgtccgtttcagctctaactgaggaactggattctataaccagtgagctacatgcagtagaaattcaaattcaagaacttacggaaaggcaacaagagcttattcagaaaaaaaaagtcctgacaaagaaaataaagcagtgtttagaggattctgatgccggggcaagcaatgaatatgattcttcacctgccgcttggaataaagaagattttccatggtctggtaaagttaaagatattctgcaaaatgtctttaaactggaaaagttcagaccacttcagcttgaaactattaacgtaacaatggctggaaaggaggtatttcttgttatgcctacaggaggtggaaagagcttatgttaccagttaccagcattatgttcagatggttttacactcgtcatttgcccattgatctctcttatggaagaccaattaatggttttaaaacaattaggaatttcagcaaccatgttaaatgcttctagttctaaggagcatgttaaatgggttcatgctgaaatggtaaataaaaactccgagttaaagctgatttatgtgactccagagaaaattgcaaaaagcaaaatgtttatgtcaagactagagaaagcctatgaagcaaggagatttactcgaattgctgtggatgaagttcactgctgtagtcagtggggacatgatttcagacctgattataaggcacttggtatcttaaagcggcagttccctaacgcatcactaattgggctgactgcaactgcaacaaatcacgttttgacggatgctcagaaaattttgtgcattgaaaagtgttttacttttacagcttcttttaataggccaaatctatattatgaggttcggcagaagccctcaaacactgaagattttattgaggatattgtaaagctcattaatgggagatacaaagggcaatcaggaatcatatattgtttttctcagaaagactctgaacaagttacggttagtttgcagaatctgggaattcatgcaggtgcttaccatgccaatttggagccagaagataagaccacagttcatagaaaatggtcagccaatgaaattcaggtagtagtggcaactgttgcatttggtatgggaattgataagccagatgtgaggtttgttatccatcattcaatgagtaaatccatggaaaattattaccaagagagtggacgtgcaggtcgagatgacatgaaagcagactgtattttgtactacggctttggagatatattcagaataagttcaatggtggtgatggaaaatgtgggacagcagaagctttatgagatggtatcatactgtcaaaacataagcaaatgtcgtcgtgtgttgatggctcaacattttgatgaagtatggaactcagaagcatgtaacaaaatgtgcgataactgctgtaaagacagtgcatttgaaagaaagaacataacagagtactgcagagatctaatcaagatcctgaagcaggcagaggaactgaatgaaaaactcactccattgaaactgattgattcttggatgggaaagggtgcagcaaaactgagagtagcaggtgttgtggctcccacacttcctcgtgaagatctggagaagattattgcacactttctaatacagcagtatcttaaagaagactacagttttacagcttatgctaccatttcgtatttgaaaataggacctaaagctaatcttctgaacaatgaggcacatgctattactatgcaagtgacaaagtccacgcagaactctttcagggctgaatcgtctcaaacttgtcattctgaacaaggtgataaaaagatggaggaaaaaaattcaggcaacttccagaagaaggctgcaaacatgcttcagcaatctggttctaagaatacaggagctaagaaaagaaaaatcgatgatgcctgatatgaatgttactaaattttctaattaaagatggtttatgcatgtatatgccattatttttgtagttagacaatagtttttaaaagaatttcatagatattttatatgtatggatctatattttcagagcttatctctgaagatctaaacttttgagaatgtttgaaaattagagatcatgaattatataattttccagtataaaacaagggaaaaatttttatgtaaaaccctttaaatgtaaaatatttgagaataagttcatacaatcgtcttaagttttttatgcctttatatacttagctatattttttcttttgacataactatctttttgaaagcaatattatactgacagaggctcactgagtgatactttaagttaaatatgtagatcaaggatgtccaatcttttggcttccctgagccacattggaagaagaattgtcttgggccgcacataaaatatgctaacactgatgatagctgatgagcttaaaaaaaaaattgcaagaaaaatctcatgttttaagaaagtttacaaaaaatgtaaaatatttgagaataagttcatgtaattgtcttaagttttttatgcctttatatacttagctatattttttcttttgacataaccatctttttgaaagcaatattatactgacagaggttcactgagtgatactttaagttaaatatgtagatcagggatgtccaatcttttggcttccctgagccacattggaagaagaattgtcttgggccgcacataaaatatgctaacactgacgatagctgatgagcttaaaaaaaaaaaaattgcaagaaaaatctcatgttttaagaaagtttacagatttgtgttgggctgcattcaaagctgttctgggctgcattagacccgtgggctagagttggacaagcttgtagatgatttcaggttataaaaccagaagtacaattcaacaaaaaaggagtaagtcatcaatataaatattagcaaacgagatattgctacatctctatttaaagtaaaatacaaccgattttaaagttcctgaaaccatagccatattttgacatttcacaaagaatggttctagtctactagagtacatttggctaagtagataacttacctaaatttgctccaaagctaaatcacaagtaaacatatttatgtttaaaacacagaaataaataacttaagatttttatctaagcggtcagtgttgtattggaaagatatatctataaataaactttgaactgatttcaaactt

SEQ ID NO: 174617 - DNA, 565 bp, Homo sapiens
  Payload ID: 14288
  Gene Symbol: RECQL
  Gene Name: RecQ helicase-like
  ENST ID: ENST00000536240
  CDS Start-End: 247-565
gattggctgaacggaccgacccggaagggtggatgctctcagctggctggcgggaagattttactcccgagtagcggaaagatctgctcgaggcctgggtgctttggtgtcggagatccgagagtcggagatcggagagtcggacacaggacagtcggacaccggacagtcaaacaccggagagttagaccgggcttctcgaaagaaatttggattattttagaaacaaatttggaaagaaaaagaatggcgtccgtttcagctctaactgaggaactggattctataaccagtgagctacatgcagtagaaattcaaattcaagaacttacggaaaggcaacaagagcttattcagaaaaaaaaagtcctgacaaagaaaataaagcagtgtttagaggattctgatgccggggcaagcaatgaatatgattcttcacctgccgcttggaataaagaagattttccatggtctggtaaagttaaagatattctgcaaaatgtctttaaactggaaaagttcagaccacttcagcttgaaactattaacgtaacaatggctggaa

SEQ ID NO: 174618 - DNA, 579 bp, Homo sapiens
  Payload ID: 14288
  Gene Symbol: RECQL
  Gene Name: RecQ helicase-like
  ENST ID: ENST00000539672
  CDS Start-End: 362-579
gtagcggaaagatctgctcgaggcctgggtgctttggtgtcggagatccgagagtcggagatcggagagtcggacacaggacagtcggacaccggacagtcaaacaccggagaggcgaggccggtctgtagcggatcacttcctttcgcccacacattggcggaggagaaaccggaaagttaatcactgccctgctctgagaactcgggcctttaggggcacgttcgcctgctgaccggtcttctgatctccccattcttttccatgcaggaggattggccaccaaagcctgtttattagcagctgccatttgttgaaagaaatttggattattttagaaacaaatttggaaagaaaaagaatggcgtccgtttcagctctaactgaggaactggattctataaccagtgagctacatgcagtagaaattcaaattcaagaacttacggaaaggcaacaagagcttattcagaaaaaaaaagtcctgacaaagaaaataaagcagtgtttagaggattctgatgccggggcaagcaatgaatatgattcttcacctgccgcttggaataaagaagattt

SEQ ID NO: 174619 - DNA, 600 bp, Homo sapiens
  Payload ID: 14288
  Gene Symbol: RECQL
  Gene Name: RecQ helicase-like
  ENST ID: ENST00000542432
  CDS Start-End: 207-600
gagtagcggaaagatctgctcgaggcctgggtgctttggtgtcggagatccgagagtcggagatcggagagtcggacacaggacagtcggacaccggacagtcaaacaccggagagaggattggccaccaaagcctgtttattagcagctgccatttgttgaaagaaatttggattattttagaaacaaatttggaaagaaaaagaatggcgtccgtttcagctctaactgaggaactggattctataaccagtgagctacatgcagtagaaattcaaattcaagaacttacggaaaggcaacaagagcttattcagaaaaaaaaagtcctgacaaagaaaataaagcagtgtttagaggattctgatgccggggcaagcaatgaatatgattcttcacctgccgcttggaataaagaagattttccatggtctggtaaagttaaagatattctgcaaaatgtctttaaactggaaaagttcagaccacttcagcttgaaactattaacgtaacaatggctggaaaggaggtatttcttgttatgcctacaggaggtggaaagagcttatgttaccagttaccagcattatgttcagatg

SEQ ID NO: 174620 - DNA, 578 bp, Homo sapiens
  Payload ID: 14288
  Gene Symbol: RECQL
  Gene Name: RecQ helicase-like
  ENST ID: ENST00000536964
  CDS Start-End: 289-578
gaacggaccgacccggaagggtggatgctctcagctggctggcgggaagattttactcccgagtagcggaaagatctgctcgaggcctgggtgctttggtgtcggagatccgagagtcggagatcggagagtcggacacaggacagtcggacaccggacagtcaaacaccggagagttagaccgggcttctcggtggggagaggctctgggataactactgttacagctttgaagggtcaaggaaagaaatttggattattttagaaacaaatttggaaagaaaaagaatggcgtccgtttcagctctaactgaggaactggattctataaccagtgagctacatgcagtagaaattcaaattcaagaacttacggaaaggcaacaagagcttattcagaaaaaaaaagtcctgacaaagaaaataaagcagtgtttagaggattctgatgccggggcaagcaatgaatatgattcttcacctgccgcttggaataaagaagattttccatggtctggtaaagttaaagatattctgcaaaatgtctttaaactggaaaagttcagaccacttcagct

SEQ ID NO: 174621 - DNA, 725 bp, Homo sapiens
  Payload ID: 14289
  Gene Symbol: RECQL4
  Gene Name: RecQ helicase-like 4
  ENST ID: ENST00000534538
  CDS Start-End: 1-47
tggaggcggcgccggaggagacccgcggggcccaggccccaccctgaccccgcctcccgctcgcccacgcagcgctctaccgggaataccgcactctgaagcgtaccacgggccaggccggcggcgggctccgcagctccgagtcgctccccgcggcggccgaagaggcgccagagccccgctgctgggggccccatctgaatcgggctgcgaccaagagtccacagtctacgccagggcggagccgccagggctcggtgccggactacgggcagcggctcaaggccaatctgaaaggcaccctgcagaaaaagtcagtgatgagcctccacagctccctgagccccagccaaggccaggccggctccagcatctgcaggcatccctgagccagcggctgggctccctagatcctggctggttacagcgatgtcacagtgaggtcccagattttctgggggcccccaaagcctgcaggcctgatctaggctcagaggaatcacaacttctgatccctggtgagtcggctgtccttggtcctggtgctggctcccagggcccagaggcttcagccttccaagaagtcagcatccgtgtggggagcccccagcccagcagcagtggaggcgagaagcggagatggaacgaggagccctgggagagccccgcacaggtccagcaggagagcagccaagctggacccccatcggagggggctggggctg

SEQ ID NO: 174622 - DNA, 781 bp, Homo sapiens
  Payload ID: 14289
  Gene Symbol: RECQL4
  Gene Name: RecQ helicase-like 4
  ENST ID: ENST00000301323
  CDS Start-End: 1-112
ggcgaccacctatacccattgccgtctgaactgccctgggggccctgcccagctccaggccctggcccacaggtgtgcggcgtgggacaggggtgcttgtggagttcagtgagctggccttccaccttcgcagcccgggggacttgaccgctgaggagaaggaccagatatgtgacttcctctatggccgtgtgcaggcccgggagcgccaggccctggcccgtctgcgcagaaccttccaggcctttcacagcgtagccttccccagctgcgggccctgcctggagcagcaggatgaggagcgcagcaccaggctcaaggacctgctcggccgctactttgaggaagaggaagggcaggagccgggaggcatggaggacgcacagggccccgagccagggcaggccagactccaggattgggaggaccaggtccgctgcgacatccgccagttcctgtccctgaggccagaggagaagttctccagcagggctgtggcccgcatcttccacggcatcggaagcccctgctacccggcccaggtgtacgggcaggaccgacgcttctggagaaaatacctgcacctgagcttccatgccctggtgggcctggccacggaagagctcctgcaggtggcccgctgactgcactgcattgggggatgtcgggtagagctggggttgtcagaggctagggcagtgactgaggacctgggcaaaacctgccacagggtgtgggaacgaggaggctccaaaatgcagaataaaaaatgctcactttg

SEQ ID NO: 174623 - DNA, 1055 bp, Homo sapiens
  Payload ID: 14289
  Gene Symbol: RECQL4
  Gene Name: RecQ helicase-like 4
  ENST ID: ENST00000532846
  CDS Start-End: 1-1055
gctcctccgcaagcaggcatggaagcagaagtggcggaagaaaggggagtgttttgggggtggtggtgccacagtcacaaccaaggagtcttgtttcctgaacgagcagttcgatcactgggcagcccagtgtccccggccagcaagtgaggaagacacagatgctgttgggcctgagccactggttccttcaccacaacctgtacctgaggtgcccagcctggaccccaccgtgctgccactctactccctggggccctcagggcagttggcagagacgccggctgaggtgttccaggccctggagcagctggggcaccaagcctttcgccctgggcaggagcgtgcagtcatgcggatcctgtctggtgccggcaagtccctgtgctaccagctcccagcgctgctctacagccggcgcagcccctgcctcacgttggtcgtctctcccctgctgtcactcatggatgaccaggtgtctggcctgccaccgtgtctcaaggcggcctgcatacactcgggcatgaccaggaagcaacgggaatctgtcctgcagaagattcgggcagcccaggtacacgtgctgatgctgacacctgaggcactggtgggggcgggaggcctccctccagccgcacagctgcctccagttgcttttgcctgcattgatgaggcccactgcctctcccagtggtcccacaacttccggccctgctacctgcgcgtctgcaaggtgcttcgggagcgcatgggcgtgcactgcttcctgggcctcacagccacagccacacgccgcactgccagtgacgtggcacagcacctggctgtggctgaagagcctgacctccacgggccagccccagttcccaccaacctgcacctttccgtgtccatggacagggacacagaccaggcactgttgacgctgctgcaaggcaaacgttttcaaaacctcgattccattatcatttactgcaaccggcgcgaggacacagagcggatcgctgcgctcctccgaacctgcctgcacgcagcctgggtcccagggtctggag

SEQ ID NO: 174624 - DNA, 686 bp, Homo sapiens
  Payload ID: 14289
  Gene Symbol: RECQL4
  Gene Name: RecQ helicase-like 4
  ENST ID: ENST00000524998
  CDS Start-End: 1-686
gggaataccgcactctgaagcgtaccacgggccaggccggcggcgggctccgcagctccgagtcgctccccgcggcggccgaagaggcgccagagccccgctgctgggggccccatctgaatcgggctgcgaccaagagtccacagtctacgccagggcggagccgccagggctcggtgccggactacgggcagcggctcaaggccaatctgaaaggcaccctgcagggcccagaggcttcagccttccaagaagtcagcatccgtgtggggagcccccagcccagcagcagtggaggcgagaagcggagatggaacgaggagccctgggagagccccgcacaggtccagcaggagagcagccaagctggacccccatcggagggggctggggctgtagcagttgaggaagaccctccaggggaacctgtacaggcacagccacctcagccctgcagcagcccatcgaaccccaggtaccacggactcagcccctccagtcaagctagggctgggaaggctgagggcacagcccccctgcacatcttccctcggctggcccgccatgacaggggcaattacgtacggctcaacatgaagcagaaacactacgtgcggggccgggcactccgtagcaggctcctccgcaagcaggcatggaagcagaagtggcggaagaaaggggag

SEQ ID NO: 174625 - DNA, 1165 bp, Homo sapiens
  Payload ID: 14289
  Gene Symbol: RECQL4
  Gene Name: RecQ helicase-like 4
  ENST ID: ENST00000534626
  CDS Start-End: 1-1165
gccaccgtgtctcaaggcggcctgcatacactcgggcatgaccaggaagcaacgggaatctgtcctgcagaagattcgggcagcccaggtacacgtgctgatgctgacacctgaggcactggtgggggcgggaggcctccctccagccgcacagctgcctccagttgcttttgcctgcattgatgaggcccactgcctctcccagtggtcccacaacttccggccctgctacctgcgcgtctgcaaggtgcttcgggagcgcatgggcgtgcactgcttcctgggcctcacagccacagccacacgccgcactgccagtgacgtggcacagcacctggctgtggctgaagagcctgacctccacgggccagccccagttcccaccaacctgcacctttccgtgtccatggacagggacacagaccaggcactgttgacgctgctgcaaggcaaacgttttcaaaacctcgattccattatcatttactgcaaccggcgcgaggacacagagcggatcgctgcgctcctccgaacctgcctgcacgcagcctgggtcccagggtctggaggtcgtgcccccaaaaccacagccgaggcctaccacgcgggcatgtgcagccgggaacggcggcggggcgaagacctgcgagagctgcgcagacatgtgcacgccgacagcacggacttcctggctgtgaagaggctggtacagcgcgtgttcccagcctgcacctgcacctgcaccaggccgccctcggagcaggaaggggccgtgggtggggagaggcctgtgcccaagtacccccctcaagaggctgagcagcttagccaccaagcagccccaggacccagaagggtctgcatgggccatgagcgggcactcccaatacagcttaccgtacaggctttggacatgccggaggaggccatcgagactttgctgtgctacctggagctgcacccacaccactggctggagctgctggcgaccacctatacccattgccgtctgaactgccctgggggccctgcccagctccaggccctggcccacaggtgtccccctttggctgtgtgcttggcccagcagctgcctgaggacccagggcaaggcagcagctccgtggagtttgacatggtcaagctggtggactccatgggctgg

SEQ ID NO: 174626 - DNA, 988 bp, Homo sapiens
  Payload ID: 14289
  Gene Symbol: RECQL4
  Gene Name: RecQ helicase-like 4
  ENST ID: ENST00000531875
  CDS Start-End: 1-882
gccatcgagactttgctgtgctacctggagctgcacccacaccactggctggagctgctggcgaccacctatacccattgccgtctgaactgccctgggggccctgcccagctccaggccctggcccacaggtgtccccctttggctgtgtgcttggcccagcagctgcctgaggacccagggcaaggcagcagctccgtggagtttgacatggtcaagctggtggactccatgggctgggagctggcctctgtgcggcgggctctctgccagctgcagtgggaccacgagcccaggacaggtgtgcggcgtgggacaggggtgcttgtggagttcagtgagctggccttccaccttcgcagcccgggggacttgaccgctgaggagaaggaccagatatgtgacttcctctatggccgtgtgcaggcccgggagcgccaggccctggcccgtctgcgcagaaccttccaggcctttcacagcgtagccttccccagctgcgggccctgcctggagcagcaggatgaggagcgcagcaccaggctcaaggacctgctcggccgctactttgaggaagaggaagggcaggagccgggaggcatggaggacgcacagggccccgagccagggcaggccagagtgagtgcactccaggattgggaggaccaggtccgctgcgacatccgccagttcctgtccctgaggccagaggagaagttctccagcagggctgtggcccgcatcttccacggcatcggaagcccctgctacccggcccaggtgtacgggcaggaccgacgcttctggagaaaatacctgcacctgagcttccatgccctggtgggcctggccacggaagagctcctgcaggtggcccgctgactgcactgcattgggggatgtcgggtagagctggggttgtcagaggctagggcagtgactgaggacctgggcaaaacctgccacagggtgtgggaacgaggaggct

SEQ ID NO: 174627 - DNA, 3809 bp, Homo sapiens
  Payload ID: 14289
  Gene Symbol: RECQL4
  Gene Name: RecQ helicase-like 4
  ENST ID: ENST00000617875
  CDS Start-End: 43-3669
ctggacgatcgcaagcgcggaggccgggcgggcgcgcgcgccatggagcggctgcgggacgtgcgggagcggctgcaggcgtgggagcgcgcgttccgacggcagcgcgggcggcgaccgagccaggacgacgtggaggcggcgccggaggagacccgcgcgctctaccgggaataccgcactctgaagcgtaccacgggccaggccggcggcgggctccgcagctccgagtcgctccccgcggcggccgaagaggcgccagagccccgctgctgggggccccatctgaatcgggctgcgaccaagagtccacagtctacgccagggcggagccgccagggctcggtgccggactacgggcagcggctcaaggccaatctgaaaggcaccctgcaggccggaccagccctgggccgcagaccgtggcctctaggaagagcctcatctaaggcatccaccccaaagcccccaggtacagggcctgtcccctcctttgcagaaaaagtcagtgatgagcctccacagctccctgagccccagccaaggccaggccggctccagcatctgcaggcatccctgagccagcggctgggctccctagatcctggctggttacagcgatgtcacagtgaggtcccagattttctgggggcccccaaagcctgcaggcctgatctaggctcagaggaatcacaacttctgatccctggtgagtcggctgtccttggtcctggtgctggctcccagggcccagaggcttcagccttccaagaagtcagcatccgtgtggggagcccccagcccagcagcagtggaggcgagaagcggagatggaacgaggagccctgggagagccccgcacaggtccagcaggagagcagccaagctggacccccatcggagggggctggggctgtagcagttgaggaagaccctccaggggaacctgtacaggcacagccacctcagccctgcagcagcccatcgaaccccaggtaccacggactcagcccctccagtcaagctagggctgggaaggctgagggcacagcccccctgcacatcttccctcggctggcccgccatgacaggggcaattacgtacggctcaacatgaagcagaaacactacgtgcggggccgggcactccgtagcaggctcctccgcaagcaggcatggaagcagaagtggcggaagaaaggggagtgttttgggggtggtggtgccacagtcacaaccaaggagtcttgtttcctgaacgagcagttcgatcactgggcagcccagtgtccccggccagcaagtgaggaagacacagatgctgttgggcctgagccactggttccttcaccacaacctgtacctgaggtgcccagcctggaccccaccgtgctgccactctactccctggggccctcagggcagttggcagagacgccggctgaggtgttccaggccctggagcagctggggcaccaagcctttcgccctgggcaggagcgtgcagtcatgcggatcctgtctggcatctccacgctgctggtgctgcctacaggtgccggcaagtccctgtgctaccagctcccagcgctgctctacagccggcgcagcccctgcctcacgttggtcgtctctcccctgctgtcactcatggatgaccaggtgtctggcctgccaccgtgtctcaaggcggcctgcatacactcgggcatgaccaggaagcaacgggaatctgtcctgcagaagattcgggcagcccaggtacacgtgctgatgctgacacctgaggcactggtgggggcgggaggcctccctccagccgcacagctgcctccagttgcttttgcctgcattgatgaggcccactgcctctcccagtggtcccacaacttccggccctgctacctgcgcgtctgcaaggtgcttcgggagcgcatgggcgtgcactgcttcctgggcctcacagccacagccacacgccgcactgccagtgacgtggcacagcacctggctgtggctgaagagcctgacctccacgggccagccccagttcccaccaacctgcacctttccgtgtccatggacagggacacagaccaggcactgttgacgctgctgcaaggcaaacgttttcaaaacctcgattccattatcatttactgcaaccggcgcgaggacacagagcggatcgctgcgctcctccgaacctgcctgcacgcagcctgggtcccagggtctggaggtcgtgcccccaaaaccacagccgaggcctaccacgcgggcatgtgcagccgggaacggcggcgggtacagcgagccttcatgcagggccagttgcgggtggtggtggccacggtggcctttgggatggggctggaccggccagatgtgcgggctgtgctgcatctggggctgcccccaagcttcgagagctacgtgcaggccgtgggccgggccgggcgtgacgggcagcctgcccactgccacctcttcctgcagccccagggcgaagacctgcgagagctgcgcagacatgtgcacgccgacagcacggacttcctggctgtgaagaggctggtacagcgcgtgttcccagcctgcacctgcacctgcaccaggccgccctcggagcaggaaggggccgtgggtggggagaggcctgtgcccaagtacccccctcaagaggctgagcagcttagccaccaagcagccccaggacccagaagggtctgcatgggccatgagcgggcactcccaatacagcttaccgtacaggctttggacatgccggaggaggccatcgagactttgctgtgctacctggagctgcacccacaccactggctggagctgctggcgaccacctatacccattgccgtctgaactgccctgggggccctgcccagctccaggccctggcccacaggtgtccccctttggctgtgtgcttggcccagcagctgcctgaggacccagggcaaggcagcagctccgtggagtttgacatggtcaagctggtggactccatgggctgggagctggcctctgtgcggcgggctctctgccagctgcagtgggaccacgagcccaggacaggtgtgcggcgtgggacaggggtgcttgtggagttcagtgagctggccttccaccttcgcagcccgggggacttgaccgctgaggagaaggaccagatatgtgacttcctctatggccgtgtgcaggcccgggagcgccaggccctggcccgtctgcgcagaaccttccaggcctttcacagcgtagccttccccagctgcgggccctgcctggagcagcaggatgaggagcgcagcaccaggctcaaggacctgctcggccgctactttgaggaagaggaagggcaggagccgggaggcatggaggacgcacagggccccgagccagggcaggccagactccaggattgggaggaccaggtccgctgcgacatccgccagttcctgtccctgaggccagaggagaagttctccagcagggctgtggcccgcatcttccacggcatcggaagcccctgctacccggcccaggtgtacgggcaggaccgacgcttctggagaaaatacctgcacctgagcttccatgccctggtgggcctggccacggaagagctcctgcaggtggcccgctgactgcactgcattgggggatgtcgggtagagctggggttgtcagaggctagggcagtgactgaggacctgggcaaaacctgccacagggtgtgggaacgaggaggctccaaaatgcagaataaaaaatgctcactttgttt

SEQ ID NO: 174628 - DNA, 3896 bp, Homo sapiens
  Payload ID: 14289
  Gene Symbol: RECQL4
  Gene Name: RecQ helicase-like 4
  ENST ID: ENST00000621189
  CDS Start-End: 1198-3753
cggctgcgcgggagattcgctggacgatcgcaagcgcggaggccgggcgggcgcgcgcgccatggagcggctgcgggacgtgcgggagcggctgcaggcgtgggagcgcgcgttccgacggcagcgcgggcggcgaccgagccaggtgcgggctgcccaggggccgaggggctgagggcgcggcccgcggctgacgcgttccctttacaggacgacgtggaggcggcgccggaggagacccgcgcgctctaccgggaataccgcactctgaagcgtaccacgggccaggccggcggcgggctccgcagctccgagtcgctccccgcggcggccgaagaggcgccagagccccgctgctgggggccccatctgaatcgggctgcgaccaagagtccacagtctacgccagggcggagccgccagggctcggtgccggactacgggcagcggctcaaggccaatctgaaaggcaccctgcaggccggaccagccctgggccgcagaccgtggcctctaggaagagcctcatctaaggcatccaccccaaagcccccaggtacagggcctgtcccctcctttgcagaaaaagtcagtgatgagcctccacagctccctgagccccagccaaggccaggccggctccagcatctgcaggcatccctgagccagcggctgggctccctagatcctggctggttacagcgatgtcacagtgaggtcccagattttctgggggcccccaaagcctgcaggcctgatctaggctcagaggaatcacaacttctgatccctggtgagtcggctgtccttggtcctggtgctggctcccagggcccagaggcttcagccttccaagaagtcagcatccgtgtggggagcccccagcccagcagcagtggaggcgagaagcggagatggaacgaggagccctgggagagccccgcacaggtccagcaggagagcagccaagctggacccccatcggagggggctggggctgtagcagttgaggaagaccctccaggggaacctgtacaggcacagccacctcagccctgcagcagcccatcgaaccccaggtaccacggactcagcccctccagtcaagctagggctgggaaggctgagggcacagcccccctgcacatcttccctcggctggcccgccatgacaggggcaattacgtacggctcaacatgaagcagaaacactacgtgcggggccgggcactccgtagcaggctcctccgcaagcaggcatggaagcagaagtggcggaagaaaggggagtgttttgggggtggtggtgccacagtcacaaccaaggagtcttgtttcctgaacgagcagttcgatcactgggcagcccagtgtccccggccagcaagtgaggaagacacagatgctgttgggcctgagccactggttccttcaccacaacctgtacctgaggtgcccagcctggaccccaccgtgctgccactctactccctggggccctcagggcagttggcagagacgccggctgaggtgttccaggccctggagcagctggggcaccaagcctttcgccctgggcaggagcgtgcagtcatgcggatcctgtctggcatctccacgctgctggtgctgcctacaggtgccggcaagtccctgtgctaccagctcccagcgctgctctacagccggcgcagcccctgcctcacgttggtcgtctctcccctgctgtcactcatggatgaccaggtgtctggcctgccaccgtgtctcaaggcggcctgcatacactcgggcatgaccaggaagcaacgggaatctgtcctgcagaagattcgggcagcccaggtacacgtgctgatgctgacacctgaggcactggtgggggcgggaggcctccctccagccgcacagctgcctccagttgcttttgcctgcattgatgaggcccactgcctctcccagtggtcccacaacttccggccctgctacctgcgcgtctgcaaggtgcttcgggagcgcatgggcgtgcactgcttcctgggcctcacagccacagccacacgccgcactgccagtgacgtggcacagcacctggctgtggctgaagagcctgacctccacgggccagccccagttcccaccaacctgcacctttccgtgtccatggacagggacacagaccaggcactgttgacgctgctgcaaggcaaacgttttcaaaacctcgattccattatcatttactgcaaccggcgcgaggacacagagcggatcgctgcgctcctccgaacctgcctgcacgcagcctgggtcccagggtctggaggtcgtgcccccaaaaccacagccgaggcctaccacgcgggcatgtgcagccgggaacggcggcgggtacagcgagccttcatgcagggccagttgcgggtggtggtggccacggtggcctttgggatggggctggaccggccagatgtgcgggctgtgctgcatctggggctgcccccaagcttcgagagctacgtgcaggccgtgggccgggccgggcgtgacgggcagcctgcccactgccacctcttcctgcagccccagggcgaagacctgcgagagctgcgcagacatgtgcacgccgacagcacggacttcctggctgtgaagaggctggtacagcgcgtgttcccagcctgcacctgcacctgcaccaggccgccctcggagcaggaaggggccgtgggtggggagaggcctgtgcccaagtacccccctcaagaggctgagcagcttagccaccaagcagccccaggacccagaagggtctgcatgggccatgagcgggcactcccaatacagcttaccgtacaggctttggacatgccggaggaggccatcgagactttgctgtgctacctggagctgcacccacaccactggctggagctgctggcgaccacctatacccattgccgtctgaactgccctgggggccctgcccagctccaggccctggcccacaggtgtccccctttggctgtgtgcttggcccagcagctgcctgaggacccagggcaaggcagcagctccgtggagtttgacatggtcaagctggtggactccatgggctgggagctggcctctgtgcggcgggctctctgccagctgcagtgggaccacgagcccaggacaggtgtgcggcgtgggacaggggtgcttgtggagttcagtgagctggccttccaccttcgcagcccgggggacttgaccgctgaggagaaggaccagatatgtgacttcctctatggccgtgtgcaggcccgggagcgccaggccctggcccgtctgcgcagaaccttccaggcctttcacagcgtagccttccccagctgcgggccctgcctggagcagcaggatgaggagcgcagcaccaggctcaaggacctgctcggccgctactttgaggaagaggaagggcaggagccgggaggcatggaggacgcacagggccccgagccagggcaggccagactccaggattgggaggaccaggtccgctgcgacatccgccagttcctgtccctgaggccagaggagaagttctccagcagggctgtggcccgcatcttccacggcatcggaagcccctgctacccggcccaggtgtacgggcaggaccgacgcttctggagaaaatacctgcacctgagcttccatgccctggtgggcctggccacggaagagctcctgcaggtggcccgctgactgcactgcattgggggatgtcgggtagagctggggttgtcagaggctagggcagtgactgaggacctgggcaaaacctgccacagggtgtgggaacgaggaggctccaaaatgcagaataaaaaatgctcactttgttttta

SEQ ID NO: 174629 - DNA, 3704 bp, Homo sapiens
  Payload ID: 14290
  Gene Symbol: RECQL5
  Gene Name: RecQ helicase-like 5
  Uniprot ID: O94762
  ENST ID: ENST00000317905
  CDS Start-End: 161-3136
acggatataagattgcgtgggttctgcctaaagctgaattcccagcgctttggcttctctgagttggggttgtgtataggggtcttcgaacagttccggaaccagccagcagcctttaattcttgggcggaccacggccggttctgtgttcttggctaagatgagcagccaccataccacctttccttttgaccctgagcggcgagtccggagtacgctgaagaaggtctttgggtttgactcttttaagacgcctttacaggagagtgcgaccatggctgtagtaaaaggtaacaaggacgtctttgtgtgcatgcccacaggggcaggaaaatccctatgctatcagctccctgctctgttggccaaaggcatcaccattgtagtctctcctctcattgctttgattcaggaccaagtggaccacttgctaaccctaaaggtacgagtaagttccctgaactcgaagctctctgcacaggaaaggaaggagctgcttgctgacctggagcgagaaaagccccagaccaagattctgtacatcaccccagagatggcagcttcatcctccttccagcccaccctgaactccctggtgtcccgccacctgctgtcttacttggtggtggatgaagctcattgtgtttcccaatgggggcatgactttcgtcctgactacttgcgtctgggtgccctgcgctcccgcctgggacatgccccttgtgtggctctgaccgccacagccaccccacaggtccaagaggacgtgtttgctgccctgcacctgaagaaaccagttgccatcttcaagactccctgcttccgggccaacctcttctatgatgtgcaattcaaggaactgatttctgatccctatgggaacctgaaggacttctgccttaaggctcttggacaggaggctgataaagggttatctggctgcggcattgtgtactgcaggactagagaggcttgtgaacagctggccatagagctcagctgcaggggtgtgaacgccaaggcttaccatgcagggctgaaggcctctgaaagaacgctggtgcagaacgactggatggaggagaaggtccctgtaattgttgcaaccattagttttgggatgggagtggataaagccaatgtcaggtttgtcgcccattggaatattgccaagtctatggctgggtactaccaggagtctggccgggctggcagggatgggaagccttcctggtgccgtctctattactccaggaatgaccgggaccaagtcagcttcctgatcaggaaggaagtagcaaaactccaggaaaagagaggaaacaaagcatctgataaagccactatcatggcctttgatgccctggtgaccttctgtgaagaactggggtgccgccatgccgccattgccaagtacttcggggatgcgctgcctgcctgcgccaaaggctgcgaccactgccagaaccccacggccgtgcggaggcggctggaggccttggagcgcagcagcagctggagcaagacctgcatcgggccctcccaggggaacggctttgaccccgagctgtatgagggaggccgcaagggctacggggacttcagcaggtatgacgaaggttctggaggcagcggggatgaaggcagagatgaggcccacaagcgggagtggaacctcttctatcagaagcagatgcagctgcgcaagggcaaagaccccaagatagaagaatttgtacccccagatgagaactgtcccctgaaagaggcttctagcaggaggatccccaggctgactgtgaaggcacgggagcactgcctgcggcttctggaggaggcgctgagcagcaaccgccagtcaacacgtaccgctgatgaagctgacctccgggccaaggccgtggagctggaacatgagacattccggaacgccaaggtggccaacctctacaaggccagcgtgctgaagaaggtggccgatatccacagagcctccaaggatgggcagccctatgacatgggaggcagtgccaagagctgcagtgcccaagctgagcccccggagcccaatgagtatgacattccaccagcctcccatgtgtactcgctcaaacccaagcgggtgggagctggtttccccaaaggctcctgcccgttccagacggccacggaactgatggagacaactcggatcagggagcaagccccccagcccgagcggggaggcgagcacgagcccccgagccggccctgtggcctcctggatgaggatgggagtgagcccctccctgggcccagaggggaggtccctggaggcagcgctcactatggggggccctcccctgagaagaaggcaaaaagttcctctgggggcagctcccttgccaagggccgggctagcaagaaacagcagctcctagccacagcggcccacaaggattctcagagcatcgcccgcttcttctgccgaagggtggaaagcccagctctgctggcatcagccccagaggcagaaggtgcctgcccctcctgtgagggggttcagggacccccgatggccccagagaagtacacaggggaggaagatggagccgggggacattcgcctgcccctccccagactgaggagtgcctcagggagaggccaagcacctgcccgcccagagaccagggcacccctgaagtccagcccacccctgcaaaggacacatggaagggcaagcggcctcgatcccagcaggagaacccagagagccagcctcagaagaggccacgcccctcagccaagccctccgtcgtagctgaggtcaagggcagcgtctcggccagcgaacagggcaccttgaatcccacggctcaagaccccttccagctctccgctcctggcgtctccttgaaggaggctgcaaatgttgtggtcaagtgcctcacccctttctacaaggagggcaagtttgcttccaaggagttgtttaaaggctttgcccgccacctctcacacttgctgactcagaagacctctcctggaaggagcgtgaaagaagaggcccagaacctcatcaggcacttcttccatggccgggcccggtgcgagagcgaagctgactggcatggcctgtgtggcccccagagatgaccaactgctggctgggcagggcccgcgtcctcccccagattctagcatgggtcatcctgggcctcacctgctgatgccagggccatcgtcttttctcagtccttctcctttccaaccatacttggctttggggatgaccccagacaccccctgaatccaggtcagaggtcagcccacctttctttctgcttgcaaagcctatagacccttctcagagcggtcctcatggctgggttttctgggacacatgtcgaggacagaaggtggagggtggtggagctgctgctggaagaaggggaaggaagagtggcccctccccgagttctaagtcaggatgaggcccacctgtccaaggtatcggaacctacccaggggaccctcagatcctccacccactcccccatccattacgatgccagcttccagccttgcccaggtcagagctgtggcagaggagaggcagccaggccctgttcctgctcagctcctgctcaggaaggccaggcctgacagatgtttgggagaggaataaagttgtgttgttgtggggcatgcaggcgtgcacaca

SEQ ID NO: 174630 - DNA, 1749 bp, Homo sapiens
  Payload ID: 14290
  Gene Symbol: RECQL5
  Gene Name: RecQ helicase-like 5
  Uniprot ID: O94762
  ENST ID: ENST00000340830
  CDS Start-End: 161-1468
acggatataagattgcgtgggttctgcctaaagctgaattcccagcgctttggcttctctgagttggggttgtgtataggggtcttcgaacagttccggaaccagccagcagcctttaattcttgggcggaccacggccggttctgtgttcttggctaagatgagcagccaccataccacctttccttttgaccctgagcggcgagtccggagtacgctgaagaaggtctttgggtttgactcttttaagacgcctttacaggagagtgcgaccatggctgtagtaaaaggtaacaaggacgtctttgtgtgcatgcccacaggggcaggaaaatccctatgctatcagctccctgctctgttggccaaaggcatcaccattgtagtctctcctctcattgctttgattcaggaccaagtggaccacttgctaaccctaaaggtacgagtaagttccctgaactcgaagctctctgcacaggaaaggaaggagctgcttgctgacctggagcgagaaaagccccagaccaagattctgtacatcaccccagagatggcagcttcatcctccttccagcccaccctgaactccctggtgtcccgccacctgctgtcttacttggtggtggatgaagctcattgtgtttcccaatgggggcatgactttcgtcctgactacttgcgtctgggtgccctgcgctcccgcctgggacatgccccttgtgtggctctgaccgccacagccaccccacaggtccaagaggacgtgtttgctgccctgcacctgaagaaaccagttgccatcttcaagactccctgcttccgggccaacctcttctatgatgtgcaattcaaggaactgatttctgatccctatgggaacctgaaggacttctgccttaaggctcttggacaggaggctgataaagggttatctggctgcggcattgtgtactgcaggactagagaggcttgtgaacagctggccatagagctcagctgcaggggtgtgaacgccaaggcttaccatgcagggctgaaggcctctgaaagaacgctggtgcagaacgactggatggaggagaaggtccctgtaattgttgcaaccattagttttgggatgggagtggataaagccaatgtcaggtttgtcgcccattggaatattgccaagtctatggctgggtactaccaggagtctggccgggctggcagggatgggaagccttcctggtgccgtctctattactccaggaatgaccgggaccaagtcagcttcctgatcaggaaggaagtagcaaaactccaggaaaagagaggaaacaaagcatctgataaagccactatcatggcctttgatgccctggtgaccttctgtgaagaactggggcgatggggcaggggccacggaaagagtctgagggctgcttggtgtagtcaggttgtgtccaggcatgcggagctgtgagtgcctgcaggagagacacccaggaggagtttttacattttggtctaaaaagctcttggattcatctcatctcatggaatgatcctgtcggatgacgctgacgtgattgcttcagacttagaggtgaataaattgaggtccagagaggtcacagtcacgaagctcatggtagactgaggccactaaacacccgtctcctgattttcagtggcgtcctcatttgcatacacctgggccatcttggtttttgcaagaaaaaagcgaggaaatcagagaaactc

SEQ ID NO: 174631 - DNA, 3576 bp, Homo sapiens
  Payload ID: 14290
  Gene Symbol: RECQL5
  Gene Name: RecQ helicase-like 5
  Uniprot ID: O94762
  ENST ID: ENST00000423245
  CDS Start-End: 114-3008
ctttggcttctctgagttggggttgtgtataggggtcttcgaacagttccggaaccagccagcagcctttaattcttgggcggaccacggccggttctgtgttcttggctaagatgagcagccaccataccacctttccttttgaccctgagcggcgagtccggagtacgctgaagaaggtctttgggtttgactcttttaagacgcctttacaggagagtgcgaccatggctgtagtaaaaggcatcaccattgtagtctctcctctcattgctttgattcaggaccaagtggaccacttgctaaccctaaaggtacgagtaagttccctgaactcgaagctctctgcacaggaaaggaaggagctgcttgctgacctggagcgagaaaagccccagaccaagattctgtacatcaccccagagatggcagcttcatcctccttccagcccaccctgaactccctggtgtcccgccacctgctgtcttacttggtggtggatgaagctcattgtgtttcccaatgggggcatgactttcgtcctgactacttgcgtctgggtgccctgcgctcccgcctgggacatgccccttgtgtggctctgaccgccacagccaccccacaggtccaagaggacgtgtttgctgccctgcacctgaagaaaccagttgccatcttcaagactccctgcttccgggccaacctcttctatgatgtgcaattcaaggaactgatttctgatccctatgggaacctgaaggacttctgccttaaggctcttggacaggaggctgataaagggttatctggctgcggcattgtgtactgcaggactagagaggcttgtgaacagctggccatagagctcagctgcaggggtgtgaacgccaaggcttaccatgcagggctgaaggcctctgaaagaacgctggtgcagaacgactggatggaggagaaggtccctgtaattgttgcaaccattagttttgggatgggagtggataaagccaatgtcaggtttgtcgcccattggaatattgccaagtctatggctgggtactaccaggagtctggccgggctggcagggatgggaagccttcctggtgccgtctctattactccaggaatgaccgggaccaagtcagcttcctgatcaggaaggaagtagcaaaactccaggaaaagagaggaaacaaagcatctgataaagccactatcatggcctttgatgccctggtgaccttctgtgaagaactggggtgccgccatgccgccattgccaagtacttcggggatgcgctgcctgcctgcgccaaaggctgcgaccactgccagaaccccacggccgtgcggaggcggctggaggccttggagcgcagcagcagctggagcaagacctgcatcgggccctcccaggggaacggctttgaccccgagctgtatgagggaggccgcaagggctacggggacttcagcaggtatgacgaaggttctggaggcagcggggatgaaggcagagatgaggcccacaagcgggagtggaacctcttctatcagaagcagatgcagctgcgcaagggcaaagaccccaagatagaagaatttgtacccccagatgagaactgtcccctgaaagaggcttctagcaggaggatccccaggctgactgtgaaggcacgggagcactgcctgcggcttctggaggaggcgctgagcagcaaccgccagtcaacacgtaccgctgatgaagctgacctccgggccaaggccgtggagctggaacatgagacattccggaacgccaaggtggccaacctctacaaggccagcgtgctgaagaaggtggccgatatccacagagcctccaaggatgggcagccctatgacatgggaggcagtgccaagagctgcagtgcccaagctgagcccccggagcccaatgagtatgacattccaccagcctcccatgtgtactcgctcaaacccaagcgggtgggagctggtttccccaaaggctcctgcccgttccagacggccacggaactgatggagacaactcggatcagggagcaagccccccagcccgagcggggaggcgagcacgagcccccgagccggccctgtggcctcctggatgaggatgggagtgagcccctccctgggcccagaggggaggtccctggaggcagcgctcactatggggggccctcccctgagaagaaggcaaaaagttcctctgggggcagctcccttgccaagggccgggctagcaagaaacagcagctcctagccacagcggcccacaaggattctcagagcatcgcccgcttcttctgccgaagggtggaaagcccagctctgctggcatcagccccagaggcagaaggtgcctgcccctcctgtgagggggttcagggacccccgatggccccagagaagtacacaggggaggaagatggagccgggggacattcgcctgcccctccccagactgaggagtgcctcagggagaggccaagcacctgcccgcccagagaccagggcacccctgaagtccagcccacccctgcaaaggacacatggaagggcaagcggcctcgatcccagcaggagaacccagagagccagcctcagaagaggccacgcccctcagccaagccctccgtcgtagctgaggtcaagggcagcgtctcggccagcgaacagggcaccttgaatcccacggctcaagaccccttccagctctccgctcctggcgtctccttgaaggaggctgcaaatgttgtggtcaagtgcctcacccctttctacaaggagggcaagtttgcttccaaggagttgtttaaaggctttgcccgccacctctcacacttgctgactcagaagacctctcctggaaggagcgtgaaagaagaggcccagaacctcatcaggcacttcttccatggccgggcccggtgcgagagcgaagctgactggcatggcctgtgtggcccccagagatgaccaactgctggctgggcagggcccgcgtcctcccccagattctagcatgggtcatcctgggcctcacctgctgatgccagggccatcgtcttttctcagtccttctcctttccaaccatacttggctttggggatgaccccagacaccccctgaatccaggtcagaggtcagcccacctttctttctgcttgcaaagcctatagacccttctcagagcggtcctcatggctgggttttctgggacacatgtcgaggacagaaggtggagggtggtggagctgctgctggaagaaggggaaggaagagtggcccctccccgagttctaagtcaggatgaggcccacctgtccaaggtatcggaacctacccaggggaccctcagatcctccacccactcccccatccattacgatgccagcttccagccttgcccaggtcagagctgtggcagaggagaggcagccaggccctgttcctgctcagctcctgctcaggaaggccaggcctgacagatgtttgggagaggaataaagttgtgttgttgtggggcatgcaggcgtgcacaca

SEQ ID NO: 174632 - DNA, 3710 bp, Homo sapiens
  Payload ID: 14290
  Gene Symbol: RECQL5
  Gene Name: RecQ helicase-like 5
  Uniprot ID: O94762
  ENST ID: ENST00000420326
  CDS Start-End: 161-1393
acggatataagattgcgtgggttctgcctaaagctgaattcccagcgctttggcttctctgagttggggttgtgtataggggtcttcgaacagttccggaaccagccagcagcctttaattcttgggcggaccacggccggttctgtgttcttggctaagatgagcagccaccataccacctttccttttgaccctgagcggcgagtccggagtacgctgaagaaggtctttgggtttgactcttttaagacgcctttacaggagagtgcgaccatggctgtagtaaaaggtaacaaggacgtctttgtgtgcatgcccacaggggcaggaaaatccctatgctatcagctccctgctctgttggccaaaggcatcaccattgtagtctctcctctcattgctttgattcaggaccaagtggaccacttgctaaccctaaaggtacgagtaagttccctgaactcgaagctctctgcacaggaaaggaaggagctgcttgctgacctggagcgagaaaagccccagaccaagattctgtacatcaccccagagatggcagcttcatcctccttccagcccaccctgaactccctggtgtcccgccacctgctgtcttacttggtggtggatgaagctcattgtgtttcccaatgggggcatgactttcgtcctgactacttgcgtctgggtgccctgcgctcccgcctgggacatgccccttgtgtggctctgaccgccacagccaccccacaggtccaagaggacgtgtttgctgccctgcacctgaagaaaccagttgccatcttcaagactccctgcttccgggccaacctcttctatgatgtgcaattcaaggaactgatttctgatccctatgggaacctgaaggacttctgccttaaggctcttggacaggaggctgataaagggttatctggctgcggcattgtgtactgcaggactagagaggcttgtgaacagctggccatagagctcagctgcaggggtgtgaacgccaaggcttaccatgcagggctgaaggcctctgaaagaacgctggtgcagaacgactggatggaggagaaggtccctgtaattgttgcaaccattagttttgggatgggagtggataaagccaatgtcaggtttgtcgcccattggaatattgccaagtctatggctgggtactaccaggagtctggccgggctggcagggatgggaagccttcctggtgccgtctctattactccaggaatgaccgggaccaagtcagcttcctgatcaggaaggaagtagcaaaactccaggaaaagagaggaaacaaagcatctgataaagccactatcatggcctttgatgccctggtgaccttctgtgaagaactggggtaagtgacttattttatatgtggagcaaagtgtcagtgagatcatttacttccccggcacgccctagttaagcagctgacataagacagcccgtaggctaccaagggacacctgcctgcaaaggctgttgtgtcgggcagtgtggaagtcaggaccttgctcttctctattggaggccccgggatctctcgcagtgtggggatttgctcagtattctgagtggtgtccttccctccactccaccctcttctgggatggctggccccacaagccactcagttccaagggatgtgaccagctctgagccatcggctttgtggtcatcatgtgccaccgagctgggacttctggcatcacttgagtagtcctcacccttatccaggacccacacagaagcctgtggccccacttacctcggggagtcatgtgctttgaactcacgcatctgttttacctgcatctgcaggcgatggggcaggggccacggaaagagtctgagggctgcttggtgtagtcaggttgtgtccaggcatgcggagctgtgagtgcctgcaggagagacacccaggaggagtttttacattttggtctaaaaagctcttggattcatctcatctcatggaatgatcctgtcggatgacgctgacgtgattgcttcagacttagaggtgaataaattgaggtccagagaggtcacagtcacgaagctcatggtagactgaggccactaaacacccgtctcctgattttcagtggcgtcctcatttgcatacacctgggccatcttggtttttgcaagaaaaaagcgaggaaatcagagaaactctttgggctgtgtgtttttatttccacctcctcctgttgaccagtgagtcggtggcttctggactgaagctattttcttctccaaactgctgtctctaatttggcctctgtggcaagaccacgcccagcaaaagtggtcggctgcagtgccaggaccacccttgcctgcagcctttgcgaccagagcccttttcaagcacaattaatatgggagttgctaaatttggccttcttaggcttcttgagcagagctcttatttctggtgaggaatgaaagggccaagtgttcctgttcattgtgagtcctgtttgctgaaaaaagctctggggctgtctgaggctctggaatgctctctggagggttaactctgcctgtccccagggtctgctccgcctgccaggcaagggaacaggtcctcccaagggcctctgccttcatttctcctgtcaccttccggggagctgggacttcttagtgcatcagtggcctggttgccaggggctggggtccaggcatctgtggactcaaggagtccaggtgacggtgttgcgctgcctcttgagcagcctcgtgcctgtctcctttgctacatgtgatgattctgaaatccaggcagcaggctggaataaacgctgctggtatgtctgtattggctactgttctttgaataagtgaatgtttctttattgcataactggcgtgtagcacaaagaaaaagccccttctccaccagatatttgcttcctaagaatagttctcattggaggctgaggtcgaagcagcctcccaccagcgatcccttggggcgggcacctggcagtgagggacagagctagtggggtgggctcagcagaagtgggtgcatttctgcaaaggaagctgtaggtttcttgtcagtttgttgtggggtctgaggcacatgggagtgggaccagcagaaaagatactcaggtcagttaactaatgaggcggggctgtggcagccagcggttttcctctcttctctatctgtagctactttctctgggctgcagccttgaaaaagcagtgtttgattattcataacaatgagtgtcttttagtgtcacagggaacagttattaggtttgaagcaacctccagcttgaggcctcggcatcttgagatggaagagcagccttgtgtttagacctggattgaattgggccctgttgtttcctgggatcttggggctgggggtgcccaacagcctggcatcttcttgtttctctgtgtgtttactcattcattcatttattcagctgataaatattgactgatgccagctctgtgccaggcacattggacatgggggatacactagtgggcagaaatagccccgtcccagagccggccatggtggctcatacctgttataccagcactttgggaggctgaagtgggaggatcgcttgagcctgggagttcaagaccagcctgggcaacatggcaagaccctgtctctactaaaaatac

SEQ ID NO: 174633 - DNA, 656 bp, Homo sapiens
  Payload ID: 14290
  Gene Symbol: RECQL5
  Gene Name: RecQ helicase-like 5
  ENST ID: ENST00000582464
  CDS Start-End: 1-356
gttttgggatgggagtggataaagccaatgtcaggtttgtcgcccattggaatattgccaagtctatggctgggtactaccaggagtctggccgggctggcagggatgggaagccttcctggtgccgtctctattactccaggaatgaccgggaccaagtcagcttcctgatcaggaaggaagtagcaaaactccaggaaaagagaggaaacaaagcatctgataaagccactatcatggcctttgatgccctggtgaccttctgtgaagaactggggcgatggggcaggggccacggaaagagtctgagggctgcttggtgtagtcaggttgtgtccaggcatgcggagctgtgagtgcctgcaggagagacacccaggaggagtttttacattttggtctaaaaagctcttggattcatctcatctcatggaatgatcctgtcggatgacgctgacgtgattgcttcagacttagaggtgccgccatgccgccattgccaagtacttcggggatgcgctgcctgcctgcgccaaaggctgcgaccactgccagaaccccacggccgtgcggaggcggctggaggccttggagcgcagcagcagctggagcaagacctgcatcgggccctcccaggggaacggctttgaccccga

SEQ ID NO: 174634 - DNA, 1922 bp, Homo sapiens
  Payload ID: 14290
  Gene Symbol: RECQL5
  Gene Name: RecQ helicase-like 5
  Uniprot ID: O94762
  ENST ID: ENST00000584999
  CDS Start-End: 337-1644
gtgggttctgcctaaagctgaattcccagcgctttggcttctctgagttggggttgtgtataggggtcttcgaacagttccggaaccagccagcagcctttaattcttgggcggaccacggccggttctgatatcttagggtgaagagagggaggtgtcggccagccaagagagaaaattgcggatcttgggctcaggaagacgggagaaggggttcggggtcccggggtggaagaacggtcgtcgtggttgcgcttatagaagtaggagcagagggttctcgtggcaaccttttactacctttgccttaacctttggccactgttcttggctaagatgagcagccaccataccacctttccttttgaccctgagcggcgagtccggagtacgctgaagaaggtctttgggtttgactcttttaagacgcctttacaggagagtgcgaccatggctgtagtaaaaggtaacaaggacgtctttgtgtgcatgcccacaggggcaggaaaatccctatgctatcagctccctgctctgttggccaaaggcatcaccattgtagtctctcctctcattgctttgattcaggaccaagtggaccacttgctaaccctaaaggtacgagtaagttccctgaactcgaagctctctgcacaggaaaggaaggagctgcttgctgacctggagcgagaaaagccccagaccaagattctgtacatcaccccagagatggcagcttcatcctccttccagcccaccctgaactccctggtgtcccgccacctgctgtcttacttggtggtggatgaagctcattgtgtttcccaatgggggcatgactttcgtcctgactacttgcgtctgggtgccctgcgctcccgcctgggacatgccccttgtgtggctctgaccgccacagccaccccacaggtccaagaggacgtgtttgctgccctgcacctgaagaaaccagttgccatcttcaagactccctgcttccgggccaacctcttctatgatgtgcaattcaaggaactgatttctgatccctatgggaacctgaaggacttctgccttaaggctcttggacaggaggctgataaagggttatctggctgcggcattgtgtactgcaggactagagaggcttgtgaacagctggccatagagctcagctgcaggggtgtgaacgccaaggcttaccatgcagggctgaaggcctctgaaagaacgctggtgcagaacgactggatggaggagaaggtccctgtaattgttgcaaccattagttttgggatgggagtggataaagccaatgtcaggtttgtcgcccattggaatattgccaagtctatggctgggtactaccaggagtctggccgggctggcagggatgggaagccttcctggtgccgtctctattactccaggaatgaccgggaccaagtcagcttcctgatcaggaaggaagtagcaaaactccaggaaaagagaggaaacaaagcatctgataaagccactatcatggcctttgatgccctggtgaccttctgtgaagaactggggcgatggggcaggggccacggaaagagtctgagggctgcttggtgtagtcaggttgtgtccaggcatgcggagctgtgagtgcctgcaggagagacacccaggaggagtttttacattttggtctaaaaagctcttggattcatctcatctcatggaatgatcctgtcggatgacgctgacgtgattgcttcagacttagaggtgaataaattgaggtccagagaggtcacagtcacgaagctcatggtagactgaggccactaaacacccgtctcctgattttcagtggcgtcctcatttgcatacacctgggccatcttggtttttgcaagaaaaaagcgaggaaatcagagaaa

SEQ ID NO: 174635 - DNA, 709 bp, Homo sapiens
  Payload ID: 14290
  Gene Symbol: RECQL5
  Gene Name: RecQ helicase-like 5
  ENST ID: ENST00000582548
  CDS Start-End: 1-709
aaaggctcctgcccgttccagacggccacggaactgatggagacaactcggatcagggagcaagccccccagcccgagcggggaggcgagcacgagcccccgagccggccctgtggcctcctggatgaggatgggagtgagcccctccctgggcccagaggggaggtccctggaggcagcgctcactatggggggccctcccctgagaagaaggcaaaaagttcctctgggggcagctcccttgccaagggccgggctagcaagaaacagcagctcctagccacagcggcccacaaggattctcagagcatcgcccgcttcttctgccgaagggtggaaagcccagctctgctggcatcagccccagaggcagaaggtgcctgcccctcctgtgagggggttcagggacccccgatggccccagagaagtacacaggggaggaagatggagccgggggacattcgcctgcccctccccagactgaggagtgcctcagggagaggccaaggcctcctgggatgagggagccaccaggacccagtgctgtgatgcctgctcttccctctaccagcacctgcccgcccagagaccagggcacccctgaagtccagcccacccctgcaaaggacacatggaagggcaagcggcctcgatcccagcaggagaacccagagagccagcctcagaagaggccacgcccctcagcca

SEQ ID NO: 174636 - DNA, 816 bp, Homo sapiens
  Payload ID: 14290
  Gene Symbol: RECQL5
  Gene Name: RecQ helicase-like 5
  ENST ID: ENST00000580078
  CDS Start-End: 1-596
taagttccctgaactcgaagctctctgcacaggaaaggaaggagctgcttgctgacctggagcgagaaaagccccagaccaagattctgtacatcaccccagagatggcagcttcatcctccttccagcccaccctgaactccctggtgtcccgccacctgctgtcttacttggtggtggatgaagctcattgtgtttcccaatgggggcatgactttcgtcctgactacttgcgtctgggtgccctgcgctcccgcctgggacatgccccttgtgtggctctgaccgccacagccaccccacaggtccaagaggacgtgtttgctgccctgcacctgaagaaaccagttgccatcttcaagactccctgcttccgggccaacctcttctatgatgtgcaattcaaggaactgatttctgatccctatgggaacctgaaggacttctgccttaaggctcttggacaggaggctgataaaggggtttgtcgcccattggaatattgccaagtctatggctgggtactaccaggagtctggccgggctggcagggatgggaagccttcctggtgccgtctctattactccaggaatgaccgggaccaagtcagcttcctgatcaggaaggaagtagcaaaactccaggaaaagagaggaaacaaagcatctgataaagccactatcatggcctttgatgccctggtgaccttctgtgaagaactggggtaagtgacttattttatatgtggagcaaagtgtcagtgagatcatttacttccccggcacgccctagttaagcagctgacataagacagc

SEQ ID NO: 174637 - DNA, 793 bp, Homo sapiens
  Payload ID: 14290
  Gene Symbol: RECQL5
  Gene Name: RecQ helicase-like 5
  ENST ID: ENST00000581825
  CDS Start-End: 1-619
tctgctggcatcagccccagaggcagaaggtgcctgcccctcctgtgagggggttcagggacccccgatggccccagagaagtacacaggggaggaagatggagccgggggacattcgcctgcccctccccagactgaggagtgcctcagggagaggccaagcacctgcccgcccagagaccagggcacccctgaagtccagcccacccctgcaaaggacacatggaagggcaagcggcctcgatcccagcaggagaacccagagagccagcctcagaagaggccacgcccctcagccaagccctccgtcgtagctgaggtcaagggcagcgtctcggccagcgaacagggcaccttgaatcccacggctcaagaccccttccagctctccgctcctggcgtctccttgaaggaggctgcaaatgttgtggtcaagtgcctcacccctttctacaaggagggcaagtttgcttccaagcctatagacccttctcagagcggtcctcatggctgggttttctgggacacatgtcgaggacagaaggtggagggtggtggagctgctgctggaagaaggggaaggaagagtggcccctccccgagttctaagtcaggatgaggcccacctgtccaaggtatcggaacctacccaggggaccctcagatcctccacccactcccccatccattacgatgccagcttccagccttgcccaggtcagagctgtggcagaggagaggcagccaggccctgttcctgctcagctcctgctcaggaaggccaggcctgaca

SEQ ID NO: 174638 - DNA, 1972 bp, Homo sapiens
  Payload ID: 14290
  Gene Symbol: RECQL5
  Gene Name: RecQ helicase-like 5
  ENST ID: ENST00000578201
  CDS Start-End: 532-1972
ccagccagcagcctttaattcttgggcggaccacggccggttctgatatcttagggtgaagagagggaggtgtcggccagccaagagagaaaattgcggatcttgggctcaggaagacgggagaaggggttcggggtcccggggtggaagaacggtcgtcgtggttgcgcttatagaagtaggagcaggtggtggatcttaggaaaacggttccccgttctccaagctgttctgaagacatttatgtttcttctcttgatctgatttctagctctgtgctataccgtggcctggaatagttcaatgttttcattttcattgagcgtaaaagtggagatgttaattactgaggaatgtattgcttgaggcagttcaccttcagctttattacttaaaaataatacattatttaagtgtaatatagcaaattgttacagaaaaataatctgtatttttaatgcaaaacagagggttctcgtggcaaccttttactacctttgccttaacctttggccactgttcttggctaagatgagcagccaccataccacctttccttttgaccctgagcggcgagtccggagtacgctgaagaaggtctttgggtttgactcttttaagacgcctttacaggagagtgcgaccatggctgtagtaaaaggtaacaaggacgtctttgtgtgcatgcccacaggggcaggaaaatccctatgctatcagctccctgctctgttggccaaaggcatcaccattgtagtctctcctctcattgctttgattcaggaccaagtggaccacttgctaaccctaaaggtacgagtaagttccctgaactcgaagctctctgcacaggaaaggaaggagctgcttgctgacctggagcgagaaaagccccagaccaagattctgtacatcaccccagagatggcagcttcatcctccttccagcccaccctgaactccctggtgtcccgccacctgctgtcttacttggtggtggatgaagctcattgtgtttcccaatgggggcatgactttcgtcctgactacttgcgtctgggtgccctgcgctcccgcctgggacatgccccttgtgtggctctgaccgccacagccaccccacaggtccaagaggacgtgtttgctgccctgcacctgaagaaaccagttgccatcttcaagactccctgcttccgggccaacctcttctatgatgtgcaattcaaggaactgatttctgatccctatgggaacctgaaggacttctgccttaaggctcttggacaggaggctgataaagggttatctggctgcggcattgtgtactgcaggactagagaggcttgtgaacagctggccatagagctcagctgcaggggtgtgaacgccaaggcttaccatgcagggctgaaggcctctgaaagaacgctggtgcagaacgactggatggaggagaaggtccctgtaattgttgcaaccattagttttgggatgggagtggataaagccaatgtcaggtttgtcgcccattggaatattgccaagtctatggctgggtactaccaggagtctggccgggctggcagggatgggaagccttcctggtgccgtctctattactccaggaatgaccgggaccaagtcagcttcctgatcaggaaggaagtagcaaaactccaggaaaagagaggaaacaaagcatctgataaagccactatcatggcctttgatgccctggtgaccttctgtgaagaactggggtgccgccatgccgccattgccaagtacttcggggatgcgctgcctgcctgcgccaaaggctgcgaccactgccagaaccccacggccgtgcggaggcggctggaggccttggagcgcagcagcagctggagcaagacctgcatcgggccctcccaggggaacggctttgaccccgagctgtatgagggaggccgcaagggctacggggact

SEQ ID NO: 174639 - DNA, 948 bp, Homo sapiens
  Payload ID: 14290
  Gene Symbol: RECQL5
  Gene Name: RecQ helicase-like 5
  ENST ID: ENST00000580707
  CDS Start-End: 377-948
ttcgggggctgccggccaaggcggcggctggtggtggtttctggcttcgctgttccattcccttgtcttgaggtgccgccatgccgccattgccaagtacttcggggatgcgctgcctgcctgcgccaaaggctgcgaccactgccagaaccccacggccgtgcggaggcggctggaggccttggagcgcagcagcagctggagcaagacctgcatcgggccctcccaggggaacggctttgaccccgagctgtatgagggaggccgcaagggctacggggacttcagcaggtatgacgaaggttctggaggcagcggggatgaaggcagagatgaggcccacaagcgggagtggaacctcttctatcagaagcagatgcagctgcgcaagggcaaagaccccaagatagaagaatttgtacccccagatgagaactgtcccctgaaagaggcttctagcaggaggatccccaggctgactgtgaaggcacgggagcactgcctgcggcttctggaggaggcgctgagcagcaaccgccagtcaacacgtaccgctgatgaagctgacctccgggccaaggccgtggagctggaacatgagacattccggaacgccaaggtggccaacctctacaaggccagcgtgctgaagaaggtggccgatatccacagagcctccaaggatgggcagccctatgacatgggaggcagtgccaagagctgcagtgcccaagctgagcccccggagcccaatgagtatgacattccaccagcctcccatgtgtactcgctcaaacccaagcgggtgggagctggtttccccaaaggctcctgcccgttccagacggccacggaactgatggagacaactcggatcagggagcaagccccccagcccgagcggggaggcgagcacgagcccccgagccggccctgtggcctcctgga

SEQ ID NO: 174640 - DNA, 3420 bp, Homo sapiens
  Payload ID: 14291
  Gene Symbol: RMI1
  Gene Name: RecQ mediated genome instability 1
  Uniprot ID: Q9H9A7
  ENST ID: ENST00000325875
  CDS Start-End: 333-2210
aaaaaggaactgggagcgcgccgcggcggttcctgtccttacagttgcgctgcccagggaccgatgttgcgcgaggaaaatgcgggacgcccaggtcggtgctcggcccagacttatgcccgtgttttcacagcccacactcgtgcccgaagccccttaccccgccccgggctgtggtctgtgggctgtgggacgagctgcggcgcgggccatttctgagcagtggaggtttcaagtaatccactaacaaccagttccaaattctgtcatcaaatcctgtgctgctgttcctcgtggtaatagatgcatattatttcttttatttaaaagaaatgaatgtgactagtattgcattaagagctgaaacttggcttttagctgcatggcatgttaaagtacctccgatgtggctggaagcttgtattaactggattcaagaagaaaataataatgttaacttgagtcaggcccaaatgaataaacaagtgtttgagcagtggctccttactgatctgagggatttggagcatcctcttttacccgatggcattttagaaattccaaaaggagaattaaatggattttatgctctgcagattaattccttggttgatgtaagtcagcctgcatactcccagatacagaagttgagaggaaagaatacaacaaatgatctagttacagctgaagcacaagtaaccccaaaaccttgggaagcaaagccttcacgaatgttgatgctgcagctaactgatggaatcgtacaaatacagggaatggaatatcagcctattccaattcttcatagtgatcttcctccaggtacaaaaattttgatttatggaaatatatctttccgtcttggtgttctcttattgaaaccagaaaacgtgaaagtgttaggaggtgaagtagatgctcttttagaagaatatgcccaagaaaaagtacttgcaagattaataggggaacctgatcttgtagtttcagtcataccaaacaattctaacgaaaacattcccagagttacagatgttctagatcctgcattaggtccttctgatgaagaactcttggcaagtcttgatgaaaatgatgagcttacagcaaataatgacacttcctcagaacgatgtttcaccacaggtagttcctcaaataccattcccacaagacagtcaagttttgagccagaatttgttatttctccaagaccaaaagaggaaccatcaaacctatctatacatgtaatggatggagaattagatgacttttcactggaggaggccttgcttttagaagaaactgtccagaaagaacagatggaaactaaggaattgcaaccattgacttttaacagaaatgccgatcgaagtatagagagattttcacataatcctaatactacgaataacttttctttgacttgcaaaaatggaaacaataattggagtgaaaaaaatgtatctgaacaaatgactaatgaagacaaatcatttggttgtccatctgttagagaccaaaacaggagtattttttcagttcattgtaatgtacccttagcccatgattttacaaataaagaaaagaacttagagacagataataaaataaaacaaaccagcagttcagatagccattccttaaataataaaatattaaatagagaggtggtcaactatgtacagaaaaggaattcacaaatttctaatgaaaatgattgtaatttacagagttgttctttaagatcatcagagaatagcattaatctttctattgccatggatttgtattctccaccctttgtctatttgtctgttctaatggccagcaaaccaaaggaagttacaacagtgaaagtgaaagcatttattgtaaccttaactggaaatctctcaagttctggtggtatttggagtataactgcaaaggtgtctgatggtactgcatatctagatgtagactttgtggatgaaatacttactagcttgatagggttctcagtaccagaaatgaaacagtcaaaaaaggatcctcttcaataccaaaagttcctggaagggttgcagaaatgtcaaagagatctaatagatttgtgctgtctaatgactatttcatttaatccttccttgtctaaagcaatggtactggcattacaagatgttaatatggaacaccttgagaatctaaagaagcggttaaataaataattaaactaaaatagtattaggaacaattaaaaacaacaaggaaatatttagaatttgttcacaattttacttatgatactttgtgtaaaaaggaaaaatgaaatttcatagcttatttcagtttaattttaaagtgtttaatcatgtttgttatatgtggagcttttgaaaataagttaatctttttttttttttttttaatgtcagggtattgctctgttgcccaggctagagtgcagtggcatgatcataggttattgcatcaacctcttgagctcaagcgatcctcctgccttagcctcttgagttgctgggactataggcatgtaccaccatgcccagctaatttataattactattattgttttgtagggacagagttttgctatgttgcccagattggtctcaaactcctggcctctcactcctgccgtcatggcctccaaagtttactttttttaaaagtaactgttagatggaggaatatggtgacccactattgttgagaaatttgttttccacttgtcacgtcacataagatgattgctaaaatattgtactggtgttcggtggtgagtcatatttttgaaagttaataattataaataggtaatttccttctaatatgttggtactgtctatggccataccaccctgaacatgcctgagcttgtcataatatgttgagtacccaaaagatttgtttatattgttaatcttagggaaaaaaaattaaaatccagtagatcagaacatcaggctttcagatacaaattgatttactggtttttattttgctgattataatatttggtatatttaaggtaatctagttaactagatgctatttcatagattatattgaatgatttaaaactttattttcaaggatagtttattttaaatggcatattgaaaacatcattattaagatccagtaggtaggacatttattggattaaaatgaagcatttatctatgtctttaggtgtcattgttccctttctgaattagctgtacatataagccttcctttggttttaagtactgatttttttttaaaaaaaagagggactgtttaccattcttccactgtgctgttataaagttgtatttgaaaggtaatgttgtttttattaatcttttgtcttaaaataatttaaagtgctttgaattttaaaacattaaacaaatccttaaataacaaaa

SEQ ID NO: 174641 - DNA, 1553 bp, Homo sapiens
  Payload ID: 14291
  Gene Symbol: RMI1
  Gene Name: RecQ mediated genome instability 1
  ENST ID: ENST00000445877
  CDS Start-End: 307-1553
ggggaaggggcgttttccagccccgaaggagtcctttggggttggaggaggggcgcgagcgcgcggcaaatcgggcgggaagaggtaaaaaaggaactgggagcgcgccgcggcggttcctgtccttacagttgcgctgcccagggaccgatgttgcgcgaggaaaatgcgggacgcccagggccatttctgagcagtggaggtttcaagtaatccactaacaaccagttccaaattctgtcatcaaatcctgtgctgctgttcctcgtggtaatagatgcatattatttcttttatttaaaagaaatgaatgtgactagtattgcattaagagctgaaacttggcttttagctgcatggcatgttaaagtacctccgatgtggctggaagcttgtattaactggattcaagaagaaaataataatgttaacttgagtcaggcccaaatgaataaacaagtgtttgagcagtggctccttactgatctgagggatttggagcatcctcttttacccgatggcattttagaaattccaaaaggagaattaaatggattttatgctctgcagattaattccttggttgatgtaagtcagcctgcatactcccagatacagaagttgagaggaaagaatacaacaaatgatctagttacagctgaagcacaagtaaccccaaaaccttgggaagcaaagccttcacgaatgttgatgctgcagctaactgatggaatcgtacaaatacagggaatggaatatcagcctattccaattcttcatagtgatcttcctccaggtacaaaaattttgatttatggaaatatatctttccgtcttggtgttctcttattgaaaccagaaaacgtgaaagtgttaggaggtgaagtagatgctcttttagaagaatatgcccaagaaaaagtacttgcaagattaataggggaacctgatcttgtagtttcagtcataccaaacaattctaacgaaaacattcccagagttacagatgttctagatcctgcattaggtccttctgatgaagaactcttggcaagtcttgatgaaaatgatgagcttacagcaaataatgacacttcctcagaacgatgtttcaccacaggtagttcctcaaataccattcccacaagacagtcaagttttgagccagaatttgttatttctccaagaccaaaagaggaaccatcaaacctatctatacatgtaatggatggagaattagatgacttttcactggaggaggccttgcttttagaagaaactgtccagaaagaacagatggaaactaaggaattgcaaccattgacttttaacagaaatgccgatcgaagtatagagagattttcacataatcctaatactacgaataacttttctttgacttgcaaaaatggaaacaataattggagtgaaaaaaatgtatctgaacaaatgactaatgaagacaaatcatttggttgtccatctgttagagaccaaaacaggagtattttttcagttcattgtaatgtacccttagcccatgattttacaaa

SEQ ID NO: 174642 - DNA, 1923 bp, Homo sapiens
  Payload ID: 14291
  Gene Symbol: RMI1
  Gene Name: RecQ mediated genome instability 1
  ENST ID: ENST00000615118
  CDS Start-End: 149-1561
cgaggaaaatgcgggacgcccagggccatttctgagcagtggaggtttcaagtaatccactaacaaccagttccaaattctgtcatcaaatcctgtgctgctgttcctcgtggtaatagatgcatattatttcttttatttaaaagaaatgaatgtgactagtattgcattaagagctgaaacttggcttttagctgcatggcatgttaaagtacctccgatgtggctggaagcttgtattaactggattcaagaagaaaataataatgttaacttgagtcaggcccaaatgaataaacaagtgtttgagcagtggctccttactgatctgagggatttggagcatcctcttttacccgatggcattttagaaattccaaaaggagaattaaatggattttatgctctgcagattaattccttggttgatgtaagtcagcctgcatactcccagatacagaagttgagaggaaagaatacaacaaatgatctagttacagctgaagcacaagtaaccccaaaaccttgggaagcaaagccttcacgaatgttgatgctgcagctaactgatggaatcgtacaaatacagggaatggaatatcagcctattccaattcttcatagtgatcttcctccaggtacaaaaattttgatttatggaaatatatctttccgtcttggtgttctcttattgaaaccagaaaacgtgaaagtgttaggaggtgaagtagatgctcttttagaagaatatgcccaagaaaaagtacttgcaagattaataggggaacctgatcttgtagtttcagtcataccaaacaattctaacgaaaacattcccagagttacagatgttctagatcctgcattaggtccttctgatgaagaactcttggcaagtcttgatgaaaatgatgagcttacagcaaataatgacacttcctcagaacgatgtttcaccacaggtagttcctcaaataccattcccacaagacagtcaagttttgagccagaatttgttatttctccaagaccaaaagaggaaccatcaaacctatctatacatgtaatggatggagaattagatgacttttcactggaggaggccttgcttttagaagaaactgtccagaaagaacagatggaaactaaggaattgcaaccattgacttttaacagaaatgccgatcgaagtatagagagattttcacataatcctaatactacgaataacttttctttgacttgcaaaaatggaaacaataattggagtgaaaaaaatgtatctgaacaaatgactaatgaagacaaatcatttggttgtccatctgttagagaccaaaacaggagtattttttcagttcattgtaatgtacccttagcccatgattttacaaataaagaaaagaacttagagacagataataaaataaaacaaaccagcagttcagatagccattccttaaataataaaatattaatagagaggtggtcaactatgtacagaaaaggaattcacaaatttctaatgaaaatgattgtaatttacagagttgttctttaagatcatcagagaatagcattaatctttctattgccatggatttgtattctccaccctttgtctatttgtctgttctaatggccagcaaaccaaaggaagttacaacagtgaaagtgaaagcatttattgtaaccttaactggaaatctctcaagttctggtggtatttggagtataactgcaaaggtgtctgatggtactgcatatctagatgtagactttgtggatgaaatacttactagcttgatagggttctcagtaccagaaatgaaacagtcaaaaaaggatcctcttcaataccaaaagttcctggaagggttgcagaaatgtcaaagagatctaatagatttgtgctgtctaatg

SEQ ID NO: 174643 - DNA, 1457 bp, Homo sapiens
  Payload ID: 14292
  Gene Symbol: RMI2
  Gene Name: RecQ mediated genome instability 2
  Uniprot ID: Q96E14
  ENST ID: ENST00000312499
  CDS Start-End: 42-485
cgggaaagcggaggcggggcggaagggtgcggcgaggcggaatggcggcggctgcggactcgttctcaggcggccccgcgggggtgcggcttccgaggtcgccgccactcaaggtgctggcggagcagctgcggcgcgacgcggagggcggcccgggcgcgtggcggctgtcacgggcggcggcgggccgcgggccgctggacctggcggccgtgtggatgcagggcagggtagtgatggcggaccgcggcgaggctcggctgagggacccgagcggggacttctcggtccgcggcctggagcgggtgccgcgcgggcggccctgtctagtcccaggaaagtatgtgatggtgatgggagtggttcaggcctgcagccctgagccctgcctgcaggctgtgaagatgacagacctttctgataatcccatccatgaaagtatgtgggaactggaggtagaagatttacacaggaatattccttagagtatgttggaactgtcgttaaaaacaaccaaaatcccgaaactatttagaagcttataatgatgtggatttcatggacacttttcaatgcgtatttttcaaatgcttctcagagagccttgctttggttgaccaaggagtccggatgtaggaatgtttaaatcctcggatacttcagtgacacagcctctgctgccccttgctttgcctgtgtttgctgatgaaaagcagatgcttgtgtttcattttccttcctggtttgtgtgtgttaattctctctctctctctcagacacagaagtctcatgttgcattttccaaattttatgagtgatgatactttttccattactgctgcgtccctgttttacaatgcaaaatttaagtacggtcgttgcccatggtgattaaagtgtggttatgggcaggaagacagactgtgtaaaaaaggaatgacatcctggctcctcatcttcttcatcagcaactaccataaccagtttgcgagtcaaatggcatttcctaacggcaggcatggcggcccctgaaagacaacagctccctttctgcttcggacaccactcaaacatttagacgcagctctatcccttttcctagctagagaaggtgatgccttcttccattactcagagatgttgagacgttttcagaatttcttgttgaaatgaaaaacatcaagataaaggacgcctttcaggcattagctaaacttccacttcataactttcggcgagacatggtgagcctcctggtgtagagttcttttgtctttgtatggaatgactttttgctgtgatggttttgaatgttgggtttctgctgtctgcttagtacccatgcctgaattttttgagattgtaaatatcaaaggagttagattgtgttctgacatggttgtagactttcacctggattattgatattctacctctaataaatttttaataggctg

SEQ ID NO: 174644 - DNA, 818 bp, Homo sapiens
  Payload ID: 14292
  Gene Symbol: RMI2
  Gene Name: RecQ mediated genome instability 2
  ENST ID: ENST00000576027
  CDS Start-End: 23-106
cggaagggtgcggcgaggcggaatggcggcggctgcggactcgttctcaggcggccccgcgggggtgcggcttccgaggtcgccgccactcaaggaaagtatgtgatggtgatgggagtggttcaggcctgcagccctgagccctgcctgcaggctgtgaagatgacagacctttctgataatcccatccatgaaagtatgtgggaactggaggtagaagatttacacaggaatattccttagagtatgttggaactgtcgttaaaaacaaccaaaatcccgaaactatttagaagcttataatgatgtggatttcatggacacttttcaatgcgtatttttcaaatgcttctcagagagccttgctttggttgaccaaggagtccggatgtaggaatgtttaaatcctcggatacttcagtgacacagcctctgctgccccttgctttgcctgtgtttgctgatgaaaagcagatgcttgtgtttcattttccttcctggtttgtgtgtgttaattctctctctctctctcagacacagaagtctcatgttgcattttccaaattttatgagtgatgatactttttccattactgctgcgtccctgttttacaatgcaaaatttaagtacggtcgttgcccatggtgattaaagtgtggttatgggcaggaagacagactgtgtaaaaaaggaatgacatcctggctcctcatcttcttcatcagcaactaccataaccagtttgcgagtcaaatggcatttcctaacggcaggcatggcggcccctgaaagacaacagctccctttctgcttcgga

SEQ ID NO: 174645 - DNA, 1865 bp, Homo sapiens
  Payload ID: 14292
  Gene Symbol: RMI2
  Gene Name: RecQ mediated genome instability 2
  Uniprot ID: Q96E14
  ENST ID: ENST00000572173
  CDS Start-End: 646-900
gtcagctggacaaaagccgacccgacttcatttgtctgcctcgaccccgaccccggctggtagacagcactcctgatgcacgggacgagggagcggcacgagcaaaggccctgaaacaggagggagcgcggggtacctgagtgagattcatcgtagatgcctggatgaagagaggggccttgcgcttctatttgccttgttacatagtgtttcttggaaaggctgtccttccctactccaagcccctcccctcactccccacccaggatctgggcactggaggcgccagacatcttatgccctgtccaaggctagcagggccatccatcagtgctggtgagctgagctcagctgacaagccagcctggcacggagcgctgcccctcctgctggtcccagatccgttctgtccggaggagaatttcttatccccaggagatgcctggcctcgttaggagcctcctcacccgcccgcccgcaccaaccctctgactccctccacctcaccgcctgggaacaacaggaagagagcaggacagcagcagaaaggagtgctgcttatgtggctcttctcagaatcaggaggctcccaggccaggaatgtgaaaccattatgcagatgaagaagatgaagcccgagaggttatgaaacagacccaagtgggctcgctcttcagtctcggcataaggaatccggaacctgggcccgtgtccggaactgctgtgcccaggcagcttgcctggaaatcaggaaagtatgtgatggtgatgggagtggttcaggcctgcagccctgagccctgcctgcaggctgtgaagatgacagacctttctgataatcccatccatgaaagtatgtgggaactggaggtagaagatttacacaggaatattccttagagtatgttggaactgtcgttaaaaacaaccaaaatcccgaaactatttagaagcttataatgatgtggatttcatggacacttttcaatgcgtatttttcaaatgcttctcagagagccttgctttggttgaccaaggagtccggatgtaggaatgtttaaatcctcggatacttcagtgacacagcctctgctgccccttgctttgcctgtgtttgctgatgaaaagcagatgcttgtgtttcattttccttcctggtttgtgtgtgttaattctctctctctctctcagacacagaagtctcatgttgcattttccaaattttatgagtgatgatactttttccattactgctgcgtccctgttttacaatgcaaaatttaagtacggtcgttgcccatggtgattaaagtgtggttatgggcaggaagacagactgtgtaaaaaaggaatgacatcctggctcctcatcttcttcatcagcaactaccataaccagtttgcgagtcaaatggcatttcctaacggcaggcatggcggcccctgaaagacaacagctccctttctgcttcggacaccactcaaacatttagacgcagctctatcccttttcctagctagagaaggtgatgccttcttccattactcagagatgttgagacgttttcagaatttcttgttgaaatgaaaaacatcaagataaaggacgcctttcaggcattagctaaacttccacttcataactttcggcgagacatggtgagcctcctggtgtagagttcttttgtctttgtatggaatgactttttgctgtgatggttttgaatgttgggtttctgctgtctgcttagtacccatgcctgaattttttgagattgtaaatatcaaaggagttagattgtgttctgacatggttgtagactttcacctggattattgatattctacctctaataaatttttaa

SEQ ID NO: 174646 - DNA, 11565 bp, Homo sapiens
  Payload ID: 14293
  Gene Symbol: RELN
  Gene Name: reelin
  Uniprot ID: P78509
  ENST ID: ENST00000343529
  CDS Start-End: 161-10537
ctcggcgggggcccgctcccaggcccgctcccgagcccgttccgctcccgtccgccttcttctcgccttctctccgcgtggctcctccgtcccggcgtctccaaaactgaatgagcgagcggcgcgtagggcgcgcggcggcggcggcggcggcggcggcatggagcgcagtggctgggcccggcagactttcctcctagcgctgttgctgggggcgacgctgagggcgcgcgcggcggctggctattacccccgcttttcgcccttctttttcctgtgcacccaccacggggagctggaaggggatggggagcagggcgaggtgctcatttccctgcatattgcgggcaaccccacctactacgttccgggacaagaataccatgtgacaatttcaacaagcaccttttttgacggcttgctggtgacaggactatacacatctacaagtgttcaggcatcacagagcattggaggttccagtgctttcggatttgggatcatgtctgaccaccagtttggtaaccagtttatgtgcagtgtggtagcctctcacgtgagtcacctgcccacaaccaacctcagtttcatctggattgctccacctgcgggcacaggctgtgtgaatttcatggctacagcaacacaccggggccaggttattttcaaagatgctttagcccagcagttgtgtgaacaaggagctccaacagatgtcactgtgcacccacatctagctgaaatacatagtgacagcattatcctgagagatgactttgactcctaccaccaactgcaattaaatccaaatatatgggttgaatgtaacaactgtgagactggagaacagtgtggcgcgattatgcatggcaatgccgtcaccttctgtgaaccatatggcccacgagaactgattaccacaggccttaatacaacaacagcttctgtcctccaattttccattgggtcaggttcatgtcgctttagttattcagaccccagcatcatcgtgttatatgccaagaataactctgcggactggattcagctagagaaaattagagccccttccaatgtcagcacaatcatccatatcctctaccttcctgaggacgccaaaggggagaatgtccaatttcagtggaagcaggaaaatcttcgtgtaggtgaagtgtatgaagcctgctgggccttagataacatcttgatcatcaattcagctcacagacaagtcgttttagaagatagtctcgacccagtggacacaggcaactggcttttcttcccaggagctacagttaagcatagctgtcagtcagatgggaactccatttatttccatggaaatgaaggcagcgagttcaattttgccaccaccagggatgtagatctttccacagaagatattcaagagcaatggtcagaagaatttgagagccagcctacaggatgggatgtcttgggagctgtcattggtacagaatgtggaacgatagaatcaggcttatcaatggtcttcctcaaagatggagagaggaaattatgcactccatccatggacactaccggttatgggaacctgaggttttactttgtgatgggaggaatttgtgaccctggaaattctcatgaaaatgacataatcctgtatgcaaaaattgaaggaagaaaagagcatataacactggataccctttcctattcctcatataaggttccgtctttggtttctgtggtcatcaatcctgaacttcagactcctgctaccaaattttgtctcaggcaaaagaaccatcaaggacataataggaatgtctgggctgtagactttttccatgtcttgcctgttctcccttctacaatgtctcacatgatacagttttccatcaatctgggatgtggaacgcatcagcctggtaacagtgtcagcttggaattttctaccaaccatgggcgctcctggtccctccttcacactgaatgcttacctgagatctgtgctggaccccacctcccccacagcactgtctactcctctgaaaactacagtgggtggaaccgaataacaattccccttcctaacgcagcactaacccggaacaccaggattcgctggagacaaacaggaccaatccttggaaacatgtgggcaattgataatgtttatattggcccgtcatgtctcaaattctgttctggcagaggacagtgcactagacatggttgcaagtgtgaccctggattttctggcccagcttgtgagatggcatcccagacattcccaatgtttatttctgaaagctttggcagttccaggctctcctcttaccataacttttactctatccgtggtgctgaagtcagctttggttgtggtgtcttggccagtggtaaggccctggttttcaacaaagatgggcggcgtcagctaattacatctttccttgacagctcacaatccaggtttctccagttcacactgagactggggagcaaatctgttctgagcacgtgcagagcccctgatcagcctggtgaaggagttttgttgcattattcttatgataatgggataacttggaaactcctggagcattattcatatctcagctatcatgagcccagaataatctccgtagaactaccaggtgatgcaaagcagtttggaattcagttcagatggtggcaaccgtatcattcttcccagagagaagatgtatgggctattgatgagattatcatgacatctgtgcttttcaacagcattagtcttgactttaccaatcttgtggaggtcactcagtctctgggattctaccttggaaatgttcagccatactgtggccacgactggaccctttgttttacaggagattctaaacttgcctcaagtatgcgctatgtggaaacacaatcaatgcagataggagcatcctatatgattcagttcagtttggtgatgggatgtggccagaaatacaccccacacatggacaaccaggtgaagctggagtactcaaccaaccacggccttacctggcacctcgtccaagaagaatgccttccaagtatgccaagttgtcaggaatttacatcagcaagtatttaccatgccagtgagtttacacagtggaggagagtcatagtgcttcttccccagaaaacttggtccagtgctacccgtttccgctggagccagagctattacacagctcaagacgagtgggctttggacagcatttacattgggcagcagtgccccaacatgtgcagtgggcatggctcatgcgatcatggcatatgcaggtgtgaccaggggtaccaaggcactgaatgccacccagaagctgcccttccgtccacaattatgtcagattttgagaaccagaatggctgggagtctgactggcaagaagttattgggggagaaattgtaaaaccagaacaagggtgtggtgtcatctcttctggatcatctctgtacttcagcaaggctgggaaaagacagctggtgagttgggacctggatacttcttgggtggactttgtccagttctacatccagataggcggagagagtgcttcatgcaacaagcctgacagcagagaggagggcgtcctccttcagtacagcaacaatgggggcatccagtggcacctgctagcagagatgtacttttcagacttcagcaaacccagatttgtctatctggagcttccagctgctgccaagaccccttgcaccaggttccgctggtggcagcccgtgttctcaggggaggactatgaccagtgggcagtcgatgacatcatcattctgtccgagaagcagaagcagatcatcccagttatcaatccaactttacctcagaacttttatgagaagccagcttttgattaccctatgaatcagatgagtgtgtggttgatgttggctaatgaaggaatggttaaaaatgaaaccttctgtgctgccacaccatcagcaatgatatttggaaaatcagatggagatcgatttgcagtaactcgagatttgaccctgaaacctggatatgtgctacagttcaagctaaacataggttgtgccaatcaattcagcagtactgctccagttcttcttcagtactctcatgatgctggtatgtcctggtttctggtgaaagaaggctgttacccggcttctgcaggcaaaggatgcgaaggaaactccagagaactaagtgagcccaccatgtatcacacaggggactttgaagaatggacaagaatcaccattgttattccaaggtctcttgcatccagcaagaccagattccgatggatccaggagagcagctcacagaaaaacgtgcctccatttggtttagatggagtgtacatatccgagccttgtcccagttactgcagtggccatggggactgcatttcaggagtgtgtttctgtgacctgggatatactgctgcacaaggaacctgtgtgtcaaatgtccccaatcacaatgagatgttcgataggtttgaggggaagctcagccctctgtggtacaagataacaggtgcccaggttggaactggctgtggaacacttaacgatggcaaatctctctacttcaatggccctgggaaaagggaagcccggacggtccctctggacaccaggaatatcagacttgttcaattttatatacaaattggaagcaaaacttcaggcattacctgcatcaaaccaagaactagaaatgaagggcttattgttcagtattcaaatgacaatgggatactctggcatttgcttcgagagttggacttcatgtccttcctggaaccacagatcatttccattgacctgccacaggacgcgaagacacctgcaacggcatttcgatggtggcaaccgcaacatgggaagcattcagcccagtgggctttggatgatgttcttataggaatgaatgacagctctcaaactggatttcaagacaaatttgatggctctatagatttgcaagccaactggtatcgaatccaaggaggtcaagttgatattgactgtctctctatggatactgctctgatattcactgaaaacataggaaaacctcgttatgctgagacctgggattttcatgtgtcagcatctacctttttgcagtttgaaatgagcatgggctgtagcaagcccttcagcaactcccacagtgtacagctccagtattctctgaacaatggcaaggactggcatcttgtcaccgaagagtgtgttcctccaaccattggctgtctgcattacacggaaagttcaatttacacctcggaaagattccagaattggaagcggatcactgtctaccttccactctccaccatttctcccaggacccggttcagatggattcaggccaactacactgtgggggctgattcctgggcgattgataatgttgtactggcctcagggtgcccttggatgtgctcaggacgagggatttgtgatgctggacgctgtgtgtgtgaccggggctttggtggaccctattgtgttcctgttgttcctctgccctcgattcttaaagacgatttcaatgggaatttacatcctgacctttggcctgaagtgtatggtgcagagagggggaatctgaatggtgaaaccatcaaatctggaacatctctaatttttaaaggggaaggactaaggatgcttatttcaagagatctagattgtacaaatacaatgtatgtccagttttcacttagatttatagcaaaaagtaccccagagagatctcactctattctgttacaattctccatcagtggaggaatcacttggcacctgatggatgaattttactttcctcaaacaacgaatatacttttcatcaatgttcccttgccatacactgcccaaaccaatgctacaagattcagactctggcaaccttataataacggtaagaaagaagaaatctggattgttgatgacttcattatcgatggaaataatgtaaacaaccctgtgatgctcttggatacatttgattttgggcccagagaagacaattggtttttctatcctggtggtaacatcggtctttattgtccatattcttcaaagggggcacctgaagaagattcagctatggtgtttgtttcaaatgaagttggtgagcattccattaccacccgtgacctaaatgtgaatgagaacaccatcatacaatttgagatcaacgttggctgttcgactgatagctcatccgcggatccagtgagactggaattttcaagggacttcggggcgacctggcaccttctgctgcccctctgctaccacagcagcagccacgtcagctctttatgctccaccgagcaccaccccagcagcacctactacgcaggaaccatgcagggctggaggagggaggtcgtgcactttgggaagctgcacctttgtggatctgtccgtttcagatggtaccagggattttaccctgccggctctcagccagtgacatgggccattgataatgtctacatcggtccccagtgtgaggagatgtgtaatggacaggggagctgtatcaatggaaccaaatgtatatgtgaccctggctactcaggtccaacctgtaaaataagcaccaaaaatcctgattttctcaaagatgatttcgaaggtcagctagaatctgatagattcttattaatgagtggtgggaaaccatctcgaaagtgtggaatcctttctagtggaaacaacctctttttcaatgaagatggcttgcgcatgttgatgacacgagacctggatttatcacatgctagatttgtgcagttcttcatgagactgggatgtggtaaaggcgttcctgaccccaggagtcaacccgtgctcctacagtattctctcaacggtggcctctcgtggagtcttcttcaggagttccttttcagcaattccagcaatgtgggcaggtacattgccctggagatacccttgaaagcccgttctggttctactcgccttcgctggtggcaaccgtctgagaatgggcacttctacagcccctgggttatcgatcagattcttattggaggaaatatttctggtaatacggtcttggaagatgatttcacaacccttgatagtaggaaatggctgcttcacccaggaggcaccaagatgcccgtgtgtggctctactggtgatgccctggtcttcattgaaaaggccagcacccgttacgtggtcagcacagacgttgccgtgaatgaggattccttcctacagatagacttcgctgcctcctgctcagtcacagactcttgttatgcgattgaattggaatactcagtagatcttggattgtcatggcacccattggtaagggactgtctgcctaccaatgtggaatgcagtcgctatcatctgcaacggatcctggtgtcagacactttcaacaagtggactagaatcactctgcctctccctccttataccaggtcccaagccactcgtttccgttggcatcaaccagctccttttgacaagcagcagacatgggcaatagataatgtctatatcggggatggctgcatagacatgtgcagtggccatgggagatgcatccagggaaactgcgtctgtgatgaacagtggggtggcctgtactgtgatgaccccgagacctctcttccaacccaactcaaagacaacttcaatcgagctccatccagtcagaactggctgactgtgaacggagggaaattgagtacagtgtgtggagccgtggcgtcgggaatggctctccatttcagtgggggttgtagtcgattattagtcactgtggatctaaacctcactaatgctgagttcatccaattttacttcatgtatgggtgcctgattacaccaaacaaccgtaaccaaggtgttctcttggaatattctgtcaatggaggcattacctggaacctgctcatggagattttctatgaccagtacagtaagcccggatttgtgaatatccttctccctcctgatgctaaagagattgccactcgcttccgctggtggcagccaagacatgacggcctggatcagaacgactgggccattgacaatgtcctcatctcaggctctgctgaccaaaggaccgttatgctggacaccttcagcagcgccccagtaccccagcatgagcgctcccctgcagatgccggccctgtcgggaggatcgcctttgacatgtttatggaagacaaaacttcagtgaatgagcactggctattccatgatgattgtacagtagaaagattctgtgactcccctgatggtgtgatgctctgtggcagtcatgatggacgggaggtgtatgcagtgacccatgacctgactcccactgaaggctggattatgcaattcaagatctcagttggatgtaaggtgtctgaaaaaattgcccagaatcaaattcatgtgcagtattctactgacttcggtgtgagttggaattatctggtccctcagtgcttgcctgctgacccaaaatgctctggaagtgtttctcagccatctgtattctttccaactaaagggtggaaaaggatcacctacccacttcctgaaagcttagtgggaaatccggtaaggtttaggttctatcagaagtactcagacatgcagtgggcaatcgataatttctacctgggccctggatgcttggacaactgcaggggccatggagattgcttaagggaacagtgcatctgtgatccgggatactcagggccaaactgctacttgacccacactctgaagactttcctgaaggaacgctttgacagtgaagaaatcaaacctgacttatggatgtccttagaaggtggaagtacttgcactgagtgtggaattcttgccgaggacactgcactctattttgggggatccactgtgagacaagcggttacacaagatttggatcttcgaggtgcaaagttcctgcaatactgggggcgcatcggtagtgagaacaacatgacctcttgccatcgtcccatctgccggaaggaaggcgtgctgttggactactctaccgatggaggaattacctggactttgctccatgagatggattaccagaaatacatttctgttagacacgactacatacttcttcctgaagatgccctcaccaacacaactcgacttcgctggtggcagccttttgtgatcagcaatggaattgtggtctctggggtggagcgtgctcagtgggcactggacaacattttgattggtggagcagaaatcaatcccagccaattggtggacacttttgatgatgaaggcacttcccatgaagaaaactggagtttttaccctaatgctgtaaggacagcaggattttgtggcaatccatcctttcacctctattggccaaataaaaagaaggacaagactcacaatgctctctcctcccgagaactcattatacagccaggatacatgatgcagtttaaaattgtggtgggttgtgaagccacttcttgtggtgaccttcattccgtaatgctggaatacactaaggatgcaagatcggattcctggcagctcgtacagacccagtgccttccttcctcttctaacagcattggctgctcccctttccagttccatgaagccaccatctacaactctgtcaacagctcaagctggaaaagaatcaccatccagctgcctgaccatgtctcctctagtgcaacacagttccgctggatccagaagggagaagaaactgagaagcaaagctgggcaattgaccacgtgtacattggagaggcttgccccaagctctgcagcgggcacggatactgcacgaccggtgccatctgcatctgcgacgagagcttccaaggtgatgactgctctgttttcagtcacgaccttcccagttatattaaagataattttgagtccgcaagagtcaccgaggcaaactgggagaccattcaaggtggagtcataggaagtggctgtgggcagctggccccctacgcccatggagactcactgtactttaatggctgtcagatcaggcaagcagctaccaagcctctggatctcactcgagcaagcaaaatcatgtttgttttgcaaattgggagcatgtcgcagacggacagctgcaacagtgacctgagtggcccccacgctgtggacaaggcagtgctgctgcaatacagcgtcaacaacgggatcacctggcatgtcatcgcccagcaccagccaaaggacttcacacaagctcagagagtgtcttacaatgtccccctggaggcacggatgaaaggagtcttactgcgctggtggcaaccacgccacaatggaacaggtcatgatcaatgggctttggaccatgtggaggtcgtcctcactcgcaaacaaaattacatgatgaatttttcacgacaacatgggctcagacatttctacaacagaagacgaaggtcacttaggcgatacccatgaagaatcaaaaagtttattttttttcttccaacatgtgatgtgttgctctccattcttttaaatctcgcactacatctgatatcaggaaatatctgtgaaggacttggtgattacctgaaagcccttctcaagaccgagtgtacaccactttcccacactgtgaactaatgacaagtgacttatttgctcataagtaaatgtcttcatgttgatgtgtccgtgaaagttgtgatctgttgtaatatcagttacagtggcagtattgacaataagaaacagtttaacagaaaaatgaaatttaagcacaaaaaatttaagagattttatgtttaaaatggcatttagcacagtatttaacattcttggtcacaaagctatttaagtggactgtatttcggctatgtctcatgttttatatgattaaattatcattgtttgtcctttatgtattctcttctacaatacaacacattgaaactgtatttacttgttatgttgtaatattttgctgctgaatttggggctacttatattctgcagaaaattaattgaaatacctattcaagaagatagttgtaaagatattgtatctcctttaatatactccttaaaaatgtatgttggtttagcgttgttttgtggataagaaaaatgcttgaccctgaaatattttctactttaaattgtggatgaagaccctatctcccacaaataagttcccatttccttgtctaaagatctttttttaagtgttctgtggctgatttactaacagtaactgccattttttgtctgtgataacagagtgatttgtaaaacagtggttgttttttcattgtgttttcttcgtggattgttttttctgcgggtcatattcataccttctgatgaagttgtacaacaccagcaacattataatggccctgtagctctgaatgctatttgtgtaactgaaaggttgcactctagggtgaaccaagctataaaagcccatgcttaaataaaaattatgtccaaaagccattgaa

SEQ ID NO: 174647 - DNA, 11571 bp, Homo sapiens
  Payload ID: 14293
  Gene Symbol: RELN
  Gene Name: reelin
  ENST ID: ENST00000424685
  CDS Start-End: 161-10543
ctcggcgggggcccgctcccaggcccgctcccgagcccgttccgctcccgtccgccttcttctcgccttctctccgcgtggctcctccgtcccggcgtctccaaaactgaatgagcgagcggcgcgtagggcgcgcggcggcggcggcggcggcggcggcatggagcgcagtggctgggcccggcagactttcctcctagcgctgttgctgggggcgacgctgagggcgcgcgcggcggctggctattacccccgcttttcgcccttctttttcctgtgcacccaccacggggagctggaaggggatggggagcagggcgaggtgctcatttccctgcatattgcgggcaaccccacctactacgttccgggacaagaataccatgtgacaatttcaacaagcaccttttttgacggcttgctggtgacaggactatacacatctacaagtgttcaggcatcacagagcattggaggttccagtgctttcggatttgggatcatgtctgaccaccagtttggtaaccagtttatgtgcagtgtggtagcctctcacgtgagtcacctgcccacaaccaacctcagtttcatctggattgctccacctgcgggcacaggctgtgtgaatttcatggctacagcaacacaccggggccaggttattttcaaagatgctttagcccagcagttgtgtgaacaaggagctccaacagatgtcactgtgcacccacatctagctgaaatacatagtgacagcattatcctgagagatgactttgactcctaccaccaactgcaattaaatccaaatatatgggttgaatgtaacaactgtgagactggagaacagtgtggcgcgattatgcatggcaatgccgtcaccttctgtgaaccatatggcccacgagaactgattaccacaggccttaatacaacaacagcttctgtcctccaattttccattgggtcaggttcatgtcgctttagttattcagaccccagcatcatcgtgttatatgccaagaataactctgcggactggattcagctagagaaaattagagccccttccaatgtcagcacaatcatccatatcctctaccttcctgaggacgccaaaggggagaatgtccaatttcagtggaagcaggaaaatcttcgtgtaggtgaagtgtatgaagcctgctgggccttagataacatcttgatcatcaattcagctcacagacaagtcgttttagaagatagtctcgacccagtggacacaggcaactggcttttcttcccaggagctacagttaagcatagctgtcagtcagatgggaactccatttatttccatggaaatgaaggcagcgagttcaattttgccaccaccagggatgtagatctttccacagaagatattcaagagcaatggtcagaagaatttgagagccagcctacaggatgggatgtcttgggagctgtcattggtacagaatgtggaacgatagaatcaggcttatcaatggtcttcctcaaagatggagagaggaaattatgcactccatccatggacactaccggttatgggaacctgaggttttactttgtgatgggaggaatttgtgaccctggaaattctcatgaaaatgacataatcctgtatgcaaaaattgaaggaagaaaagagcatataacactggataccctttcctattcctcatataaggttccgtctttggtttctgtggtcatcaatcctgaacttcagactcctgctaccaaattttgtctcaggcaaaagaaccatcaaggacataataggaatgtctgggctgtagactttttccatgtcttgcctgttctcccttctacaatgtctcacatgatacagttttccatcaatctgggatgtggaacgcatcagcctggtaacagtgtcagcttggaattttctaccaaccatgggcgctcctggtccctccttcacactgaatgcttacctgagatctgtgctggaccccacctcccccacagcactgtctactcctctgaaaactacagtgggtggaaccgaataacaattccccttcctaacgcagcactaacccggaacaccaggattcgctggagacaaacaggaccaatccttggaaacatgtgggcaattgataatgtttatattggcccgtcatgtctcaaattctgttctggcagaggacagtgcactagacatggttgcaagtgtgaccctggattttctggcccagcttgtgagatggcatcccagacattcccaatgtttatttctgaaagctttggcagttccaggctctcctcttaccataacttttactctatccgtggtgctgaagtcagctttggttgtggtgtcttggccagtggtaaggccctggttttcaacaaagatgggcggcgtcagctaattacatctttccttgacagctcacaatccaggtttctccagttcacactgagactggggagcaaatctgttctgagcacgtgcagagcccctgatcagcctggtgaaggagttttgttgcattattcttatgataatgggataacttggaaactcctggagcattattcatatctcagctatcatgagcccagaataatctccgtagaactaccaggtgatgcaaagcagtttggaattcagttcagatggtggcaaccgtatcattcttcccagagagaagatgtatgggctattgatgagattatcatgacatctgtgcttttcaacagcattagtcttgactttaccaatcttgtggaggtcactcagtctctgggattctaccttggaaatgttcagccatactgtggccacgactggaccctttgttttacaggagattctaaacttgcctcaagtatgcgctatgtggaaacacaatcaatgcagataggagcatcctatatgattcagttcagtttggtgatgggatgtggccagaaatacaccccacacatggacaaccaggtgaagctggagtactcaaccaaccacggccttacctggcacctcgtccaagaagaatgccttccaagtatgccaagttgtcaggaatttacatcagcaagtatttaccatgccagtgagtttacacagtggaggagagtcatagtgcttcttccccagaaaacttggtccagtgctacccgtttccgctggagccagagctattacacagctcaagacgagtgggctttggacagcatttacattgggcagcagtgccccaacatgtgcagtgggcatggctcatgcgatcatggcatatgcaggtgtgaccaggggtaccaaggcactgaatgccacccagaagctgcccttccgtccacaattatgtcagattttgagaaccagaatggctgggagtctgactggcaagaagttattgggggagaaattgtaaaaccagaacaagggtgtggtgtcatctcttctggatcatctctgtacttcagcaaggctgggaaaagacagctggtgagttgggacctggatacttcttgggtggactttgtccagttctacatccagataggcggagagagtgcttcatgcaacaagcctgacagcagagaggagggcgtcctccttcagtacagcaacaatgggggcatccagtggcacctgctagcagagatgtacttttcagacttcagcaaacccagatttgtctatctggagcttccagctgctgccaagaccccttgcaccaggttccgctggtggcagcccgtgttctcaggggaggactatgaccagtgggcagtcgatgacatcatcattctgtccgagaagcagaagcagatcatcccagttatcaatccaactttacctcagaacttttatgagaagccagcttttgattaccctatgaatcagatgagtgtgtggttgatgttggctaatgaaggaatggttaaaaatgaaaccttctgtgctgccacaccatcagcaatgatatttggaaaatcagatggagatcgatttgcagtaactcgagatttgaccctgaaacctggatatgtgctacagttcaagctaaacataggttgtgccaatcaattcagcagtactgctccagttcttcttcagtactctcatgatgctggtatgtcctggtttctggtgaaagaaggctgttacccggcttctgcaggcaaaggatgcgaaggaaactccagagaactaagtgagcccaccatgtatcacacaggggactttgaagaatggacaagaatcaccattgttattccaaggtctcttgcatccagcaagaccagattccgatggatccaggagagcagctcacagaaaaacgtgcctccatttggtttagatggagtgtacatatccgagccttgtcccagttactgcagtggccatggggactgcatttcaggagtgtgtttctgtgacctgggatatactgctgcacaaggaacctgtgtgtcaaatgtccccaatcacaatgagatgttcgataggtttgaggggaagctcagccctctgtggtacaagataacaggtgcccaggttggaactggctgtggaacacttaacgatggcaaatctctctacttcaatggccctgggaaaagggaagcccggacggtccctctggacaccaggaatatcagacttgttcaattttatatacaaattggaagcaaaacttcaggcattacctgcatcaaaccaagaactagaaatgaagggcttattgttcagtattcaaatgacaatgggatactctggcatttgcttcgagagttggacttcatgtccttcctggaaccacagatcatttccattgacctgccacaggacgcgaagacacctgcaacggcatttcgatggtggcaaccgcaacatgggaagcattcagcccagtgggctttggatgatgttcttataggaatgaatgacagctctcaaactggatttcaagacaaatttgatggctctatagatttgcaagccaactggtatcgaatccaaggaggtcaagttgatattgactgtctctctatggatactgctctgatattcactgaaaacataggaaaacctcgttatgctgagacctgggattttcatgtgtcagcatctacctttttgcagtttgaaatgagcatgggctgtagcaagcccttcagcaactcccacagtgtacagctccagtattctctgaacaatggcaaggactggcatcttgtcaccgaagagtgtgttcctccaaccattggctgtctgcattacacggaaagttcaatttacacctcggaaagattccagaattggaagcggatcactgtctaccttccactctccaccatttctcccaggacccggttcagatggattcaggccaactacactgtgggggctgattcctgggcgattgataatgttgtactggcctcagggtgcccttggatgtgctcaggacgagggatttgtgatgctggacgctgtgtgtgtgaccggggctttggtggaccctattgtgttcctgttgttcctctgccctcgattcttaaagacgatttcaatgggaatttacatcctgacctttggcctgaagtgtatggtgcagagagggggaatctgaatggtgaaaccatcaaatctggaacatctctaatttttaaaggggaaggactaaggatgcttatttcaagagatctagattgtacaaatacaatgtatgtccagttttcacttagatttatagcaaaaagtaccccagagagatctcactctattctgttacaattctccatcagtggaggaatcacttggcacctgatggatgaattttactttcctcaaacaacgaatatacttttcatcaatgttcccttgccatacactgcccaaaccaatgctacaagattcagactctggcaaccttataataacggtaagaaagaagaaatctggattgttgatgacttcattatcgatggaaataatgtaaacaaccctgtgatgctcttggatacatttgattttgggcccagagaagacaattggtttttctatcctggtggtaacatcggtctttattgtccatattcttcaaagggggcacctgaagaagattcagctatggtgtttgtttcaaatgaagttggtgagcattccattaccacccgtgacctaaatgtgaatgagaacaccatcatacaatttgagatcaacgttggctgttcgactgatagctcatccgcggatccagtgagactggaattttcaagggacttcggggcgacctggcaccttctgctgcccctctgctaccacagcagcagccacgtcagctctttatgctccaccgagcaccaccccagcagcacctactacgcaggaaccatgcagggctggaggagggaggtcgtgcactttgggaagctgcacctttgtggatctgtccgtttcagatggtaccagggattttaccctgccggctctcagccagtgacatgggccattgataatgtctacatcggtccccagtgtgaggagatgtgtaatggacaggggagctgtatcaatggaaccaaatgtatatgtgaccctggctactcaggtccaacctgtaaaataagcaccaaaaatcctgattttctcaaagatgatttcgaaggtcagctagaatctgatagattcttattaatgagtggtgggaaaccatctcgaaagtgtggaatcctttctagtggaaacaacctctttttcaatgaagatggcttgcgcatgttgatgacacgagacctggatttatcacatgctagatttgtgcagttcttcatgagactgggatgtggtaaaggcgttcctgaccccaggagtcaacccgtgctcctacagtattctctcaacggtggcctctcgtggagtcttcttcaggagttccttttcagcaattccagcaatgtgggcaggtacattgccctggagatacccttgaaagcccgttctggttctactcgccttcgctggtggcaaccgtctgagaatgggcacttctacagcccctgggttatcgatcagattcttattggaggaaatatttctggtaatacggtcttggaagatgatttcacaacccttgatagtaggaaatggctgcttcacccaggaggcaccaagatgcccgtgtgtggctctactggtgatgccctggtcttcattgaaaaggccagcacccgttacgtggtcagcacagacgttgccgtgaatgaggattccttcctacagatagacttcgctgcctcctgctcagtcacagactcttgttatgcgattgaattggaatactcagtagatcttggattgtcatggcacccattggtaagggactgtctgcctaccaatgtggaatgcagtcgctatcatctgcaacggatcctggtgtcagacactttcaacaagtggactagaatcactctgcctctccctccttataccaggtcccaagccactcgtttccgttggcatcaaccagctccttttgacaagcagcagacatgggcaatagataatgtctatatcggggatggctgcatagacatgtgcagtggccatgggagatgcatccagggaaactgcgtctgtgatgaacagtggggtggcctgtactgtgatgaccccgagacctctcttccaacccaactcaaagacaacttcaatcgagctccatccagtcagaactggctgactgtgaacggagggaaattgagtacagtgtgtggagccgtggcgtcgggaatggctctccatttcagtgggggttgtagtcgattattagtcactgtggatctaaacctcactaatgctgagttcatccaattttacttcatgtatgggtgcctgattacaccaaacaaccgtaaccaaggtgttctcttggaatattctgtcaatggaggcattacctggaacctgctcatggagattttctatgaccagtacagtaagcccggatttgtgaatatccttctccctcctgatgctaaagagattgccactcgcttccgctggtggcagccaagacatgacggcctggatcagaacgactgggccattgacaatgtcctcatctcaggctctgctgaccaaaggaccgttatgctggacaccttcagcagcgccccagtaccccagcatgagcgctcccctgcagatgccggccctgtcgggaggatcgcctttgacatgtttatggaagacaaaacttcagtgaatgagcactggctattccatgatgattgtacagtagaaagattctgtgactcccctgatggtgtgatgctctgtggcagtcatgatggacgggaggtgtatgcagtgacccatgacctgactcccactgaaggctggattatgcaattcaagatctcagttggatgtaaggtgtctgaaaaaattgcccagaatcaaattcatgtgcagtattctactgacttcggtgtgagttggaattatctggtccctcagtgcttgcctgctgacccaaaatgctctggaagtgtttctcagccatctgtattctttccaactaaagggtggaaaaggatcacctacccacttcctgaaagcttagtgggaaatccggtaaggtttaggttctatcagaagtactcagacatgcagtgggcaatcgataatttctacctgggccctggatgcttggacaactgcaggggccatggagattgcttaagggaacagtgcatctgtgatccgggatactcagggccaaactgctacttgacccacactctgaagactttcctgaaggaacgctttgacagtgaagaaatcaaacctgacttatggatgtccttagaaggtggaagtacttgcactgagtgtggaattcttgccgaggacactgcactctattttgggggatccactgtgagacaagcggttacacaagatttggatcttcgaggtgcaaagttcctgcaatactgggggcgcatcggtagtgagaacaacatgacctcttgccatcgtcccatctgccggaaggaaggcgtgctgttggactactctaccgatggaggaattacctggactttgctccatgagatggattaccagaaatacatttctgttagacacgactacatacttcttcctgaagatgccctcaccaacacaactcgacttcgctggtggcagccttttgtgatcagcaatggaattgtggtctctggggtggagcgtgctcagtgggcactggacaacattttgattggtggagcagaaatcaatcccagccaattggtggacacttttgatgatgaaggcacttcccatgaagaaaactggagtttttaccctaatgctgtaaggacagcaggattttgtggcaatccatcctttcacctctattggccaaataaaaagaaggacaagactcacaatgctctctcctcccgagaactcattatacagccaggatacatgatgcagtttaaaattgtggtgggttgtgaagccacttcttgtggtgaccttcattccgtaatgctggaatacactaaggatgcaagatcggattcctggcagctcgtacagacccagtgccttccttcctcttctaacagcattggctgctcccctttccagttccatgaagccaccatctacaactctgtcaacagctcaagctggaaaagaatcaccatccagctgcctgaccatgtctcctctagtgcaacacagttccgctggatccagaagggagaagaaactgagaagcaaagctgggcaattgaccacgtgtacattggagaggcttgccccaagctctgcagcgggcacggatactgcacgaccggtgccatctgcatctgcgacgagagcttccaaggtgatgactgctctgttttcagtcacgaccttcccagttatattaaagataattttgagtccgcaagagtcaccgaggcaaactgggagaccattcaaggtggagtcataggaagtggctgtgggcagctggccccctacgcccatggagactcactgtactttaatggctgtcagatcaggcaagcagctaccaagcctctggatctcactcgagcaagcaaaatcatgtttgttttgcaaattgggagcatgtcgcagacggacagctgcaacagtgacctgagtggcccccacgctgtggacaaggcagtgctgctgcaatacagcgtcaacaacgggatcacctggcatgtcatcgcccagcaccagccaaaggacttcacacaagctcagagagtgtcttacaatgtccccctggaggcacggatgaaaggagtcttactgcgctggtggcaaccacgccacaatggaacaggtcatgatcaatgggctttggaccatgtggaggtcgtcctatttagcactcgcaaacaaaattacatgatgaatttttcacgacaacatgggctcagacatttctacaacagaagacgaaggtcacttaggcgatacccatgaagaatcaaaaagtttattttttttcttccaacatgtgatgtgttgctctccattcttttaaatctcgcactacatctgatatcaggaaatatctgtgaaggacttggtgattacctgaaagcccttctcaagaccgagtgtacaccactttcccacactgtgaactaatgacaagtgacttatttgctcataagtaaatgtcttcatgttgatgtgtccgtgaaagttgtgatctgttgtaatatcagttacagtggcagtattgacaataagaaacagtttaacagaaaaatgaaatttaagcacaaaaaatttaagagattttatgtttaaaatggcatttagcacagtatttaacattcttggtcacaaagctatttaagtggactgtatttcggctatgtctcatgttttatatgattaaattatcattgtttgtcctttatgtattctcttctacaatacaacacattgaaactgtatttacttgttatgttgtaatattttgctgctgaatttggggctacttatattctgcagaaaattaattgaaatacctattcaagaagatagttgtaaagatattgtatctcctttaatatactccttaaaaatgtatgttggtttagcgttgttttgtggataagaaaaatgcttgaccctgaaatattttctactttaaattgtggatgaagaccctatctcccacaaataagttcccatttccttgtctaaagatctttttttaagtgttctgtggctgatttactaacagtaactgccattttttgtctgtgataacagagtgatttgtaaaacagtggttgttttttcattgtgttttcttcgtggattgttttttctgcgggtcatattcataccttctgatgaagttgtacaacaccagcaacattataatggccctgtagctctgaatgctatttgtgtaactgaaaggttgcactctagggtgaaccaagctataaaagcccatgcttaaataaaaattatgtccaaaagccattgaa

SEQ ID NO: 174648 - DNA, 11571 bp, Homo sapiens
  Payload ID: 14293
  Gene Symbol: RELN
  Gene Name: reelin
  Uniprot ID: P78509
  ENST ID: ENST00000428762
  CDS Start-End: 161-10543
ctcggcgggggcccgctcccaggcccgctcccgagcccgttccgctcccgtccgccttcttctcgccttctctccgcgtggctcctccgtcccggcgtctccaaaactgaatgagcgagcggcgcgtagggcgcgcggcggcggcggcggcggcggcggcatggagcgcagtggctgggcccggcagactttcctcctagcgctgttgctgggggcgacgctgagggcgcgcgcggcggctggctattacccccgcttttcgcccttctttttcctgtgcacccaccacggggagctggaaggggatggggagcagggcgaggtgctcatttccctgcatattgcgggcaaccccacctactacgttccgggacaagaataccatgtgacaatttcaacaagcaccttttttgacggcttgctggtgacaggactatacacatctacaagtgttcaggcatcacagagcattggaggttccagtgctttcggatttgggatcatgtctgaccaccagtttggtaaccagtttatgtgcagtgtggtagcctctcacgtgagtcacctgcccacaaccaacctcagtttcatctggattgctccacctgcgggcacaggctgtgtgaatttcatggctacagcaacacaccggggccaggttattttcaaagatgctttagcccagcagttgtgtgaacaaggagctccaacagatgtcactgtgcacccacatctagctgaaatacatagtgacagcattatcctgagagatgactttgactcctaccaccaactgcaattaaatccaaatatatgggttgaatgtaacaactgtgagactggagaacagtgtggcgcgattatgcatggcaatgccgtcaccttctgtgaaccatatggcccacgagaactgattaccacaggccttaatacaacaacagcttctgtcctccaattttccattgggtcaggttcatgtcgctttagttattcagaccccagcatcatcgtgttatatgccaagaataactctgcggactggattcagctagagaaaattagagccccttccaatgtcagcacaatcatccatatcctctaccttcctgaggacgccaaaggggagaatgtccaatttcagtggaagcaggaaaatcttcgtgtaggtgaagtgtatgaagcctgctgggccttagataacatcttgatcatcaattcagctcacagacaagtcgttttagaagatagtctcgacccagtggacacaggcaactggcttttcttcccaggagctacagttaagcatagctgtcagtcagatgggaactccatttatttccatggaaatgaaggcagcgagttcaattttgccaccaccagggatgtagatctttccacagaagatattcaagagcaatggtcagaagaatttgagagccagcctacaggatgggatgtcttgggagctgtcattggtacagaatgtggaacgatagaatcaggcttatcaatggtcttcctcaaagatggagagaggaaattatgcactccatccatggacactaccggttatgggaacctgaggttttactttgtgatgggaggaatttgtgaccctggaaattctcatgaaaatgacataatcctgtatgcaaaaattgaaggaagaaaagagcatataacactggataccctttcctattcctcatataaggttccgtctttggtttctgtggtcatcaatcctgaacttcagactcctgctaccaaattttgtctcaggcaaaagaaccatcaaggacataataggaatgtctgggctgtagactttttccatgtcttgcctgttctcccttctacaatgtctcacatgatacagttttccatcaatctgggatgtggaacgcatcagcctggtaacagtgtcagcttggaattttctaccaaccatgggcgctcctggtccctccttcacactgaatgcttacctgagatctgtgctggaccccacctcccccacagcactgtctactcctctgaaaactacagtgggtggaaccgaataacaattccccttcctaacgcagcactaacccggaacaccaggattcgctggagacaaacaggaccaatccttggaaacatgtgggcaattgataatgtttatattggcccgtcatgtctcaaattctgttctggcagaggacagtgcactagacatggttgcaagtgtgaccctggattttctggcccagcttgtgagatggcatcccagacattcccaatgtttatttctgaaagctttggcagttccaggctctcctcttaccataacttttactctatccgtggtgctgaagtcagctttggttgtggtgtcttggccagtggtaaggccctggttttcaacaaagatgggcggcgtcagctaattacatctttccttgacagctcacaatccaggtttctccagttcacactgagactggggagcaaatctgttctgagcacgtgcagagcccctgatcagcctggtgaaggagttttgttgcattattcttatgataatgggataacttggaaactcctggagcattattcatatctcagctatcatgagcccagaataatctccgtagaactaccaggtgatgcaaagcagtttggaattcagttcagatggtggcaaccgtatcattcttcccagagagaagatgtatgggctattgatgagattatcatgacatctgtgcttttcaacagcattagtcttgactttaccaatcttgtggaggtcactcagtctctgggattctaccttggaaatgttcagccatactgtggccacgactggaccctttgttttacaggagattctaaacttgcctcaagtatgcgctatgtggaaacacaatcaatgcagataggagcatcctatatgattcagttcagtttggtgatgggatgtggccagaaatacaccccacacatggacaaccaggtgaagctggagtactcaaccaaccacggccttacctggcacctcgtccaagaagaatgccttccaagtatgccaagttgtcaggaatttacatcagcaagtatttaccatgccagtgagtttacacagtggaggagagtcatagtgcttcttccccagaaaacttggtccagtgctacccgtttccgctggagccagagctattacacagctcaagacgagtgggctttggacagcatttacattgggcagcagtgccccaacatgtgcagtgggcatggctcatgcgatcatggcatatgcaggtgtgaccaggggtaccaaggcactgaatgccacccagaagctgcccttccgtccacaattatgtcagattttgagaaccagaatggctgggagtctgactggcaagaagttattgggggagaaattgtaaaaccagaacaagggtgtggtgtcatctcttctggatcatctctgtacttcagcaaggctgggaaaagacagctggtgagttgggacctggatacttcttgggtggactttgtccagttctacatccagataggcggagagagtgcttcatgcaacaagcctgacagcagagaggagggcgtcctccttcagtacagcaacaatgggggcatccagtggcacctgctagcagagatgtacttttcagacttcagcaaacccagatttgtctatctggagcttccagctgctgccaagaccccttgcaccaggttccgctggtggcagcccgtgttctcaggggaggactatgaccagtgggcagtcgatgacatcatcattctgtccgagaagcagaagcagatcatcccagttatcaatccaactttacctcagaacttttatgagaagccagcttttgattaccctatgaatcagatgagtgtgtggttgatgttggctaatgaaggaatggttaaaaatgaaaccttctgtgctgccacaccatcagcaatgatatttggaaaatcagatggagatcgatttgcagtaactcgagatttgaccctgaaacctggatatgtgctacagttcaagctaaacataggttgtgccaatcaattcagcagtactgctccagttcttcttcagtactctcatgatgctggtatgtcctggtttctggtgaaagaaggctgttacccggcttctgcaggcaaaggatgcgaaggaaactccagagaactaagtgagcccaccatgtatcacacaggggactttgaagaatggacaagaatcaccattgttattccaaggtctcttgcatccagcaagaccagattccgatggatccaggagagcagctcacagaaaaacgtgcctccatttggtttagatggagtgtacatatccgagccttgtcccagttactgcagtggccatggggactgcatttcaggagtgtgtttctgtgacctgggatatactgctgcacaaggaacctgtgtgtcaaatgtccccaatcacaatgagatgttcgataggtttgaggggaagctcagccctctgtggtacaagataacaggtgcccaggttggaactggctgtggaacacttaacgatggcaaatctctctacttcaatggccctgggaaaagggaagcccggacggtccctctggacaccaggaatatcagacttgttcaattttatatacaaattggaagcaaaacttcaggcattacctgcatcaaaccaagaactagaaatgaagggcttattgttcagtattcaaatgacaatgggatactctggcatttgcttcgagagttggacttcatgtccttcctggaaccacagatcatttccattgacctgccacaggacgcgaagacacctgcaacggcatttcgatggtggcaaccgcaacatgggaagcattcagcccagtgggctttggatgatgttcttataggaatgaatgacagctctcaaactggatttcaagacaaatttgatggctctatagatttgcaagccaactggtatcgaatccaaggaggtcaagttgatattgactgtctctctatggatactgctctgatattcactgaaaacataggaaaacctcgttatgctgagacctgggattttcatgtgtcagcatctacctttttgcagtttgaaatgagcatgggctgtagcaagcccttcagcaactcccacagtgtacagctccagtattctctgaacaatggcaaggactggcatcttgtcaccgaagagtgtgttcctccaaccattggctgtctgcattacacggaaagttcaatttacacctcggaaagattccagaattggaagcggatcactgtctaccttccactctccaccatttctcccaggacccggttcagatggattcaggccaactacactgtgggggctgattcctgggcgattgataatgttgtactggcctcagggtgcccttggatgtgctcaggacgagggatttgtgatgctggacgctgtgtgtgtgaccggggctttggtggaccctattgtgttcctgttgttcctctgccctcgattcttaaagacgatttcaatgggaatttacatcctgacctttggcctgaagtgtatggtgcagagagggggaatctgaatggtgaaaccatcaaatctggaacatctctaatttttaaaggggaaggactaaggatgcttatttcaagagatctagattgtacaaatacaatgtatgtccagttttcacttagatttatagcaaaaagtaccccagagagatctcactctattctgttacaattctccatcagtggaggaatcacttggcacctgatggatgaattttactttcctcaaacaacgaatatacttttcatcaatgttcccttgccatacactgcccaaaccaatgctacaagattcagactctggcaaccttataataacggtaagaaagaagaaatctggattgttgatgacttcattatcgatggaaataatgtaaacaaccctgtgatgctcttggatacatttgattttgggcccagagaagacaattggtttttctatcctggtggtaacatcggtctttattgtccatattcttcaaagggggcacctgaagaagattcagctatggtgtttgtttcaaatgaagttggtgagcattccattaccacccgtgacctaaatgtgaatgagaacaccatcatacaatttgagatcaacgttggctgttcgactgatagctcatccgcggatccagtgagactggaattttcaagggacttcggggcgacctggcaccttctgctgcccctctgctaccacagcagcagccacgtcagctctttatgctccaccgagcaccaccccagcagcacctactacgcaggaaccatgcagggctggaggagggaggtcgtgcactttgggaagctgcacctttgtggatctgtccgtttcagatggtaccagggattttaccctgccggctctcagccagtgacatgggccattgataatgtctacatcggtccccagtgtgaggagatgtgtaatggacaggggagctgtatcaatggaaccaaatgtatatgtgaccctggctactcaggtccaacctgtaaaataagcaccaaaaatcctgattttctcaaagatgatttcgaaggtcagctagaatctgatagattcttattaatgagtggtgggaaaccatctcgaaagtgtggaatcctttctagtggaaacaacctctttttcaatgaagatggcttgcgcatgttgatgacacgagacctggatttatcacatgctagatttgtgcagttcttcatgagactgggatgtggtaaaggcgttcctgaccccaggagtcaacccgtgctcctacagtattctctcaacggtggcctctcgtggagtcttcttcaggagttccttttcagcaattccagcaatgtgggcaggtacattgccctggagatacccttgaaagcccgttctggttctactcgccttcgctggtggcaaccgtctgagaatgggcacttctacagcccctgggttatcgatcagattcttattggaggaaatatttctggtaatacggtcttggaagatgatttcacaacccttgatagtaggaaatggctgcttcacccaggaggcaccaagatgcccgtgtgtggctctactggtgatgccctggtcttcattgaaaaggccagcacccgttacgtggtcagcacagacgttgccgtgaatgaggattccttcctacagatagacttcgctgcctcctgctcagtcacagactcttgttatgcgattgaattggaatactcagtagatcttggattgtcatggcacccattggtaagggactgtctgcctaccaatgtggaatgcagtcgctatcatctgcaacggatcctggtgtcagacactttcaacaagtggactagaatcactctgcctctccctccttataccaggtcccaagccactcgtttccgttggcatcaaccagctccttttgacaagcagcagacatgggcaatagataatgtctatatcggggatggctgcatagacatgtgcagtggccatgggagatgcatccagggaaactgcgtctgtgatgaacagtggggtggcctgtactgtgatgaccccgagacctctcttccaacccaactcaaagacaacttcaatcgagctccatccagtcagaactggctgactgtgaacggagggaaattgagtacagtgtgtggagccgtggcgtcgggaatggctctccatttcagtgggggttgtagtcgattattagtcactgtggatctaaacctcactaatgctgagttcatccaattttacttcatgtatgggtgcctgattacaccaaacaaccgtaaccaaggtgttctcttggaatattctgtcaatggaggcattacctggaacctgctcatggagattttctatgaccagtacagtaagcccggatttgtgaatatccttctccctcctgatgctaaagagattgccactcgcttccgctggtggcagccaagacatgacggcctggatcagaacgactgggccattgacaatgtcctcatctcaggctctgctgaccaaaggaccgttatgctggacaccttcagcagcgccccagtaccccagcatgagcgctcccctgcagatgccggccctgtcgggaggatcgcctttgacatgtttatggaagacaaaacttcagtgaatgagcactggctattccatgatgattgtacagtagaaagattctgtgactcccctgatggtgtgatgctctgtggcagtcatgatggacgggaggtgtatgcagtgacccatgacctgactcccactgaaggctggattatgcaattcaagatctcagttggatgtaaggtgtctgaaaaaattgcccagaatcaaattcatgtgcagtattctactgacttcggtgtgagttggaattatctggtccctcagtgcttgcctgctgacccaaaatgctctggaagtgtttctcagccatctgtattctttccaactaaagggtggaaaaggatcacctacccacttcctgaaagcttagtgggaaatccggtaaggtttaggttctatcagaagtactcagacatgcagtgggcaatcgataatttctacctgggccctggatgcttggacaactgcaggggccatggagattgcttaagggaacagtgcatctgtgatccgggatactcagggccaaactgctacttgacccacactctgaagactttcctgaaggaacgctttgacagtgaagaaatcaaacctgacttatggatgtccttagaaggtggaagtacttgcactgagtgtggaattcttgccgaggacactgcactctattttgggggatccactgtgagacaagcggttacacaagatttggatcttcgaggtgcaaagttcctgcaatactgggggcgcatcggtagtgagaacaacatgacctcttgccatcgtcccatctgccggaaggaaggcgtgctgttggactactctaccgatggaggaattacctggactttgctccatgagatggattaccagaaatacatttctgttagacacgactacatacttcttcctgaagatgccctcaccaacacaactcgacttcgctggtggcagccttttgtgatcagcaatggaattgtggtctctggggtggagcgtgctcagtgggcactggacaacattttgattggtggagcagaaatcaatcccagccaattggtggacacttttgatgatgaaggcacttcccatgaagaaaactggagtttttaccctaatgctgtaaggacagcaggattttgtggcaatccatcctttcacctctattggccaaataaaaagaaggacaagactcacaatgctctctcctcccgagaactcattatacagccaggatacatgatgcagtttaaaattgtggtgggttgtgaagccacttcttgtggtgaccttcattccgtaatgctggaatacactaaggatgcaagatcggattcctggcagctcgtacagacccagtgccttccttcctcttctaacagcattggctgctcccctttccagttccatgaagccaccatctacaactctgtcaacagctcaagctggaaaagaatcaccatccagctgcctgaccatgtctcctctagtgcaacacagttccgctggatccagaagggagaagaaactgagaagcaaagctgggcaattgaccacgtgtacattggagaggcttgccccaagctctgcagcgggcacggatactgcacgaccggtgccatctgcatctgcgacgagagcttccaaggtgatgactgctctgttttcagtcacgaccttcccagttatattaaagataattttgagtccgcaagagtcaccgaggcaaactgggagaccattcaaggtggagtcataggaagtggctgtgggcagctggccccctacgcccatggagactcactgtactttaatggctgtcagatcaggcaagcagctaccaagcctctggatctcactcgagcaagcaaaatcatgtttgttttgcaaattgggagcatgtcgcagacggacagctgcaacagtgacctgagtggcccccacgctgtggacaaggcagtgctgctgcaatacagcgtcaacaacgggatcacctggcatgtcatcgcccagcaccagccaaaggacttcacacaagctcagagagtgtcttacaatgtccccctggaggcacggatgaaaggagtcttactgcgctggtggcaaccacgccacaatggaacaggtcatgatcaatgggctttggaccatgtggaggtcgtcctagtaagcactcgcaaacaaaattacatgatgaatttttcacgacaacatgggctcagacatttctacaacagaagacgaaggtcacttaggcgatacccatgaagaatcaaaaagtttattttttttcttccaacatgtgatgtgttgctctccattcttttaaatctcgcactacatctgatatcaggaaatatctgtgaaggacttggtgattacctgaaagcccttctcaagaccgagtgtacaccactttcccacactgtgaactaatgacaagtgacttatttgctcataagtaaatgtcttcatgttgatgtgtccgtgaaagttgtgatctgttgtaatatcagttacagtggcagtattgacaataagaaacagtttaacagaaaaatgaaatttaagcacaaaaaatttaagagattttatgtttaaaatggcatttagcacagtatttaacattcttggtcacaaagctatttaagtggactgtatttcggctatgtctcatgttttatatgattaaattatcattgtttgtcctttatgtattctcttctacaatacaacacattgaaactgtatttacttgttatgttgtaatattttgctgctgaatttggggctacttatattctgcagaaaattaattgaaatacctattcaagaagatagttgtaaagatattgtatctcctttaatatactccttaaaaatgtatgttggtttagcgttgttttgtggataagaaaaatgcttgaccctgaaatattttctactttaaattgtggatgaagaccctatctcccacaaataagttcccatttccttgtctaaagatctttttttaagtgttctgtggctgatttactaacagtaactgccattttttgtctgtgataacagagtgatttgtaaaacagtggttgttttttcattgtgttttcttcgtggattgttttttctgcgggtcatattcataccttctgatgaagttgtacaacaccagcaacattataatggccctgtagctctgaatgctatttgtgtaactgaaaggttgcactctagggtgaaccaagctataaaagcccatgcttaaataaaaattatgtccaaaagccattgaa

SEQ ID NO: 174649 - DNA, 891 bp, Homo sapiens
  Payload ID: 14293
  Gene Symbol: RELN
  Gene Name: reelin
  ENST ID: ENST00000429186
  CDS Start-End: 1-206
tactgcgctggtggcaaccacgccacaatggaacaggtcatgatcaatgggctttggaccatgtggaggtcgtcctagatgaaaaatcctatattgcgtctaaacctgatcagacttttatgactaatcacagtgctgcatgcattgaaaggcattttttaacttgtgttatatttcattatttgctgtcattggttttccactagagtaagcactcgcaaacaaaattacatgatgaatttttcacgacaacatgggctcagacatttctacaacagaagacgaaggtcacttaggcgatacccatgaagaatcaaaaagtttattttttttcttccaacatgtgatgtgttgctctccattcttttaaatctcgcactacatctgatatcaggaaatatctgtgaaggacttggtgattacctgaaagcccttctcaagaccgagtgtacaccactttcccacactgtgaactaatgacaagtgacttatttgctcataagtaaatgtcttcatgttgatgtgtccgtgaaagttgtgatctgttgtaatatcagttacagtggcagtattgacaataagaaacagtttaacagaaaaatgaaatttaagcacaaaaaatttaagagattttatgtttaaaatggcatttagcacagtatttaacattcttggtcacaaagctatttaagtggactgtatttcggctatgtctcatgttttatatgattaaattatcattgtttgtcctttatgtattctcttctacaatacaacacattgaaactgtatttacttgttatgttgtaatattttgctgctgaatttggggctacttatattctgcagaaaattaattgaaatacctattcaagaagatagttgtaaaga

SEQ ID NO: 174650 - DNA, 808 bp, Homo sapiens
  Payload ID: 14294
  Gene Symbol: REG1A
  Gene Name: regenerating islet-derived 1 alpha
  Uniprot ID: P05451
  ENST ID: ENST00000233735
  CDS Start-End: 104-604
gatataaagctcctacagctacctggcctgagaagccaactcagactcagccaacagagattgttgatttgcctcttaagcaagagattcattgcagctcagcatggctcagaccagctcatacttcatgctgatctcctgcctgatgtttctgtctcagagccaaggccaagaggcccagacagagttgccccaggcccggatcagctgcccagaaggcaccaatgcctatcgctcctactgctactactttaatgaagaccgtgagacctgggttgatgcagatctctattgccagaacatgaattcgggcaacctggtgtctgtgctcacccaggccgagggtgcctttgtggcctcactgattaaggagagtggcactgatgacttcaatgtctggattggcctccatgaccccaaaaagaaccgccgctggcactggagcagtgggtccctggtctcctacaagtcctggggcattggagccccaagcagtgttaatcctggctactgtgtgagcctgacctcaagcacaggattccagaaatggaaggatgtgccttgtgaagacaagttctcctttgtctgcaagttcaaaaactagaggcaactggaaaatacatgtctagaactgatccagcaattacaacggagtcaaaaattaaaccggaccatctctccaactcaactcaacctggacactctcttctctgctgagtttgccttgttaatcttcaatagttttacctaccccagtctttggaaccctaaataataaaaataaacatgtttccactattgtgctgtc

SEQ ID NO: 174651 - DNA, 767 bp, Homo sapiens
  Payload ID: 14295
  Gene Symbol: REG1B
  Gene Name: regenerating islet-derived 1 beta
  Uniprot ID: P48304
  ENST ID: ENST00000305089
  CDS Start-End: 82-582
aagccacctcaagtggacaaggcacttaccaacagagattgctgatttgctccttaagcaagagattcactgccgctaagcatggctcagaccaactcgttcttcatgctgatctcctccctgatgttcctgtctctgagccaaggccaggagtcccagacagagctgcctaatccccgaatcagctgcccagaaggcaccaatgcctatcgctcctactgctactactttaatgaagaccctgagacctgggttgatgcagatctctattgccagaacatgaattcaggcaacctggtgtctgtgctcacccaggcggagggtgccttcgtggcctcactgattaaggagagtagcactgatgacagcaatgtctggattggcctccatgacccaaaaaagaaccgccgctggcactggagtagtgggtccctggtctcctacaagtcctgggacactggatccccgagcagtgctaatgctggctactgtgcaagcctgacttcatgctcaggattcaagaaatggaaggatgaatcttgtgagaagaagttctcctttgtttgcaagttcaaaaactagaggaagctgaaaaatggatgtctagaactggtcctgcaattactatgaagtcaaaaattaaactagactatgtctccaactcagttcagaccatctcctccctaatgagtttgcatcgctgatcttcagtaccttcacctgtctcagtctctagagccctgaaaaataaaaacaaacttattttt

SEQ ID NO: 174652 - DNA, 626 bp, Homo sapiens
  Payload ID: 14295
  Gene Symbol: REG1B
  Gene Name: regenerating islet-derived 1 beta
  ENST ID: ENST00000454188
  CDS Start-End: 1-450
tttaatgaagaccctgagacctgggttgatgcagatctctattgccagaacatgaattcaggcaacctggtgtctgtgctcacccaggcggagggtgccttcgtggcctcactgattaaggagagtagcactgatgacagcaatgtctggattggcctccatgacccaaaaaagaaccgccgctggcactggagtagtgggtccctggtctcctacaagtcctgggacactggatccccgagcagtgctaatgctggctactgtgcaagcctgacttcatgctcaggtgagaggcagacaatctatccacctgttgccatttccttcccacttatctctggggatgaacatggggactgggatagaggaaaggattcaagaaatggaaggatgaatcttgtgagaagaagttctcctttgtttgcaagttcaaaaactagaggaagctgaaaaatggatgtctagaactggtcctgcaattactatgaagtcaaaaattaaactagactatgtctccaactcagttcagaccatctcctccctaatgagtttgcatcgctgatcttcagtaccttcacctgtctcagtctctagagccctgaaaaataaaaacaaacttattttta

SEQ ID NO: 174653 - DNA, 718 bp, Homo sapiens
  Payload ID: 14296
  Gene Symbol: REG3A
  Gene Name: regenerating islet-derived 3 alpha
  Uniprot ID: Q06141
  ENST ID: ENST00000305165
  CDS Start-End: 57-584
cataccatatcccaccagagagtgactcctgattgcctcctcaagtcgcagacactatgctgcctcccatggccctgcccagtgtatcttggatgctgctttcctgcctcatgctgctgtctcaggttcaaggtgaagaaccccagagggaactgccctctgcacggatccgctgtcccaaaggctccaaggcctatggctcccactgctatgccttgtttttgtcaccaaaatcctggacagatgcagatctggcctgccagaagcggccctctggaaacctggtgtctgtgctcagtggggctgagggatccttcgtgtcctccctggtgaagagcattggtaacagctactcatacgtctggattgggctccatgaccccacacagggcaccgagcccaatggagaaggttgggagtggagtagcagtgatgtgatgaattactttgcatgggagagaaatccctccaccatctcaagccccggccactgtgcgagcctgtcgagaagcacagcatttctgaggtggaaagattataactgtaatgtgaggttaccctatgtctgcaagttcactgactagtgcaggagggaagtcagcagcctgtgtttggtgtgcaactcatcatgggcatgagaccagtgtgaggactcaccctggaagagaatattcgcttaattcccccaacctgaccacctcattcttatctttcttct

SEQ ID NO: 174654 - DNA, 1095 bp, Homo sapiens
  Payload ID: 14296
  Gene Symbol: REG3A
  Gene Name: regenerating islet-derived 3 alpha
  Uniprot ID: Q06141
  ENST ID: ENST00000393878
  CDS Start-End: 349-876
aaaccataccatatcccaccagagaggtaagtgggagctgagagaagatgagacccagggaggagctactgcacatgacacaggagaatacatgggagggtcccttcctcagggagcacaggaactctgagactcagcaagggtgtcctgggagggctcggggatgggagagtacacagattcacaactcattcagaactgtagaagatgatggatgtgaccaagatcactttagtcctaggggactagagaaggaaaatgacatgaggcagtggggtatctgtgtgttctcccactgaccacgctttctttagtgactcctgattgcctcctcaagtcgcagacactatgctgcctcccatggccctgcccagtgtatcttggatgctgctttcctgcctcatgctgctgtctcaggttcaaggtgaagaaccccagagggaactgccctctgcacggatccgctgtcccaaaggctccaaggcctatggctcccactgctatgccttgtttttgtcaccaaaatcctggacagatgcagatctggcctgccagaagcggccctctggaaacctggtgtctgtgctcagtggggctgagggatccttcgtgtcctccctggtgaagagcattggtaacagctactcatacgtctggattgggctccatgaccccacacagggcaccgagcccaatggagaaggttgggagtggagtagcagtgatgtgatgaattactttgcatgggagagaaatccctccaccatctcaagccccggccactgtgcgagcctgtcgagaagcacagcatttctgaggtggaaagattataactgtaatgtgaggttaccctatgtctgcaagttcactgactagtgcaggagggaagtcagcagcctgtgtttggtgtgcaactcatcatgggcatgagaccagtgtgaggactcaccctggaagagaatattcgcttaattcccccaacctgaccacctcattcttatctttcttctgtttcttcctccccgctgtcatttcagtctcttcattttgtcatacggcctaaggctttaaagagcaataaaatttttagtctgc

SEQ ID NO: 174655 - DNA, 788 bp, Homo sapiens
  Payload ID: 14296
  Gene Symbol: REG3A
  Gene Name: regenerating islet-derived 3 alpha
  Uniprot ID: Q06141
  ENST ID: ENST00000409839
  CDS Start-End: 38-565
aaaccataccatatcccaccagagagtcgcagacactatgctgcctcccatggccctgcccagtgtatcttggatgctgctttcctgcctcatgctgctgtctcaggttcaaggtgaagaaccccagagggaactgccctctgcacggatccgctgtcccaaaggctccaaggcctatggctcccactgctatgccttgtttttgtcaccaaaatcctggacagatgcagatctggcctgccagaagcggccctctggaaacctggtgtctgtgctcagtggggctgagggatccttcgtgtcctccctggtgaagagcattggtaacagctactcatacgtctggattgggctccatgaccccacacagggcaccgagcccaatggagaaggttgggagtggagtagcagtgatgtgatgaattactttgcatgggagagaaatccctccaccatctcaagccccggccactgtgcgagcctgtcgagaagcacagcatttctgaggtggaaagattataactgtaatgtgaggttaccctatgtctgcaagttcactgactagtgcaggagggaagtcagcagcctgtgtttggtgtgcaactcatcatgggcatgagaccagtgtgaggactcaccctggaagagaatattcgcttaattcccccaacctgaccacctcattcttatctttcttctgtttcttcctccccgctgtcatttcagtctcttcattttgtcatacggcctaaggctttaaagagcaataaaatttttagtctgcactt

SEQ ID NO: 174656 - DNA, 938 bp, Homo sapiens
  Payload ID: 14297
  Gene Symbol: REG3G
  Gene Name: regenerating islet-derived 3 gamma
  Uniprot ID: Q6UW15
  ENST ID: ENST00000272324
  CDS Start-End: 185-712
catccctgagatctttttataaaaaacccagtctttgctgaccagacaaagcataccagatctcaccagagagtcctaggggactacagaaggaaaaagacaagaggcagtaggatatctgtgtgtcctcccgctgaccacacttcctttagtgacccgattgcctcctcaagtcgcagacactatgctgcctcccatggccctgcccagtgtgtcctggatgctgctttcctgcctcattctcctgtgtcaggttcaaggtgaagaaacccagaaggaactgccctctccacggatcagctgtcccaaaggctccaaggcctatggctccccctgctatgccttgtttttgtcaccaaaatcctggatggatgcagatctggcttgccagaagcggccctctggaaaactggtgtctgtgctcagtggggctgagggatccttcgtgtcctccctggtgaggagcattagtaacagctattcatacatctggattgggctccatgaccccacacagggctctgagcctgatggagatggatgggagtggagtagcactgatgtgatgaattactttgcatgggagaaaaatccctccaccatcttaaaccctggccactgtgggagcctgtcaagaagcacaggatttctgaagtggaaagattataactgtgatgcaaagttaccctatgtctgcaagttcaaggactagggcaggtgggaagtcagcagcctgagcttggcgtgcagctcatcatggacatgagaccagtgtgaagactcaccctggaagagaatattctccccaaactgccctacctgactaccttgtcatgatcctccttctttttcctttttcttcaccttcatttcaggcttttctctgtcttccatgtcttgagatctcagagaataataataaaaatgttactttatac

SEQ ID NO: 174657 - DNA, 856 bp, Homo sapiens
  Payload ID: 14297
  Gene Symbol: REG3G
  Gene Name: regenerating islet-derived 3 gamma
  Uniprot ID: Q6UW15
  ENST ID: ENST00000393897
  CDS Start-End: 100-627
attcactccagtgaccatccctgagatctttttataaaaaacccagtctttgctgaccagacaaagcataccagatctcaccagagagtcgcagacactatgctgcctcccatggccctgcccagtgtgtcctggatgctgctttcctgcctcattctcctgtgtcaggttcaaggtgaagaaacccagaaggaactgccctctccacggatcagctgtcccaaaggctccaaggcctatggctccccctgctatgccttgtttttgtcaccaaaatcctggatggatgcagatctggcttgccagaagcggccctctggaaaactggtgtctgtgctcagtggggctgagggatccttcgtgtcctccctggtgaggagcattagtaacagctattcatacatctggattgggctccatgaccccacacagggctctgagcctgatggagatggatgggagtggagtagcactgatgtgatgaattactttgcatgggagaaaaatccctccaccatcttaaaccctggccactgtgggagcctgtcaagaagcacaggatttctgaagtggaaagattataactgtgatgcaaagttaccctatgtctgcaagttcaaggactagggcaggtgggaagtcagcagcctgagcttggcgtgcagctcatcatggacatgagaccagtgtgaagactcaccctggaagagaatattctccccaaactgccctacctgactaccttgtcatgatcctccttctttttcctttttcttcaccttcatttcaggcttttctctgtcttccatgtcttgagatctcagagaataataataaaaatgttactttatacgta

SEQ ID NO: 174658 - DNA, 575 bp, Homo sapiens
  Payload ID: 14297
  Gene Symbol: REG3G
  Gene Name: regenerating islet-derived 3 gamma
  Uniprot ID: Q6UW15
  ENST ID: ENST00000409471
  CDS Start-End: 159-548
cccagtctttgctgaccagacaaagcataccagatctcaccagagagtcctaggggactacagaaggaaaaagacaagaggcagtaggatatctgtgtgtcctcccgctgaccacacttcctttagtgacccgattgcctcctcaagtcgcagacactatgctgcctcccatggccctgcccagtgtgtcctggatgctgctttcctgcctcattctcctgtgtcaggttcaaggtgaagaaacccagaaggaactgccctctccacggatcagctgtcccaaaggctccaaggcctatggctccccctgctatgccttgtttttgtcaccaaaatcctggatggatgcagatggctctgagcctgatggagatggatgggagtggagtagcactgatgtgatgaattactttgcatgggagaaaaatccctccaccatcttaaaccctggccactgtgggagcctgtcaagaagcacaggatttctgaagtggaaagattataactgtgatgcaaagttaccctatgtctgcaagttcaaggactagggcaggtgggaagtcagcagcctgagc

SEQ ID NO: 174659 - DNA, 1357 bp, Homo sapiens
  Payload ID: 14298
  Gene Symbol: REG4
  Gene Name: regenerating islet-derived family, member 4
  Uniprot ID: Q9BYZ8
  ENST ID: ENST00000256585
  CDS Start-End: 347-823
gttcttttcctggctagtcaaagcacaccttacgtacattctgaagccgtctcttatatgattcatttttttcactgtagataagacttttatggatggattgtttttctcaaataatattatcgctttgtgactaaagtaaagattattaattcctgaggcaagaagatataaaagctccagaaacgttgactgggaccactggagacactgaagaaggcaggggcccttagagtcttggttgccaaacagatttgcagatcaaggagaacccaggagtttcaaagaagcgctagtaaggtctctgagatccttgcactagctacatcctcagggtaggaggaagatggcttccagaagcatgcggctgctcctattgctgagctgcctggccaaaacaggagtcctgggtgatatcatcatgagacccagctgtgctcctggatggttttaccacaagtccaattgctatggttacttcaggaagctgaggaactggtctgatgccgagctcgagtgtcagtcttacggaaacggagcccacctggcatctatcctgagtttaaaggaagccagcaccatagcagagtacataagtggctatcagagaagccagccgatatggattggcctgcacgacccacagaagaggcagcagtggcagtggattgatggggccatgtatctgtacagatcctggtctggcaagtccatgggtgggaacaagcactgtgctgagatgagctccaataacaactttttaacttggagcagcaacgaatgcaacaagcgccaacacttcctgtgcaagtaccgaccatagagcaagaatcaagattctgctaactcctgcacagccccgtcctcttcctttctgctagcctggctaaatctgctcattatttcagaggggaaacctagcaaactaagagtgataagggccctactacactggcttttttaggcttagagacagaaactttagcattggcccagtagtggcttctagctctaaatgtttgccccgccatccctttccacagtatccttcttccctcctcccctgtctctggctgtctcgagcagtctagaagagtgcatctccagcctatgaaacagctgggtctttggccataagaagtaaagatttgaagacagaaggaagaaactcaggagtaagcttctagaccccttcagcttctacacccttctgccctctctccattgcctgcaccccaccccagccactcaactcctgcttgtttttcctttggccatgggaaggtttaccagtagaatccttgctaggttgatgtgggccatacattcctttaataaaccattgtgtacataagag

SEQ ID NO: 174660 - DNA, 1517 bp, Homo sapiens
  Payload ID: 14298
  Gene Symbol: REG4
  Gene Name: regenerating islet-derived family, member 4
  Uniprot ID: Q9BYZ8
  ENST ID: ENST00000354219
  CDS Start-End: 441-917
ataagacttttatggatggattgtttttctcaaataatattatcgctttgtgactaaagtaaagattattaattcctgaggcaagaagatataaaagctccagaaacgttgactgggaccactggagacactgaagaaggcaggggcccttagagtcttggttgccaaacagaatgcccatatccgtcttacctgtgaggaagcttgccttgggcgccctctgctggccctcctgaagctaacaggggcgagtgctcggtggtttacaaattgcctccatgcagactatgaaactgttcagcctgctatagttagatctctggcactggcccaggaggtcttgcagatttgcagatcaaggagaacccaggagtttcaaagaagcgctagtaaggtctctgagatccttgcactagctacatcctcagggtaggaggaagatggcttccagaagcatgcggctgctcctattgctgagctgcctggccaaaacaggagtcctgggtgatatcatcatgagacccagctgtgctcctggatggttttaccacaagtccaattgctatggttacttcaggaagctgaggaactggtctgatgccgagctcgagtgtcagtcttacggaaacggagcccacctggcatctatcctgagtttaaaggaagccagcaccatagcagagtacataagtggctatcagagaagccagccgatatggattggcctgcacgacccacagaagaggcagcagtggcagtggattgatggggccatgtatctgtacagatcctggtctggcaagtccatgggtgggaacaagcactgtgctgagatgagctccaataacaactttttaacttggagcagcaacgaatgcaacaagcgccaacacttcctgtgcaagtaccgaccatagagcaagaatcaagattctgctaactcctgcacagccccgtcctcttcctttctgctagcctggctaaatctgctcattatttcagaggggaaacctagcaaactaagagtgataagggccctactacactggcttttttaggcttagagacagaaactttagcattggcccagtagtggcttctagctctaaatgtttgccccgccatccctttccacagtatccttcttccctcctcccctgtctctggctgtctcgagcagtctagaagagtgcatctccagcctatgaaacagctgggtctttggccataagaagtaaagatttgaagacagaaggaagaaactcaggagtaagcttctagaccccttcagcttctacacccttctgccctctctccattgcctgcaccccaccccagccactcaactcctgcttgtttttcctttggccatgggaaggtttaccagtagaatccttgctaggttgatgtgggccatacattcctttaataaaccattgtgtacataagaggttgctgtgttccagttcagtaatggtgaatgtggaaaagtgaaataagaccaagaaatacaccca

SEQ ID NO: 174661 - DNA, 2327 bp, Homo sapiens
  Payload ID: 14298
  Gene Symbol: REG4
  Gene Name: regenerating islet-derived family, member 4
  Uniprot ID: Q9BYZ8
  ENST ID: ENST00000369401
  CDS Start-End: 267-671
ataagacttttatggatggattgtttttctcaaataatattatcgctttgtgactaaagtaaagattattaattcctgaggcaagaagatataaaagctccagaaacgttgactgggaccactggagacactgaagaaggcaggggcccttagagtcttggttgccaaacagatttgcagatcaaggagaacccaggagtttcaaagaagcgctagtaaggtctctgagatccttgcactagctacatcctcagggtaggaggaagatggcttccagaagcatgcggctgctcctattgctgagctgcctggccaaaacaggagtcctgggtgatatcatcatgagacccagctgtgctcctggatggttttaccacaagtccaattgctatggttacttcaggaagctgaggaactggtctgatgccgaggtaagaaacttgctgcctgcttggcctggcctttctagagcaaaggaccagccagagccccagatctcatttgattcaggatcaagtgtccttcctgggcactatgaagagaagcccctttggctggtgaaatggagagaagagggttgtgtgttcaactcattcaattctgtaagcattgctgaagcaggtgctgtatgccagaccctagatgggctacaagcacatacggatacataggaaagagcccctaccctcagcaagctcactgtcagtaaaggagacagaaatacatcaatcaaaggaggaagagaagatgaggaattcacagaaaggataatggagtttctgtacaagatttaccagaaagagagtggtgtgtagacatgcctggagcagacaccttggagccgctgacagaaggtgaagcagtccaagaaaatgtggaaacttttccgctgctctacacagtccacaaacctgtccattttatttcgttgaagctttgtctgagagataaccaaatagacagtcaaagtaagttatctcagccacatatggggagtggatgctgctgaattgtgattaattgggggagccatataggtacatttggcatgatctgggcctatgcggtcttacaatccctgtataaaactagacaatgaaaaacagaaaacaaaacaaacaaacaaaaaaacaagaacgaagcacctaccacatgccagctactgaggctatgaaggtattctcccgccttagaaagcccaggattaatgcaggattgcgacatttaaacagaacatttccatacagcatgagtataaatgactttcccaagtttacactgagagtaactgacacagcaaccccagcaaagtctgagctgagtcctgaataattgtataaaaaggggagagaaacagagtgaagaaagggtttcccagactctgtcccaggaaagaaaatgagctcgtggagaggaatagactttctctatgaaaacagagggaacaaagaggaagatgtctgggaaccgaggagtaatagagacctgagtttacatcactactctgccactccctaggtacctccctttacctgtttccctactggaaagtgggataatactttttacctcatggacttgtcaggaggattcattaaaacgactcgcataaagcctatgccacatggtagatgccaattcagggtctcaagaaagaacagcccacaggattgacactgaaccttaacaaagttaacaggaccaaggtgcagagagggtgctaggacagcgaagccaaagaggacccctcaaacccaacaagagctgtgcggctccctgattcctcgccagtgttgctaccgcccttggctcttcttgcatggctggctcttgagacccctggaagctgatggaggcaacgtgagaagcacatggacatccgaccttgagcttgagaggcagaggcctgagttctagttacagccccagcagtaccagttgtgtggactgggagggaggctatcacgtacatacttcaagcctccaaacctgtttccccttctgacacaggatcttctgtggctggtatagagtgggcactcaataaatgctgtctggtcgtctggctggcatgcctcatgggcctgagaattgaatagaattacagtgatagaagcatgctggtattgtaagtggtttgtaagtgtgaggactaaattattattaaatagtaatcacatctaatcttggataaattagtaaaagcaagaatgggagcagtaaaaacctaagcaacccgaactaaaattttattgaattaattcaatttcttgtcatgtaacacaaccccagaagagaataaaataaagtttatatacatacaccca

SEQ ID NO: 174662 - DNA, 612 bp, Homo sapiens
  Payload ID: 14298
  Gene Symbol: REG4
  Gene Name: regenerating islet-derived family, member 4
  ENST ID: ENST00000530654
  CDS Start-End: 37-348
tccttgcactagctacatcctcagggtaggaggaagatggcttccagaagcatgcggctgctcctattgctgagctgcctggccaaaacaggagtcctgggtgatatcatcatgagacccagctgtgctcctggatggttttaccacaagtccaattgctatggttacttcaggaagctgaggaactggtctgatgccgagctcgagtgtcagtcttacggaaacggagcccacctggcatctatcctgagtttaaaggaagccagcaccatagcagagtacataagtggctatcagagaagccagccgatatggattggcctgcacgacccacagaagactttttaacttggagcagcaacgaatgcaacaagcgccaacacttcctgtgcaagtaccgaccatagagcaagaatcaagattctgctaactcctgcacagccccgtcctcttcctttctgctagcctggctaaatctgctcattatttcagaggggaaacctagcaaactaagagtgataagggccctactacactggcttttttaggcttagagacagaaactttagcattggcccagtagtggcttctagctctaaatgtttgccccgc

SEQ ID NO: 174663 - DNA, 1611 bp, Homo sapiens
  Payload ID: 14299
  Gene Symbol: RGN
  Gene Name: regucalcin
  Uniprot ID: Q15493
  ENST ID: ENST00000352078
  CDS Start-End: 346-1245
ccgagccaggccggcctccccgccccctccctggaaaggaaaggccccggcgacaacagagccagacccgctcatcccgatctcccagaaggcgactgacagctgactgccagaaggagatcgcgccaggagactgactgctctgtgcccacccggggacccgggcccgttcagccgggctggctggtgcgccctctgcaaagcctgcgccagggaggaggcaggctcaaccttcagattcccagggcctctctgtcgctgtcgccgtcgccgtcgcccgaggtcccagcggctctaccagattgttgtggaggcctctcacccgcacagatctcccctgcgaccatgtcttccattaagattgagtgtgttttgccagagaactgccggtgtggtgagtctccagtatgggaggaagtgtccaactctctgctctttgtagacattcctgcaaaaaaggtttgccggtgggattcattcaccaagcaagtacagcgagtgaccatggatgccccagtcagctccgtggctcttcgccagtcgggaggctatgttgccaccattggaacaaagttctgtgctttgaactggaaagaacaatcagcagttgtcttggccacggtggataacgacaagaaaaacaatcgcttcaatgatgggaaggtggatcccgccgggaggtactttgctggcaccatggctgaggaaacagctccagcagttcttgagcggcaccagggggccctgtactccctctttcctgatcaccacgtgaaaaagtactttgaccaggtggacatttccaatggtttggattggtcgctagaccacaaaatcttctattacattgacagcctgtcctactccgtggatgcctttgactatgacctgcagacaggacagatctccaaccgcagaagtgtttacaagctagaaaaggaagaacaaatcccagatggaatgtgtattgatgctgaggggaagctctgggtggcctgttacaatggaggaagagtgattcgtttagatcctgtgacagggaaaagacttcaaactgtgaagttgcctgttgataaaacaacttcatgctgctttggagggaagaattactctgaaatgtatgtgacctgcgcccgggatgggatggaccccgagggtcttttgaggcaacctgaagctggtggaattttcaagataactggtctgggggtcaaaggaattgctccctactcctatgcgggatgaggacaggtcttctttcctgccagagggagctctgaagacaactagagaattctgggcctgaaatttcaatctagttagaaagaaaaatgaggcaatgattttattaacagcgttaagttttaatttacaacttttaaaaggcagagcatttttaacaaggggtgacaggtggttttgataacacacttataaggctttctgtaaaaggtactatagaagggcgaagaatcgttcaactgtcaatcagcctcttgattctttgtaaattgccagggtgggtgggtacatatctcttcttgattctgcatttcatacttaactatattaaagcttcaaggaacaataaatagtaacctggtaatgacc

SEQ ID NO: 174664 - DNA, 1356 bp, Homo sapiens
  Payload ID: 14299
  Gene Symbol: RGN
  Gene Name: regucalcin
  Uniprot ID: Q15493
  ENST ID: ENST00000336169
  CDS Start-End: 94-993
acaaacaccaaggagtggaggtcagagtgtcacttttttgttttctttttgaaagatcattcgagaaacacgtcactgatctcccctgcgaccatgtcttccattaagattgagtgtgttttgccagagaactgccggtgtggtgagtctccagtatgggaggaagtgtccaactctctgctctttgtagacattcctgcaaaaaaggtttgccggtgggattcattcaccaagcaagtacagcgagtgaccatggatgccccagtcagctccgtggctcttcgccagtcgggaggctatgttgccaccattggaacaaagttctgtgctttgaactggaaagaacaatcagcagttgtcttggccacggtggataacgacaagaaaaacaatcgcttcaatgatgggaaggtggatcccgccgggaggtactttgctggcaccatggctgaggaaacagctccagcagttcttgagcggcaccagggggccctgtactccctctttcctgatcaccacgtgaaaaagtactttgaccaggtggacatttccaatggtttggattggtcgctagaccacaaaatcttctattacattgacagcctgtcctactccgtggatgcctttgactatgacctgcagacaggacagatctccaaccgcagaagtgtttacaagctagaaaaggaagaacaaatcccagatggaatgtgtattgatgctgaggggaagctctgggtggcctgttacaatggaggaagagtgattcgtttagatcctgtgacagggaaaagacttcaaactgtgaagttgcctgttgataaaacaacttcatgctgctttggagggaagaattactctgaaatgtatgtgacctgcgcccgggatgggatggaccccgagggtcttttgaggcaacctgaagctggtggaattttcaagataactggtctgggggtcaaaggaattgctccctactcctatgcgggatgaggacaggtcttctttcctgccagagggagctctgaagacaactagagaattctgggcctgaaatttcaatctagttagaaagaaaaatgaggcaatgattttattaacagcgttaagttttaatttacaacttttaaaaggcagagcatttttaacaaggggtgacaggtggttttgataacacacttataaggctttctgtaaaaggtactatagaagggcgaagaatcgttcaactgtcaatcagcctcttgattctttgtaaattgccagggtgggtgggtacatatctcttcttgattctgcatttcatacttaactatattaaagcttcaaggaacaataaatagtaacctggtaatg

SEQ ID NO: 174665 - DNA, 2257 bp, Homo sapiens
  Payload ID: 14299
  Gene Symbol: RGN
  Gene Name: regucalcin
  Uniprot ID: Q15493
  ENST ID: ENST00000397180
  CDS Start-End: 991-1890
gagaaatctccatcctggcgagtgcccgagccaggccggcctccccgccccctccctggaaaggaaaggccccggcgacaacagagccagacccgctcatcccgatctcccagaaggcgactgacagctgactgccagaaggagatcgcgccaggagactgactgctctgtgcccacccggggacccgggcccgttcagccgggctggctggtgcgccctctgcaaagcctgcgccagggaggaggcaggctcaaccttcagattcccagggcctctctgtcgctgtcgccgtcgccgtcgcccgaggtcccagcggctctaccagattgttgtggaggcctctcacccgcacagataatttttctctgtcttctcccagttcgctggtcatggtctctggcctaaagtcccagcatagactgttcctctcctgtggagtctaacactctttgccaaactggcacggtgtcttcctgggaagcaagaaatcactgagggcctgtcagttcctgccagggtggttcgatgctgtccttttctccactccttccatggtctgcgttggaaaatgtgtgttagttcgaattcagcgagttctcattggggtgaacatagtcctaaaaatgcagttcataaaaatcaaccacacagagaagaaaaataaataaatcagtaaagcagctcagaaaaatgcaggtgtggcgggccctggcctctgcaccctcatagaggggctcaacagcatcaacagaaggtgggggagcagaaggtgccctgcagacacccagaggggccaccaatgagcaaactgccagctccctgacccgccctggggcccagggtattgacataaaggacggccttgcactatttcaacagccagttctctgagggtcacaaacaccaaggagtggaggtcagagtgtcacttttttgttttctttttgaaagatcattcgagaaacacgtcactgatctcccctgcgaccatgtcttccattaagattgagtgtgttttgccagagaactgccggtgtggtgagtctccagtatgggaggaagtgtccaactctctgctctttgtagacattcctgcaaaaaaggtttgccggtgggattcattcaccaagcaagtacagcgagtgaccatggatgccccagtcagctccgtggctcttcgccagtcgggaggctatgttgccaccattggaacaaagttctgtgctttgaactggaaagaacaatcagcagttgtcttggccacggtggataacgacaagaaaaacaatcgcttcaatgatgggaaggtggatcccgccgggaggtactttgctggcaccatggctgaggaaacagctccagcagttcttgagcggcaccagggggccctgtactccctctttcctgatcaccacgtgaaaaagtactttgaccaggtggacatttccaatggtttggattggtcgctagaccacaaaatcttctattacattgacagcctgtcctactccgtggatgcctttgactatgacctgcagacaggacagatctccaaccgcagaagtgtttacaagctagaaaaggaagaacaaatcccagatggaatgtgtattgatgctgaggggaagctctgggtggcctgttacaatggaggaagagtgattcgtttagatcctgtgacagggaaaagacttcaaactgtgaagttgcctgttgataaaacaacttcatgctgctttggagggaagaattactctgaaatgtatgtgacctgcgcccgggatgggatggaccccgagggtcttttgaggcaacctgaagctggtggaattttcaagataactggtctgggggtcaaaggaattgctccctactcctatgcgggatgaggacaggtcttctttcctgccagagggagctctgaagacaactagagaattctgggcctgaaatttcaatctagttagaaagaaaaatgaggcaatgattttattaacagcgttaagttttaatttacaacttttaaaaggcagagcatttttaacaaggggtgacaggtggttttgataacacacttataaggctttctgtaaaaggtactatagaagggcgaagaatcgttcaactgtcaatcagcctcttgattctttgtaaattgccagggtgggtgggtacatatctcttcttgattctgcatttcatacttaactatattaaagcttcaaggaacaataaatagtaacctggtaatgacct

SEQ ID NO: 174666 - DNA, 2041 bp, Homo sapiens
  Payload ID: 14299
  Gene Symbol: RGN
  Gene Name: regucalcin
  Uniprot ID: Q15493
  ENST ID: ENST00000457380
  CDS Start-End: 991-1674
gagaaatctccatcctggcgagtgcccgagccaggccggcctccccgccccctccctggaaaggaaaggccccggcgacaacagagccagacccgctcatcccgatctcccagaaggcgactgacagctgactgccagaaggagatcgcgccaggagactgactgctctgtgcccacccggggacccgggcccgttcagccgggctggctggtgcgccctctgcaaagcctgcgccagggaggaggcaggctcaaccttcagattcccagggcctctctgtcgctgtcgccgtcgccgtcgcccgaggtcccagcggctctaccagattgttgtggaggcctctcacccgcacagataatttttctctgtcttctcccagttcgctggtcatggtctctggcctaaagtcccagcatagactgttcctctcctgtggagtctaacactctttgccaaactggcacggtgtcttcctgggaagcaagaaatcactgagggcctgtcagttcctgccagggtggttcgatgctgtccttttctccactccttccatggtctgcgttggaaaatgtgtgttagttcgaattcagcgagttctcattggggtgaacatagtcctaaaaatgcagttcataaaaatcaaccacacagagaagaaaaataaataaatcagtaaagcagctcagaaaaatgcaggtgtggcgggccctggcctctgcaccctcatagaggggctcaacagcatcaacagaaggtgggggagcagaaggtgccctgcagacacccagaggggccaccaatgagcaaactgccagctccctgacccgccctggggcccagggtattgacataaaggacggccttgcactatttcaacagccagttctctgagggtcacaaacaccaaggagtggaggtcagagtgtcacttttttgttttctttttgaaagatcattcgagaaacacgtcactgatctcccctgcgaccatgtcttccattaagattgagtgtgttttgccagagaactgccggtgtggtgagtctccagtatgggaggaagtgtccaactctctgctctttgtagacattcctgcaaaaaaggtttgccggtgggattcattcaccaagcaagtacagcgagtgaccatggatgccccagtcagctccgtggctcttcgccagtcgggaggctatgttgccaccattggaacaaagttctgtgctttgaactggaaagaacaatcagcagttgtcttggccacggtggataacgacaagaaaaacaatcgcttcaatgatgggaaggtggatcccgccgggaggtactttgctgccaaccgcagaagtgtttacaagctagaaaaggaagaacaaatcccagatggaatgtgtattgatgctgaggggaagctctgggtggcctgttacaatggaggaagagtgattcgtttagatcctgtgacagggaaaagacttcaaactgtgaagttgcctgttgataaaacaacttcatgctgctttggagggaagaattactctgaaatgtatgtgacctgcgcccgggatgggatggaccccgagggtcttttgaggcaacctgaagctggtggaattttcaagataactggtctgggggtcaaaggaattgctccctactcctatgcgggatgaggacaggtcttctttcctgccagagggagctctgaagacaactagagaattctgggcctgaaatttcaatctagttagaaagaaaaatgaggcaatgattttattaacagcgttaagttttaatttacaacttttaaaaggcagagcatttttaacaaggggtgacaggtggttttgataacacacttataaggctttctgtaaaaggtactatagaagggcgaagaatcgttcaactgtcaatcagcctcttgattctttgtaaattgccagggtgggtgggtacatatctcttcttgattctgcatttcatacttaactatattaaagcttcaaggaacaataaatagtaacctggtaatgacct

SEQ ID NO: 174667 - DNA, 795 bp, Homo sapiens
  Payload ID: 14300
  Gene Symbol: RESP18
  Gene Name: regulated endocrine-specific protein 18
  Uniprot ID: Q5W5W9
  ENST ID: ENST00000333527
  CDS Start-End: 1-687
atggcagtggatgtggaattcggagtcgcgggctggtgggaagctgcagccccgctcagcccctcggccgtggccgctaccttcactgagacttggccggggagtgagcgcgccgagcctgggaggatacagcacccactgtggcctgggagctccgaggggctccagctgcttgtctgcttcctgctgctgaacagctgcccggggggctgcagcgacactagtgcccacgatggtcaggaccaagtaggagtggggcagctttggcccctccaaggatttgccaccccagtcttccagcatttacaggttgtgctccagcagattataccccaaggtctgttctggaaggatgacatcacccaggatgcaatgatccaaaagatggagcatgccagcagactgcatccccaagaaccatgcctgaaggatgggaaggcacttttccccactaaaaccactgagagccccctggccaaggtgaacagggatcagtgctttacctccgaagtggtttctaaggccctgaaacaagaggtggccaaccctgtcaagattacctataggtgttcatatggggggctggacatgatgcaggcgccgggaccctctaaggaagaaattatctataagatcatgcggcttctctgggccacttcctactgtgggccgcaaccctgtggctgattgagacctcatgtgaagcctccctgccccagcacccttcccattgcccttcagaggagcagttcttggatgacccagatttgaatcattaaagtagactctcatgca

SEQ ID NO: 174668 - DNA, 626 bp, Homo sapiens
  Payload ID: 14300
  Gene Symbol: RESP18
  Gene Name: regulated endocrine-specific protein 18
  ENST ID: ENST00000392083
  CDS Start-End: 247-522
atacagcacccactgtggcctgggagctccgaggggctccagctgcttgtctgcttcctgctgctgaacagctgcccggggggctgcagcgacactagtgcccacgatggtcaggaccaagtaggagtggggcagctttggcccctccaaggatttgccaccccagtcttccagcatttacaggttgtgctccagcagattataccccaaggtctgttctggaaggatgacatcacccaggatgcaatgatccaaaagatggagcatgccagcagactgcatccccaagaaccatgcctgaaggatgggaaggcacttttccccactaaaaccactgagcaagaggagaaacttcaactcctattccccagtgagactcacagccccctggccaaggtgaacagggatcagtgctttacctccgaagtggtttctaaggccctgaaacaagaggtggccaaccctgtcaagggcttctctgggccacttcctactgtgggccgcaaccctgtggctgattgagacctcatgtgaagcctccctgccccagcacccttcccattgcccttcagaggagcagttcttggatgacccagatttgaatcattaaagtagactctcatgca

SEQ ID NO: 174669 - DNA, 7055 bp, Homo sapiens
  Payload ID: 14301
  Gene Symbol: RIMS1
  Gene Name: regulating synaptic membrane exocytosis 1
  Uniprot ID: Q86UR5
  ENST ID: ENST00000264839
  CDS Start-End: 1-4626
atgtcctcggccgtggggccccgcggtcctcgcccacccacggtgcctccccccatgcaagagctgcccgacctgagccacctgaccgaagaggagaggaacattatcatggcagtgatggaccggcagaaggaagaggaggaaaaagaagaagccatgctcaagtgtgttgtcagggacatggcgaagcctgctgcctgcaaaacaccaagaaatgctgaaaaccagccccaccaaccttcaccgagattgcatcaacagtttgaaagctataaggaacaagtgagaaaaataggggaagaagcgcggcgttaccagggcgagcacaaagacgatgctccgacttgtggaatctgtcataaaacaaagtttgctgatgggtgcggtcatctctgctcctattgtcgcactaagttctgtgcgcgctgcggaggccgcgtgtctctacggtcaaacaacgaggacaaagtggttatgtgggtatgcaatttatgtcgaaagcaacaagaaatcttaaccaaatctggggcatggttctttggaagtggccctcagcagacaagtcaggatggaaccctgagtgatacagctacaggtgctggctctgaggtaccaagagaaaagaaagcacgactccaagagcgatcgcggtctcagacacccctaagcacagcagctgcctcctcccaggatgctgctcctcccagcgcaccaccagacaggagcaaaggggctgagccctcgcagcaagccttggggcctgaacagaagcaggcttcatccaggtctagaagtgaacctcctagagagagaaagaagaccccagggctttccgagcagaatggcaaaggagccctgaagagcgagcggaaacgcgtgccaaagacctcagcgcagcccgtggagggggccgtcgaagaacgggagcgcaaagaaaggcgggaaagccgaaggcttgagaaagggcgatcacaggattacccagacacgccggaaaaacgggatgagggcaaagcggcggatgaggaaaagcaaagaaaagaggaggattatcagaccaggtaccgcagcgacccgaacctagctcggtacccggtgaaaccgccgcctgaggagcagcagatgcgcatgcacgcccgggtgtcccgcgccaggcacgagcggcgccacagcgacgtggcgctcccgcgcaccgaggcgggcgcggcgctgccggagggcaaggccggcaaacgcgcgccggcggcagccagggcctcgccgccggactcgccgcgggcttactcggctgagagaactgcggagaccagggcgccgggcgccaagcagctaacgaaccacagcccgccggcgcccagacatgggccggttcccgcagaagccccggagctcaaagcccaggagcccctcaggaagcagagccgcctggaccccagctcggcggtcctcatgcggaaggccaagcgcgagaaggtggagaccatgctgcggaacgactctttgagctcagaccagtccgagtcggtgcggccgtccccgcccaagccgcaccggtccaagagaggcggcaagaagcggcagatgtcggtgagcagctctgaggaggagggcgtgtcgacgcccgagtacaccagctgcgaggacgtggagctggagagcgagagcgtcagcgagaaaggtgatttggattattactggttggatcctgccacgtggcacagccgggagacatcacctattagttcgcatcctgtaacgtggcaaccatctaaagagggggaccgattaattggacgtgttattcttaacaagagaacaaccatgcccaaagactcaggtgcattgctgggtctgaaagttgttggaggaaaaatgactgacttaggacgacttggtgctttcatcaccaaagtaaagaagggtagcctagcagatgtagttggacacctaagagcaggggatgaagttctagaatggaatggtaaacccctgccgggagctacaaatgaagaagtttacaacattattttagaatcaaaatcagaacctcaagttgaaattattgtttcaaggcctattggtgacattccccggattcctgagagctcccaccctccactggagtccagttcaagttcctttgaatctcagaagatggaaaggccttccatttctgttatttctccaacaagtcctggagctctaaaagatgccccacaagtcttaccagggcaactttctgtgaagttgtggtatgataaagtgggacaccagctgattgtaaatgttctgcaagcaacagatctacctgctagagtagatggacgtcctcgaaatccctatgtaaaaatgtattttcttccagatagaagtgataaaagtaaaaggaggaccaaaacagtaaagaaaatactagaaccaaaatggaatcaaacttttgtctattcacatgtacatcgtagagattttagagaacgaatgttagaaataactgtgtgggaccaaccaagagtgcaagaagaagaaagtgaatttcttggagagatcctcatagaattggagacagcgcttttagatgatgaaccgcattggtataaacttcagacacatgatgagtcttcactacctctgcctcagccatcacctttcatgccaaggcgacatattcatggagaaagctctagcaaaaagctacaaagatctcagcgaatcagtgatagtgacatctcagattatgaggttgatgatggtattggcgtagttcctccagtaggctataggtctagtgctagagaaagtaaatctacaacattaactgtgccagaacagcaaagaacaactcatcaccgctcacgttcagtatctcctcatcgcggcaatgatcagggaaagccgcgttcacgtttaccaaatgtgccattacagaggagtttagatgaaattcatccaacaagaaggtcacgttctccaaccagacaccatgatgcctcccgaagtccagttgatcatagaaccagagatgtggatagtcagtatttatcagaacaagacagtgagcttcttatgctgcccagagcaaaacgaggacgaagtgcagaatgcctacatactaccagacatcttgttaggcactataaaacattacctcccaagatgcctttattacagagcagttctcactggaatatttacagtgaactgcagccctttcttgacagggctaggagtgctagtaccaactgcttgagaccagatactagtttgcattcaccagaacgagaaagaatgcaccgacagagaagtccaacacaatctcctccagcagacacatcgttcagcagtcgcaggggaagacagctcccacaagtgccagtgagaagcggcagtatagaacaagcaagcttagtagtggaggagcgaacaagacagatgaaaatgaaagtgcatcgatttaagcagacaacagggtctggttctagtcaagaacttgatcgcgagcaatattccaagtataacatacataaagatcagtacagaagctgtgataacgtctctgccaaatcatcagatagtgatgtcagtgatgtttccgccatttcccgaaccagcagtgcctcacgcctcagcagcacaagctttatgtcagagcaatctgagcgccccaggggtagaatcagttcatttacccccaaaatgcaaggcagacggatggggacttcaggaagatccatcatgaagagcaccagtgtcagtggagagatgtacacactggagcataatgacggcagccagtcagacacagctgtgggtacagttggagcaggtggaaagaaacggagatccagccttagtgccaaagtggttgccatagtgtctcgaaggagtagaagcacatcccagcttagtcaaacagagtcgggccacaaaaagttaaaaagtaccatccagagaagcacagaaacaggcatggcagctgaaatgagaaagatggtaaggcagccgagccgagagtctactgatggcagcatcaacagttacagctctgagggcaatttaatatttcctggagtgcgactgggagctgacagtcaattcagtgattttcttgatggattgggaccagcccagcttgttggccgccaaacccttgccacccctgcaatgggtgatatacaaataggaatggaggacaaaaagggccaattagaagtggaagtcattagagcacgaagcctcacacaaaagcctggttccaaatctacacctgctccatatgtcaaagtatatcttttggaaaatggggcctgtatagccaagaagaagacaagaattgcacgaaaaacccttgatcctttgtatcagcagtctctggtttttgatgaaagtccacagggtaaagttcttcaggtgattgtctggggagactatggcagaatggaccacaaatgctttatgggtgtggctcagatcttgttggaagaactcgacctgtccagcatggtgatcggatggtacaaattgttcccaccgtcctcactggtggatcccacactcactcccctcacccggcgggcttcccagtcatctctggaaagttcaactgggcctccctgtattcgatcatagtgaactcataccagagtcattccaataaaactctacttttcaggataataatctgaaccagatatttcatgatcgaaagcattgttggagacagacaatcaacttgtgttttgcctgtagtagtttttcaataatatgtcccaattgttatttaaaacatggcttcatatgacagaacaaggcaatctatcaaatttacaggaagaatcaacatgctggtgagagtcactgatgcttctaacaaatagaaaaagaggaaactttaaatccacgcatacacgtacacacacacatgcacacacacacacaccaaattgaacaaactggaaactctcactctgtgaaaagttgtattctacacatttctgcacagaccacaagcagtgttatttccctgatgtttgagttgttttgttcttttgtgtgttttgtttatttgtgtgttgtttgttggttttcgtttcttgagtttttgttttgttttcaccacatctgttatttccactagtttttttttggctgtgtcatgacaggcctcatgatgctaacagagattcttcccttcttttttccaaaagcaccaaaaaaaagggctgaagtagtctctgtagcatctccccaaagtgttaaacagctacataaggtgaagccaaggaagggtttcactagctttcattttataattatttaaagtcttatgtgtggatacccaagagacaaaaagttatcttccaaaataaataatcacagaagtacttttttaatgaagagcctatctgtttgcattctagaaaattaatttatggtttccattgttttgcatggaagacttttaaagaagtcaatctgcaactaatgctggggactaaaactaactgcataattgtactttgaaaacactccttgtaatgcctttttcttcctgatattaaaaaaatgctcatgtgtataaaccatactttgacttcccaaaaatggtgactaggaatggatttgagcctaagacactttgagctatgcccaggcttctcagccatacctcagtgtagacacatccatctgccctggaaagagcatggtatgagctgttcaatattccactggaaattccagttgaaatattctgcactaaactattgtttttattgaattttagtttacatttctttgagattgatgcaagcacaaagcttgattttttaatgcaaagtatcttactttttggggggaaaataaacaaaatgaactttcaatttgcattttcatttagtttctcttggccttgaatttcccttgtgacattctgtacatgtgctacaaactgcagtctctgcaggtgcattgatatgttctccctccttttatgagtcactccacttttgtgattacacaaatagagcagcatgacttggaactgttcagagctgcatgcacattttgtaaaaaaaaaaaattttaaaaagaaaagaaacaaaaggttatttaataatgtatgttagttccacataggccagcttgtatgttgcatgtacttgtacagtttgcttgttaattactataccgaaataaccaagaaatctaagccatccacttttgttatagacattttgcaggttttagccagactcagtctctgggtctgtggtgaaatgtctatagatggactttattttttaccctccggaaaacgtgatgtagtacggaccaaattccttctaataaatattttggtgtagattcctactgtggggctgtaacacatgtagacactgtgtacacactaggttttaattcatagacatactgcctgcaccaagtgaattatttattattatttacacatgccagaattatctgcccatcattccacagggcacagattgaccactgctcaccatgctgagtaggaggaactgaagcattggtgcacttctactagattccgttctgtcttagtggccaacaatcaactgattataattgggtagtatctttctattttgaccacttgtcttaacactcccctgtgcttttaaatgaaattccaattcatgtatgtaaacatgtttaataaaatttacttttcatgtcagtcagtagccatatgtgttctatgtcttgccagatttccattgtgggttctatggtgcaaaatgggagccaggccatgggaaggggaggctggggtttgttgtctgctgcgggcatttgacttgacttgtcactgcactatattatgtcttaatcgatggcccaaagggtactttgcatcacatacaagttttcacttcgtcagcctgtctaagtgagcacatgactatacttctgaaaagtggcattattaaaaataataaatctcagtaagaatcaaatggaaggttgttttctgctgctgtttgaatgtgctaataaaagagacaactctattg

SEQ ID NO: 174670 - DNA, 2223 bp, Homo sapiens
  Payload ID: 14301
  Gene Symbol: RIMS1
  Gene Name: regulating synaptic membrane exocytosis 1
  ENST ID: ENST00000370420
  CDS Start-End: 1-2223
cgtcctcgaaatccctatgtaaaaatgtattttcttccagatagaagtgataaaagtaaaaggaggaccaaaacagtaaagaaaatactagaaccaaaatggaatcaaacttttgtctattcacatgtacatcgtagagattttagagaacgaatgttagaaataactgtgtgggaccaaccaagagtgcaagaagaagaaagtgaatttcttggagagatcctcatagaattggagacagcgcttttagatgatgaaccgcattggtataaacttcagacacatgatgagtcttcactacctctgcctcagccatcacctttcatgccaaggcgacatattcatggagaaagctctagcaaaaagctacaaagatctcagcgaatcagtgatagtgacatctcagattatgaggttgatgatggtattggcgtagttcctccagtaggctataggtctagtgctagagaaagtaaatctacaacattaactgtgccagaacagcaaagaacaactcatcaccgctcacgttcagtatctcctcatcgcggcaatgatcagggaaagccgcgttcacgtttaccaaatgtgccattacagaggagtttagatgaaattcatccaacaagaaggtcacgttctccaaccagacaccatgatgcctcccgaagtccagttgatcatagaaccagagatgtggatagtcagtatttatcagaacaagacagtgagcttcttatgctgcccagagcaaaacgaggacgaagtgcagaatgcctacatactaccagtgaactgcagccctttcttgacagggctaggagtgctagtaccaactgcttgagaccagatactagtttgcattcaccagaacgagaaagaatgcaccgacagagaagtccaacacaatctcctccagcagacacatcgttcagcagtcgcaggggaagacagctcccacaagtgccagtgagaagcggcagtatagaacaagcaagcttagtagtggaggagcgaacaagacagatgaaaatgaaagtgcatcgatttaagcagacaacagggtctggttctagtcaagaacttgatcgcgagcaatattccaagtataacatacataaagatcagtacagaagctgtgataacgtctctgccaaatcatcagatagtgatgtcagtgatgtttccgccatttcccgaaccagcagtgcctcacgcctcagcagcacaagctttatgtcagagcaatctgagcgccccaggggtagaatcagttcatttacccccaaaatgcaaggcagacggatggggacttcaggaagatccatcatgaagagcaccagtgtcagtggagagatgtacacactggagcataatgacggcagccagtcagacacagctgtgggtacagttggagcaggtggaaagaaacggagatccagccttagtgccaaagtggttgccatagtgtctcgaaggagtagaagcacatcccagcttagtcaaacagagtcgggccacaaaaagttaaaaagtaccatccagagaagcacagaaacaggcatggcagctgaaatgagaaagatggtaaggcagccgagccgagagtctactgatggcagcatcaacagttacagctctgagggcaatttaatatttcctggagtgcgactgggagctgacagtcaattcagtgattttcttgatggattgggaccagcccagcttgttggccgccaaacccttgccacccctgcaatgggtgatatacaaataggaatggaggacaaaaagggccaattagaagtggaagtcattagagcacgaagcctcacacaaaagcctggttccaaatctacacctgctccatatgtcaaagtatatcttttggaaaatggggcctgtatagccaagaagaagacaagaattgcacgaaaaacccttgatcctttgtatcagcagtctctggtttttgatgaaagtccacagggtaaagttcttcaggtgattgtctggggagactatggcagaatggaccacaaatgctttatgggtgtggctcagatcttgttggaagaactcgacctgtccagcatggtgatcggatggtacaaattgttcccaccgtcctcactggtggatcccacactcactcccctcacccggcgggcttcccagtcatctctggaaagttcaactgggcctccctgtattcgatcatag

SEQ ID NO: 174671 - DNA, 3542 bp, Homo sapiens
  Payload ID: 14301
  Gene Symbol: RIMS1
  Gene Name: regulating synaptic membrane exocytosis 1
  Uniprot ID: Q86UR5
  ENST ID: ENST00000401910
  CDS Start-End: 313-3351
agtaaatgctaccagtccccacaccaccaggcccaccgaagcttgtctacagtattttatccaagcagtcctttgggtaactgcacagtgcctgcagtgacctgagtcagtcatgcaaggagactttcttgttctcacaccaatgttttatttcagtttccattttctgctggtcctgttgttcaatgatataagcagagtgatgaaggaggcgcttcacactcttcttagataagatcttgagcagcagagagtggtttaaacagcaaggcttaaatctctcaagctggatttatttccaagtttgctgtcatgtgtgcacctgggattcatgtctcttcagaagggtgggaagaagtgaggtctgttgattccgaagagggaacaattgaagctcgacgagcagttgctggtgatttggattattactggttggatcctgccacgtggcacagccgggagacatcacctattagttcgcatcctgtaacgtggcaaccatctaaagagggggaccgattaattggacgtgttattcttaacaagagaacaaccatgcccaaagactcaggtgcattgctgggtctgaaagttgttggaggaaaaatgactgacttaggacgacttggtgctttcatcaccaaagtaaagaagggtagcctagcagatgtagttggacacctaagagcaggggatgaagttctagaatggaatggtaaacccctgccgggagctacaaatgaagaagtttacaacattattttagaatcaaaatcagaacctcaagttgaaattattgtttcaaggcctattggtgacattccccggattcctgagagctcccaccctccactggagtccagttcaagttcctttgaatctcagaagatggaaaggccttccatttctgttatttctccaacaagtcctggagctctaaaagatgccccacaagtcttaccagggcaactttctgtgaagttgtggtatgataaagtgggacaccagctgattgtaaatgttctgcaagcaacagatctacctgctagagtagatggacgtcctcgaaatccctatgtaaaaatgtattttcttccagatagaagtgataaaagtaaaaggaggaccaaaacagtaaagaaaatactagaaccaaaatggaatcaaacttttgtctattcacatgtacatcgtagagattttagagaacgaatgttagaaataactgtgtgggaccaaccaagagtgcaagaagaagaaagtgaatttcttggagagatcctcatagaattggagacagcgcttttagatgatgaaccgcattggtataaacttcagacacatgatgagtcttcactacctctgcctcagccatcacctttcatgccaaggcgacatattcatggagaaagctctagcaaaaagctacaaagatctcagcgaatcagtgatagtgacatctcagattatgaggttgatgatggtattggcgtagttcctccaggctataggtctagtgctagagaaagtaaatctacaacattaactgtgccagaacagcaaagaacaactcatcaccgctcacgttcagtatctcctcatcgcggcaatgatcagggaaagccgcgttcacgtttaccaaatgtgccattacagaggagtttagatgaaattcatccaacaagaaggtcacgttctccaaccagacaccatgatgcctcccgaagtccagttgatcatagaaccagagatgtggatagtcagtatttatcagaacaagacagtgagcttcttatgctgcccagagcaaaacgaggacgaagtgcagaatgcctacatactaccagtgaactgcagccctttcttgacagggctaggagtgctagtaccaactgcttgagaccagatactagtttgcattcaccagaacgagaaaggcactccagaaagtctgaaagatctagcatccaaaaacagactaggaaaggcactgcctctgatgcagaaagaatgcaccgacagagaagtccaacacaatctcctccagcagacacatcgttcagcagtcgcaggggaagacagctcccacaagtgccagtgagaagcggcagtatagaacaagcaagcttagtagtggaggagcgaacaagacagatgaaaatgaaagtgcatcgatttaagcagacaacagggtctggttctagtcaagaacttgatcgcgagcaatattccaagtataacatacataaagatcagtacagaagctgtgataacgtctctgccaaatcatcagatagtgatgtcagtgatgtttccgccatttcccgaaccagcagtgcctcacgcctcagcagcacaagctttatgtcagagcaatctgagcgccccaggggtagaatcagttcatttacccccaaaatgcaaggcagacggatggggacttcaggaagatccatcatgaagagcaccagtgtcagtggagagatgtacacactggagcataatgacggcagccagtcagacacagctgtgggtacagttggagcaggtggaaagaaacggagatccagccttagtgccaaagtggttgccatagtgtctcgaaggagtagaagcacatcccagcttagtcaaacagagtcgggccacaaaaagttaaaaagtaccatccagagaagcacagaaacaggcatggcagctgaaatgagaaagatggtaaggcagccgagccgagagtctactgatggcagcatcaacagttacagctctgagggcaatttaatatttcctggagtgcgactgggagctgacagtcaattcagtgattttcttgatggattgggaccagcccagcttgttggccgccaaacccttgccacccctgcaatgggtgatatacaaataggaatggaggacaaaaagggccaattagaagtggaagtcattagagcacgaagcctcacacaaaagcctggttccaaatctacacctgctccatatgtcaaagtatatcttttggaaaatggggcctgtatagccaagaagaagacaagaattgcacgaaaaacccttgatcctttgtatcagcagtctctggtttttgatgaaagtccacagggtaaagttcttcaggtgattgtctggggagactatggcagaatggaccacaaatgctttatgggtgtggctcagatcttgttggaagaactcgacctgtccagcatggtgatcggatggtacaaattgttcccaccgtcctcactggtggatcccacactcactcccctcacccggcgggcttcccagtcatctctggaaagttcaactgggcctccctgtattcgatcatagtgaactcataccagagtcattccaataaaactctacttttcaggataataatctgaaccagatatttcatgatcgaaagcattgttggagacagacaatcaacttgtgttttgcctgtagtagtttttcaataatatgtcccaattgttatttaaaacatggcttcatatgacagaacaaggcaatctatc

SEQ ID NO: 174672 - DNA, 2500 bp, Homo sapiens
  Payload ID: 14301
  Gene Symbol: RIMS1
  Gene Name: regulating synaptic membrane exocytosis 1
  ENST ID: ENST00000453976
  CDS Start-End: 241-2500
gattcctcagttagggaaactgcagaggaaatgatctgttacacagggcttggcaggaccattgccagtgattgataatgggaccaaatcatttcaggtgatttggattattactggttggatcctgccacgtggcacagccgggagacatcacctattagttcgcatcctgtaacgtggcaaccatctaaagagggggaccgattaattggacgtgttattcttaacaagagaacaaccatgcccaaagactcaggtgcattgctgggtctgaaagttgttggaggaaaaatgactgacttaggacgacttggtgctttcatcaccaaagtaaagaagggtagcctagcagatgtagttggacacctaagagcaggggatgaagttctagaatggaatggtaaacccctgccgggagctacaaatgaagaagtttacaacattattttagaatcaaaatcagaacctcaagttgaaattattgtttcaaggcctattggtgacattccccggattcctgagagctcccaccctccactggagtccagttcaagttcctttgaatctcagaagatggaaaggccttccatttctgttatttctccaacaagtcctggagctctaaaagatgccccacaagtcttaccagggcaactttctgtgaagttgtggtatgataaagtgggacaccagctgattgtaaatgttctgcaagcaacagatctacctgctagagtagatggacgtcctcgaaatccctatgtaaaaatgtattttcttccagatagaagtgataaaagtaaaaggaggaccaaaacagtaaagaaaatactagaaccaaaatggaatcaaacttttgtctattcacatgtacatcgtagagattttagagaacgaatgttagaaataactgtgtgggaccaaccaagagtgcaagaagaagaaagtgaatttcttggagagatcctcatagaattggagacagcgcttttagatgatgaaccgcattggtataaacttcagacacatgatgagtcttcactacctctgcctcagccatcacctttcatgccaaggcgacatattcatggagaaagctctagcaaaaagctacaaagatctcagcgaatcagtgatagtgacatctcagattatgaggttgatgatggtattggcgtagttcctccagtaggctataggtctagtgctagagaaagtaaatctacaacattaactgtgccagaacagcaaagaacaactcatcaccgctcacgttcagtatctcctcatcgcggcaatgatcagggaaagccgcgttcacgtttaccaaatgtgccattacagaggagtttagatgaaattcatccaacaagaaggtcacgttctccaaccagacaccatgatgcctcccgaagtccagttgatcatagaaccagagatgtggatagtcagtatttatcagaacaagacagaatgcaccgacagagaagtccaacacaatctcctccagcagacacatcgttcagcagtcgcaggggaagacagctcccacaagtgccagtgagaagcggcagtatagaacaagcaagcttagtagtggaggagcgaacaagacagatgaaaatgaaagtgcatcgatttaagcagacaacagggtctggttctagtcaagaacttgatcgcgagcaatattccaagtataacatacataaagatcagtacagaagctgtgataacgtctctgccaaatcatcagatagtgatgtcagtgatgtttccgccatttcccgaaccagcagtgcctcacgcctcagcagcacaagctttatgtcagagcaatctgagcgccccaggggtagaatcagttcatttacccccaaaatgcaaggcagacggatggggacttcaggaagatccatcatgaagagcaccagtgtcagtggagagatgtacacactggagcataatgacggcagccagtcagacacagctgtgggtacagttggagcaggtggaaagaaacggagatccagccttagtgccaaagtggttgccatagtgtctcgaaggagtagaagcacatcccagcttagtcaaacagagtcgggccacaaaaagttaaaaagtaccatccagagaagcacagaaacaggcatggcagctgaaatgagaaagatggtaaggcagccgagccgagagtctactgatggcagcatcaacagttacagctctgagggcaatttaatatttcctggagtgcgactgggagctgacagtcaattcagtgattttcttgatggattgggaccagcccagcttgttggccgccaaacccttgccacccctgcaatgggtgatatacaaataggaatggaggacaaaaagggccaattagaagtggaagtcattagagcacgaagcctcacacaaaagcctggttccaaatctacacctgctccatatgtcaaagtatatcttttggaaaatggggcctgtatag

SEQ ID NO: 174673 - DNA, 1787 bp, Homo sapiens
  Payload ID: 14301
  Gene Symbol: RIMS1
  Gene Name: regulating synaptic membrane exocytosis 1
  Uniprot ID: Q86UR5
  ENST ID: ENST00000414192
  CDS Start-End: 191-850
agttcacaggcagctcagacagatattccagccagccaccgcacaagttatttaaaccaggtcaaagcttctttggcattcagttttccccagagaacaatttaatgctgatacttaattttttcaagatagacaagagtcgggccacaaaaagttaaaaagtaccatccagagaagcacagaaacaggcatggcagctgaaatgagaaagatggtaaggcagccgagccgagagtctactgatggcagcatcaacagttacagctctgagggcaatttaatatttcctggagtgcgactgggagctgacagtcaattcagtgattttcttgatggattgggaccagcccagcttgttggccgccaaacccttgccacccctgcaatgggtgatatacaaataggaatggaggacaaaaagggccaattagaagtggaagtcattagagcacgaagcctcacacaaaagcctggttccaaatctacacctgctccatatgtcaaagtatatcttttggaaaatggggcctgtatagccaagaagaagacaagaattgcacgaaaaacccttgatcctttgtatcagcagtctctggtttttgatgaaagtccacagggtaaagttcttcaggtgattgtctggggagactatggcagaatggaccacaaatgctttatgggtgtggctcagatcttgttggaagaactcgacctgtccagcatggtgatcggatggtacaaattgttcccaccgtcctcactggtggatcccacactcactcccctcacccggcgggcttcccagtcatctctggaaagttcaactgggcctccctgtattcgatcatagtgaactcataccagagtcattccaataaaactctacttttcaggataataatctgaaccagatatttcatgatcgaaagcattgttggagacagacaatcaacttgtgttttgcctgtagtagtttttcaataatatgtcccaattgttatttaaaacatggcttcatatgacagaacaaggcaatctatcaaatttacaggaagaatcaacatgctggtgagagtcactgatgcttctaacaaatagaaaaagaggaaactttaaatccacgcatacacgtacacacacacatgcacacacacacacaccaaattgaacaaactggaaactctcactctgtgaaaagttgtattctacacatttctgcacagaccacaagcagtgttatttccctgatgtttgagttgttttgttcttttgtgtgttttgtttatttgtgtgttgtttgttggttttcgtttcttgagtttttgttttgttttcaccacatctgttatttccactagtttttttttggctgtgtcatgacaggcctcatgatgctaacagagattcttcccttcttttttccaaaagcaccaaaaaaaagggctgaagtagtctctgtagcatctccccaaagtgttaaacagctacataaggtgaagccaaggaagggtttcactagctttcattttataattatttaaagtcttatgtgtggatacccaagagacaaaaagttatcttccaaaataaataatcacagaagtacttttttaatgaagagcctatctgtttgcattctagaaaattaatttatggtttccattgttttgcatggaagacttttaaagaagtcaatctgcaactaatgctggggactaaaactaactgcataattgtactttgaaaacactccttgtaatgcctttttcttcctgatattaaaaaaa

SEQ ID NO: 174674 - DNA, 2799 bp, Homo sapiens
  Payload ID: 14301
  Gene Symbol: RIMS1
  Gene Name: regulating synaptic membrane exocytosis 1
  Uniprot ID: Q86UR5
  ENST ID: ENST00000425662
  CDS Start-End: 341-2623
agaaaagcctgaagaagcacttttgcctgtgttcccaacaatcaattgtgtatactcttggtttatgctttctggtgccagttgtcattgagctgagtaagattcctcagttagggaaactgcagaggaaatgatctgttacacagggcttggcaggaccattgccagtgattgataatgggaccaaatcatttcaggtgatttggattattactggttggatcctgccacgtggcacagccgggagacatcacctattagttcgcatcctgtaacgtggcaaccatctaaagagggggaccgattaattggacgtgttattcttaacaagagaacaaccatgcccaaagactcaggtgcattgctgggtctgaaagttgttggaggaaaaatgactgacttaggacgacttggtgctttcatcaccaaagtaaagaagggtagcctagcagatgtagttggacacctaagagcaggggatgaagttctagaatggaatggtaaacccctgccgggagctacaaatgaagaagtttacaacattattttagaatcaaaatcagaacctcaagttgaaattattgtttcaaggcctattggtgacattccccggattcctgagagctcccaccctccactggagtccagttcaagttcctttgaatctcagaagatggaaaggccttccatttctgttatttctccaacaagtcctggagctctaaaagatgccccacaagtcttaccagggcaactttctgtgaagttgtggtatgataaagtgggacaccagctgattgtaaatgttctgcaagcaacagatctacctgctagagtagatggacgtcctcgaaatccctatgtaaaaatgtattttcttccagatagaagtgataaaagtaaaaggaggaccaaaacagtaaagaaaatactagaaccaaaatggaatcaaacttttgtctattcacatgtacatcgtagagattttagagaacgaatgttagaaataactgtgtgggaccaaccaagagtgcaagaagaagaaagtgaatttcttggagagatcctcatagaattggagacagcgcttttagatgatgaaccgcattggtataaacttcagacacatgatgagtcttcactacctctgcctcagccatcacctttcatgccaaggcgacatattcatggagaaagctctagcaaaaagctacaaagatctcagcgaatcagtgatagtgacatctcagattatgaggttgatgatggtattggcgtagttcctccagtaggctataggtctagtgctagagaaagtaaatctacaacattaactgtgccagaacagcaaagaacaactcatcaccgctcacgttcagtatctcctcatcgcggcaatgatcagggaaagccgcgttcacgtttaccaaatgtgccattacagaggagtttagatgaaattcatccaacaagaaggtcacgttctccaaccagacaccatgatgcctcccgaagtccagttgatcatagaaccagagatgtggatagtcagtatttatcagaacaagacagtgagcttcttatgctgcccagagcaaaacgaggacgaagtgcagaatgcctacatactaccagtgaactgcagccctttcttgacagggctaggagtgctagtaccaactgcttgagaccagatactagtttgcattcaccagaacgagaaaggcactccagaaagtctgaaagatctagcatccaaaaacagactaggaaaggcactgcctctgatgcagaaagaatgcaccgacagagaagtccaacacaatctcctccagcagacacatcgttcagcagtcgcaggggaagacagctcccacaagtgccagtgagaagcggcagtatagaacaagagtcgggccacaaaaagttaaaaagtaccatccagagaagcacagaaacaggcatggcagctgaaatgagaaagatggtaaggcagccgagccgagagtctactgatggcagcatcaacagttacagctctgagggcaatttaatatttcctggagtgcgactgggagctgacagtcaattcagtgattttcttgatggattgggaccagcccagcttgttggccgccaaacccttgccacccctgcaatgggtgatatacaaataggaatggaggacaaaaagggccaattagaagtggaagtcattagagcacgaagcctcacacaaaagcctggttccaaatctacacctgctccatatgtcaaagtatatcttttggaaaatggggcctgtatagccaagaagaagacaagaattgcacgaaaaacccttgatcctttgtatcagcagtctctggtttttgatgaaagtccacagggtaaagttcttcaggtgattgtctggggagactatggcagaatggaccacaaatgctttatgggtgtggctcagatcttgttggaagaactcgacctgtccagcatggtgatcggatggtacaaattgttcccaccgtcctcactggtggatcccacactcactcccctcacccggcgggcttcccagtcatctctggaaagttcaactgggcctccctgtattcgatcatagtgaactcataccagagtcattccaataaaactctacttttcaggataataatctgaaccagatatttcatgatcgaaagcattgttggagacagacaatcaacttgtgttttgcctgtagtagtttttcaataatatgtcccaattgttatttaaaacatggcttcatatgacaga

SEQ ID NO: 174675 - DNA, 3097 bp, Homo sapiens
  Payload ID: 14301
  Gene Symbol: RIMS1
  Gene Name: regulating synaptic membrane exocytosis 1
  Uniprot ID: Q86UR5
  ENST ID: ENST00000523963
  CDS Start-End: 231-2684
gcacagtgcctgcagtgacctgagtcagtcatgcaaggagactttcttgttctcacaccaatgttttatttcagtttccattttctgctggtcctgttgttcaatgatataagcagagtgatgaaggaggcgcttcacactcttcttagataagatcttgagcagcagagagtggtttaaacagcaaggcttaaatctctcaagctggatttatttccaagtttgctgtcatgtgtgcacctgggattcatgtctcttcagaagggtgggaagaagtgaggtctgttgattccgaagagggaacaattgaagctcgacgagcagttgctggtgatttggattattactggttggatcctgccacgtggcacagccgggagacatcacctattagttcgcatcctgtaacgtggcaaccatctaaagagggggaccgattaattggacgtgttattcttaacaagagaacaaccatgcccaaagactcaggtgcattgctgggtctgaaagttgttggaggaaaaatgactgacttaggacgacttggtgctttcatcaccaaagtaaagaagggtagcctagcagatgtagttggacacctaagagcaggggatgaagttctagaatggaatggtaaacccctgccgggagctacaaatgaagaagtttacaacattattttagaatcaaaatcagaacctcaagttgaaattattgtttcaaggcctattggtgacattccccggattcctgagagctcccaccctccactggagtccagttcaagttcctttgaatctcagaagatggaaaggccttccatttctgttatttctccaacaagtcctggagctctaaaagatgccccacaagtcttaccagggcaactttctgtgaagttgtggtatgataaagtgggacaccagctgattgtaaatgttctgcaagcaacagatctacctgctagagtagatggacgtcctcgaaatccctatgtaaaaatgtattttcttccagatagaagtgataaaagtaaaaggaggaccaaaacagtaaagaaaatactagaaccaaaatggaatcaaacttttgtctattcacatgtacatcgtagagattttagagaacgaatgttagaaataactgtgtgggaccaaccaagagtgcaagaagaagaaagtgaatttcttggagagatcctcatagaattggagacagcgcttttagatgatgaaccgcattggtataaacttcagacacatgatgagtcttcactacctctgcctcagccatcacctttcatgccaaggcgacatattcatggagaaagctctagcaaaaagctacaaagatctcagcgaatcagtgatagtgacatctcagattatgaggttgatgatggtattggcgtagttcctccagtaggctataggtctagtgctagagaaagtaaatctacaacattaactgtgccagaacagcaaagaacaactcatcaccgctcacgttcagtatctcctcatcgcggcaatgatcagggaaagccgcgttcacgtttaccaaatgtgccattacagaggagtttagatgaaattcatccaacaagaaggtcacgttctccaaccagacaccatgatgcctcccgaagtccagttgatcatagaaccagagatgtggatagtcagtatttatcagaacaagacagtgagcttcttatgctgcccagagcaaaacgaggacgaagtgcagaatgcctacatactaccagtgaactgcagccctttcttgacagggctaggagtgctagtaccaactgcttgagaccagatactagtttgcattcaccagaacgagaaagaatgcaccgacagagaagtccaacacaatctcctccagcagacacatcgttcagcagtcgcaggggaagacagctcccacaagtgccagtgagaagcggcagtatagaacaagagtcgggccacaaaaagttaaaaagtaccatccagagaagcacagaaacaggcatggcagctgaaatgagaaagatggtaaggcagccgagccgagagtctactgatggcagcatcaacagttacagctctgagggcaatttaatatttcctggagtgcgactgggagctgacagtcaattcagtgattttcttgatggattgggaccagcccagcttgttggccgccaaacccttgccacccctgcaatgggtgatatacaaataggaatggaggacaaaaagggccaattagaagtggaagtcattagagcacgaagcctcacacaaaagcctggttccaaatctacacctgctccatatgtcaaagtatatcttttggaaaatggggcctgtatagccaagaagaagacaagaattgcacgaaaaacccttgatcctttgtatcagcagtctctggtttttgatgaaagtccacagggtaaagttcttcaggtgattgtctggggagactatggcagaatggaccacaaatgctttatgggtgtggctcagatcttgttggaagaactcgacctgtccagcatggtgatcggatggtacaaattgttcccaccgtcctcactggtggatcccacactcactcccctcacccggcgggcttcccagtcatctctggaaagttcaactgggcctccctgtattcgatcatagtgaactcataccagagtcattccaataaaactctacttttcaggataataatctgaaccagatatttcatgatcgaaagcattgttggagacagacaatcaacttgtgttttgcctgtagtagtttttcaataatatgtcccaattgttatttaaaacatggcttcatatgacagaacaaggcaatctatcaaatttacaggaagaatcaacatgctggtgagagtcactgatgcttctaacaaatagaaaaagaggaaactttaaatccacgcatacacgtacacacacacatgcacacacacacacaccaaattgaacaaactggaaactctcactctgtgaaaagttgtattctacacatttctgcacagaccacaagcagtgttatttccctgatgtttgagttgtttt

SEQ ID NO: 174676 - DNA, 3065 bp, Homo sapiens
  Payload ID: 14301
  Gene Symbol: RIMS1
  Gene Name: regulating synaptic membrane exocytosis 1
  Uniprot ID: Q86UR5
  ENST ID: ENST00000517827
  CDS Start-End: 430-2910
gtgttagctttaaggaccacaacgtttcatctctctggcttcaggaaggtagcagcttctgtgcattgttttaggaaatggttaattgaggagctaaaagagctttagtgtatgctacactgggagccactttagtacagcacagagcactatagattaatgctgtaatcaatgagaatctgttcactgcagagatctgttttgatgacagcagcacttatggccttgtttagtgtcactgttgtataatgttggacactgcaggcttttttggctttgatttagaatgcaaggaccacagggaattttatttaaaatgttgtattttggtggattttttaattgtgttgtgcatttgctgccattgctagctgaaatttaatgatttgatgccagtggcatttagttaaccactccgatgctgctgttatgtttgctgggtttctgcagtttctactacttcatacattgcactcaggaacaggtgatttggattattactggttggatcctgccacgtggcacagccgggagacatcacctattagttcgcatcctgtaacgtggcaaccatctaaagagggggaccgattaattggacgtgttattcttaacaagagaacaaccatgcccaaagactcaggtgcattgctgggtctgaaagttgttggaggaaaaatgactgacttaggacgacttggtgctttcatcaccaaagtaaagaagggtagcctagcagatgtagttggacacctaagagcaggggatgaagttctagaatggaatggtaaacccctgccgggagctacaaatgaagaagtttacaacattattttagaatcaaaatcagaacctcaagttgaaattattgtttcaaggcctattggtgacattccccggattcctgagagctcccaccctccactggagtccagttcaagttcctttgaatctcagaagatggaaaggccttccatttctgttatttctccaacaagtcctggagctctaaaagatgccccacaagtcttaccagggcaactttctgtgaagttgtggtatgataaagtgggacaccagctgattgtaaatgttctgcaagcaacagatctacctgctagagtagatggacgtcctcgaaatccctatgtaaaaatgtattttcttccagatagaagtgataaaagtaaaaggaggaccaaaacagtaaagaaaatactagaaccaaaatggaatcaaacttttgtctattcacatgtacatcgtagagattttagagaacgaatgttagaaataactgtgtgggaccaaccaagagtgcaagaagaagaaagtgaatttcttggagagatcctcatagaattggagacagcgcttttagatgatgaaccgcattggtataaacttcagacacatgatgagtcttcactacctctgcctcagccatcacctttcatgccaaggcgacatattcatggagaaagctctagcaaaaagctacaaagatctcagcgaatcagtgatagtgacatctcagattatgaggttgatgatggtattggcgtagttcctccagtaggctataggtctagtgctagagaaagtaaatctacaacattaactgtgccagaacagcaaagaacaactcatcaccgctcacgttcagtatctcctcatcgcggcaatgatcagggaaagccgcgttcacgtttaccaaatgtgccattacagaggagtttagatgaaattcatccaacaagaaggtcacgttctccaaccagacaccatgatgcctcccgaagtccagttgatcatagaaccagagatgtggatagtcagtatttatcagaacaagacagtgagcttcttatgctgcccagagcaaaacgaggacgaagtgcagaatgcctacatactaccagtgaactgcagccctttcttgacagggctaggagtgctagtaccaactgcttgagaccagatactagtttgcattcaccagaacgagaaaggcactccagaaagtctgaaagatctagcatccaaaaacagactaggaaaggcactgcctctgatgcagaaagaatgcaccgacagagaagtccaacacaatctcctccagcagacacatcgttcagcagtcgcaggggaagacagctcccacaagtgccagtgagaagcggcagtatagaacaagagtcgggccacaaaaagttaaaaagtaccatccagagaagcacagaaacaggcatggcagctgaaatgagaaagatggtaaggcagccgagccgagagtctactgatggcagcatcaacagttacagctctgagggcaatttaatatttcctggagtgcgactgggagctgacagtcaattcagtgattttcttgatggattgggaccagcccagcttgttggccgccaaacccttgccacccctgcaatgggtgatatacaaataggaatggaggacaaaaagggccaattagaagtggaagtcattagagcacgaagcctcacacaaaagcctggttccaaatctacacctgctccatatgtcaaagtatatcttttggaaaatggggcctgtatagccaagaagaagacaagaattgcacgaaaaacccttgatcctttgtatcagcagtctctggtttttgatgaaagtccacagggtaaagttcttcaggtgattgtctggggagactatggcagaatggaccacaaatgctttatgggtgtggctcagatcttgttggaagaactcgacctgtccagcatggtgatcggatggtacaaattgttcccaccgtcctcactggtggatcccacactcactcccctcacccggcgggcttcccagtcatctctggaaagttcaactgggcctccctgtattcgatcatagtgaactcataccagagtcattccaataaaactctacttttcaggataataatctgaaccagatatttcatgatcgaaagcattgttggagacagacaatcaacttgtgttttgcctgtagtagtttttcaataatatgtcccaattgttatttaa

SEQ ID NO: 174677 - DNA, 5079 bp, Homo sapiens
  Payload ID: 14301
  Gene Symbol: RIMS1
  Gene Name: regulating synaptic membrane exocytosis 1
  Uniprot ID: Q86UR5
  ENST ID: ENST00000521978
  CDS Start-End: 1-5079
atgtcctcggccgtggggccccgcggtcctcgcccacccacggtgcctccccccatgcaagagctgcccgacctgagccacctgaccgaagaggagaggaacattatcatggcagtgatggaccggcagaaggaagaggaggaaaaagaagaagccatgctcaagtgtgttgtcagggacatggcgaagcctgctgcctgcaaaacaccaagaaatgctgaaaaccagccccaccaaccttcaccgagattgcatcaacagtttgaaagctataaggaacaagtgagaaaaataggggaagaagcgcggcgttaccagggcgagcacaaagacgatgctccgacttgtggaatctgtcataaaacaaagtttgctgatgggtgcggtcatctctgctcctattgtcgcactaagttctgtgcgcgctgcggaggccgcgtgtctctacggtcaaacaacgaggacaaagtggttatgtgggtatgcaatttatgtcgaaagcaacaagaaatcttaaccaaatctggggcatggttctttggaagtggccctcagcagacaagtcaggatggaaccctgagtgatacagctacaggtgctggctctgaggtaccaagagaaaagaaagcacgactccaagagcgatcgcggtctcagacacccctaagcacagcagctgcctcctcccaggatgctgctcctcccagcgcaccaccagacaggagcaaaggggctgagccctcgcagcaagccttggggcctgaacagaagcaggcttcatccaggtctagaagtgaacctcctagagagagaaagaagaccccagggctttccgagcagaatggcaaaggagccctgaagagcgagcggaaacgcgtgccaaagacctcagcgcagcccgtggagggggccgtcgaagaacgggagcgcaaagaaaggcgggaaagccgaaggcttgagaaagggcgatcacaggattacccagacacgccggaaaaacgggatgagggcaaagcggcggatgaggaaaagcaaagaaaagaggaggattatcagaccaggtaccgcagcgacccgaacctagctcggtacccggtgaaaccgccgcctgaggagcagcagatgcgcatgcacgcccgggtgtcccgcgccaggcacgagcggcgccacagcgacgtggcgctcccgcgcaccgaggcgggcgcggcgctgccggagggcaaggccggcaaacgcgcgccggcggcagccagggcctcgccgccggactcgccgcgggcttactcggctgagagaactgcggagaccagggcgccgggcgccaagcagctaacgaaccacagcccgccggcgcccagacatgggccggttcccgcagaagccccggagctcaaagcccaggagcccctcaggaagcagagccgcctggaccccagctcggcggtcctcatgcggaaggccaagcgcgagaaggtggagaccatgctgcggaacgactctttgagctcagaccagtccgagtcggtgcggccgtccccgcccaagccgcaccggtccaagagaggcggcaagaagcggcagatgtcggtgagcagctctgaggaggagggcgtgtcgacgcccgagtacaccagctgcgaggacgtggagctggagagcgagagcgtcagcgagaaaggtgatttggattattactggttggatcctgccacgtggcacagccgggagacatcacctattagttcgcatcctgtaacgtggcaaccatctaaagagggggaccgattaattggacgtgttattcttaacaagagaacaaccatgcccaaagactcaggtgcattgctgggtctgaaagttgttggaggaaaaatgactgacttaggacgacttggtgctttcatcaccaaagtaaagaagggtagcctagcagatgtagttggacacctaagagcaggggatgaagttctagaatggaatggtaaacccctgccgggagctacaaatgaagaagtttacaacattattttagaatcaaaatcagaacctcaagttgaaattattgtttcaaggcctattggtgacattccccggattcctgagagctcccaccctccactggagtccagttcaagttcctttgaatctcagaagatggaaaggccttccatttctgttatttctccaacaagtcctggagctctaaaagatgccccacaagtcttaccagggcaactttctgtgaagttgtggtatgataaagtgggacaccagctgattgtaaatgttctgcaagcaacagatctacctgctagagtagatggacgtcctcgaaatccctatgtaaaaatgtattttcttccagatagaagtgataaaagtaaaaggaggaccaaaacagtaaagaaaatactagaaccaaaatggaatcaaacttttgtctattcacatgtacatcgtagagattttagagaacgaatgttagaaataactgtgtgggaccaaccaagagtgcaagaagaagaaagtgaatttcttggagagatcctcatagaattggagacagcgcttttagatgatgaaccgcattggtataaacttcagacacatgatgagtcttcactacctctgcctcagccatcacctttcatgccaaggcgacatattcatggagaaagctctagcaaaaagctacaaagatctcagcgaatcagtgatagtgacatctcagattatgaggttgatgatggtattggcgtagttcctccagtaggctataggtctagtgctagagaaagtaaatctacaacattaactgtgccagaacagcaaagaacaactcatcaccgctcacgttcagtatctcctcatcgcggcaatgatcagggaaagccgcgttcacgtttaccaaatgtgccattacagaggagtttagatgaaattcatccaacaagaaggtcacgttctccaaccagacaccatgatgcctcccgaagtccagttgatcatagaaccagagatgtggatagtcagtatttatcagaacaagacagtgagcttcttatgctgcccagagcaaaacgaggacgaagtgcagaatgcctacatactaccagacatcttgttaggcactataaaacattacctcccaagatgcctttattacagagcagttctcactggaatatttacagctcaattctgcctgcacatactaagaccaaatcagtgactagacaggacatttcccttcatcatgaatgctttaactcaacagtattgagatttactgatgaaatactggttagtgaactgcagccctttcttgacagggctaggagtgctagtaccaactgcttgagaccagatactagtttgcattcaccagaacgagaaaggggtagatggtccccctccctagataggagacgacctcctagtcccaggattcaaatccagcatgcgtctccggagaatgacaggcactccagaaagtctgaaagatctagcatccaaaaacagactaggaaaggcactgcctctgatgcagaaagggttctcccaacatgtctttctagaaggggacacgcagccccaagagcaactgatcagccagtcattaggggaaaacatcctgctcgctcaaggtcgagtgagcactctagtatcagaacactgtgttctatgcaccaccttgtccctggagggtcggcgccaccttctccgcttctgacaagaatgcaccgacagagaagtccaacacaatctcctccagcagacacatcgttcagcagtcgcaggggaagacagctcccacaagtgccagtgagaagcggcagtatagaacaagcaagcttagtagtggaggagcgaacaagacagatgaaaatgaaagtgcatcgatttaagcagacaacagggtctggttctagtcaagaacttgatcgcgagcaatattccaagtataacatacataaagatcagtacagaagctgtgataacgtctctgccaaatcatcagatagtgatgtcagtgatgtttccgccatttcccgaaccagcagtgcctcacgcctcagcagcacaagctttatgtcagagcaatctgagcgccccaggggtagaatcagttcatttacccccaaaatgcaaggcagacggatggggacttcaggaagatccatcatgaagagcaccagtgtcagtggagagatgtacacactggagcataatgacggcagccagtcagacacagctgtgggtacagttggagcaggtggaaagaaacggagatccagccttagtgccaaagtggttgccatagtgtctcgaaggagtagaagcacatcccagcttagtcaaacagagtcgggccacaaaaagttaaaaagtaccatccagagaagcacagaaacaggcatggcagctgaaatgagaaagatggtaaggcagccgagccgagagtctactgatggcagcatcaacagttacagctctgagggcaatttaatatttcctggagtgcgactgggagctgacagtcaattcagtgattttcttgatggattgggaccagcccagcttgttggccgccaaacccttgccacccctgcaatgggtgatatacaaataggaatggaggacaaaaagggccaattagaagtggaagtcattagagcacgaagcctcacacaaaagcctggttccaaatctacacctgctccatatgtcaaagtatatcttttggaaaatggggcctgtatagccaagaagaagacaagaattgcacgaaaaacccttgatcctttgtatcagcagtctctggtttttgatgaaagtccacagggtaaagttcttcaggtgattgtctggggagactatggcagaatggaccacaaatgctttatgggtgtggctcagatcttgttggaagaactcgacctgtccagcatggtgatcggatggtacaaattgttcccaccgtcctcactggtggatcccacactcactcccctcacccggcgggcttcccagtcatctctggaaagttcaactgggcctccctgtattcgatcatag

SEQ ID NO: 174678 - DNA, 2285 bp, Homo sapiens
  Payload ID: 14301
  Gene Symbol: RIMS1
  Gene Name: regulating synaptic membrane exocytosis 1
  ENST ID: ENST00000522211
  CDS Start-End: 1-1832
cagattatgaggttgatgatggtattggcgtagttcctccagtaggctataggtctagtgctagagaaagtaaatctacaacattaactgtgccagaacagcaaagaacaactcatcaccgctcacgttcagtatctcctcatcgcggcaatgatcagggaaagccgcgttcacgtttaccaaatgtgccattacagaggagtttagatgaaattcatccaacaagaaggtcacgttctccaaccagacaccatgatgcctcccgaagtccagttgatcatagaaccagagatgtggatagtcagtatttatcagaacaagacagtgagcttcttatgctgcccagagcaaaacgaggacgaagtgcagaatgcctacatactaccaggcactccagaaagtctgaaagatctagcatccaaaaacagactaggaaaggcactgcctctgatgcagaaagaatgcaccgacagagaagtccaacacaatctcctccagcagacacatcgttcagcagtcgcaggggaagacagctcccacaagtgccagtgagaagcggcagtatagaacaagaacaagaaaaatataactcttccacaaaagcaagcttagtagtggaggagcgaacaagacagatgaaaatgaaagtgcatcgatttaagcagacaacagggtctggttctagtcaagaacttgatcgcgagcaatattccaagtataacatacataaagatcagtacagaagctgtgataacgtctctgccaaatcatcagatagtgatgtcagtgatgtttccgccatttcccgaaccagcagtgcctcacgcctcagcagcacaagctttatgtcagagcaatctgagcgccccaggggtagaatcagttcatttacccccaaaatgcaaggcagacggatggggacttcaggaagatccatcatgaagagcaccagtgtcagtggagagatgtacacactggagcataatgacggcagccagtcagacacagctgtgggtacagttggagcaggtggaaagaaacggagatccagccttagtgccaaagtggttgccatagtgtctcgaaggagtagaagcacatcccagcttagtcaaacagagtcgggccacaaaaagttaaaaagtaccatccagagaagcacagaaacaggcatggcagctgaaatgagaaagatggtaaggcagccgagccgagagtctactgatggcagcatcaacagttacagctctgagggcaatttaatatttcctggagtgcgactgggagctgacagtcaattcagtgattttcttgatggattgggaccagcccagcttgttggccgccaaacccttgccacccctgcaatgggtgatatacaaataggaatggaggacaaaaagggccaattagaagtggaagtcattagagcacgaagcctcacacaaaagcctggttccaaatctacacctgctccatatgtcaaagtatatcttttggaaaatggggcctgtatagccaagaagaagacaagaattgcacgaaaaacccttgatcctttgtatcagcagtctctggtttttgatgaaagtccacagggtaaagttcttcaggtgattgtctggggagactatggcagaatggaccacaaatgctttatgggtgtggctcagatcttgttggaagaactcgacctgtccagcatggtgatcggatggtacaaattgttcccaccgtcctcactggtggatcccacactcactcccctcacccggcgggcttcccagtcatctctggaaagttcaactgggcctccctgtattcgatcatagtgaactcataccagagtcattccaataaaactctacttttcaggataataatctgaaccagatatttcatgatcgaaagcattgttggagacagacaatcaacttgtgttttgcctgtagtagtttttcaataatatgtcccaattgttatttaaaacatggcttcatatgacagaacaaggcaatctatcaaatttacaggaagaatcaacatgctggtgagagtcactgatgcttctaacaaatagaaaaagaggaaactttaaatccacgcatacacgtacacacacacatgcacacacacacacaccaaattgaacaaactggaaactctcactctgtgaaaagttgtattctacacatttctgcacagaccacaagcagtgttatttccctgatgtttgagttgttttgttcttttgtgtgttttgtttatttgtgtgttgtttgttg

SEQ ID NO: 174679 - DNA, 4428 bp, Homo sapiens
  Payload ID: 14301
  Gene Symbol: RIMS1
  Gene Name: regulating synaptic membrane exocytosis 1
  Uniprot ID: Q86UR5
  ENST ID: ENST00000517960
  CDS Start-End: 1-4428
atgtcctcggccgtggggccccgcggtcctcgcccacccacggtgcctccccccatgcaagagctgcccgacctgagccacctgaccgaagaggagaggaacattatcatggcagtgatggaccggcagaaggaagaggaggaaaaagaagaagccatgctcaagtgtgttgtcagggacatggcgaagcctgctgcctgcaaaacaccaagaaatgctgaaaaccagccccaccaaccttcaccgagattgcatcaacagtttgaaagctataaggaacaagtgagaaaaataggggaagaagcgcggcgttaccagggcgagcacaaagacgatgctccgacttgtggaatctgtcataaaacaaagtttgctgatgggtgcggtcatctctgctcctattgtcgcactaagttctgtgcgcgctgcggaggccgcgtgtctctacggtcaaacaacgaggacaaagtggttatgtgggtatgcaatttatgtcgaaagcaacaagaaatcttaaccaaatctggggcatggttctttggaagtggccctcagcagacaagtcaggatggaaccctgagtgatacagctacaggtgctggctctgaggtaccaagagaaaagaaagcacgactccaagagcgatcgcggtctcagacacccctaagcacagcagctgcctcctcccaggatgctgctcctcccagcgcaccaccagacaggagcaaaggggctgagccctcgcagcaagccttggggcctgaacagaagcaggcttcatccaggtctagaagtgaacctcctagagagagaaagaagaccccagggctttccgagcagaatggcaaaggagccctgaagagcgagcggaaacgcgtgccaaagacctcagcgcagcccgtggagggggccgtcgaagaacgggagcgcaaagaaaggcgggaaagccgaaggcttgagaaagggcgatcacaggattacccagacacgccggaaaaacgggatgagggcaaagcggcggatgaggaaaagcaaagaaaagaggaggattatcagaccaggtaccgcagcgacccgaacctagctcggtacccggtgaaaccgccgcctgaggagcagcagatgcgcatgcacgcccgggtgtcccgcgccaggcacgagcggcgccacagcgacgtggcgctcccgcgcaccgaggcgggcgcggcgctgccggagggcaaggccggcaaacgcgcgccggcggcagccagggcctcgccgccggactcgccgcgggcttactcggctgagagaactgcggagaccagggcgccgggcgccaagcagctaacgaaccacagcccgccggcgcccagacatgggccggttcccgcagaagccccggagctcaaagcccaggagcccctcaggaagcagagccgcctggaccccagctcggcggtcctcatgcggaaggccaagcgcgagaaggtggagaccatgctgcggaacgactctttgagctcagaccagtccgagtcggtgcggccgtccccgcccaagccgcaccggtccaagagaggcggcaagaagcggcagatgtcggtgagcagctctgaggaggagggcgtgtcgacgcccgagtacaccagctgcgaggacgtggagctggagagcgagagcgtcagcgagaaaggtgatttggattattactggttggatcctgccacgtggcacagccgggagacatcacctattagttcgcatcctgtaacgtggcaaccatctaaagagggggaccgattaattggacgtgttattcttaacaagagaacaaccatgcccaaagactcaggtgcattgctgggtctgaaagttgttggaggaaaaatgactgacttaggacgacttggtgctttcatcaccaaagtaaagaagggtagcctagcagatgtagttggacacctaagagcaggggatgaagttctagaatggaatggtaaacccctgccgggagctacaaatgaagaagtttacaacattattttagaatcaaaatcagaacctcaagttgaaattattgtttcaaggcctattggtgacattccccggattcctgagagctcccaccctccactggagtccagttcaagttcctttgaatctcagaagatggaaaggccttccatttctgttatttctccaacaagtcctggagctctaaaagatgccccacaagtcttaccagggcaactttctgtgaagttgtggtatgataaagtgggacaccagctgattgtaaatgttctgcaagcaacagatctacctgctagagtagatggacgtcctcgaaatccctatgtaaaaatgtattttcttccagatagaagtgataaaagtaaaaggaggaccaaaacagtaaagaaaatactagaaccaaaatggaatcaaacttttgtctattcacatgtacatcgtagagattttagagaacgaatgttagaaataactgtgtgggaccaaccaagagtgcaagaagaagaaagtgaatttcttggagagatcctcatagaattggagacagcgcttttagatgatgaaccgcattggtataaacttcagacacatgatgagtcttcactacctctgcctcagccatcacctttcatgccaaggcgacatattcatggagaaagctctagcaaaaagctacaaagatctcagcgaatcagtgatagtgacatctcagattatgaggttgatgatggtattggcgtagttcctccaggctataggtctagtgctagagaaagtaaatctacaacattaactgtgccagaacagcaaagaacaactcatcaccgctcacgttcagtatctcctcatcgcggcaatgatcagggaaagccgcgttcacgtttaccaaatgtgccattacagaggagtttagatgaaattcatccaacaagaaggtcacgttctccaaccagacaccatgatgcctcccgaagtccagttgatcatagaaccagagatgtggatagtcagtatttatcagaacaagacagtgagcttcttatgctgcccagagcaaaacgaggacgaagtgcagaatgcctacatactaccagaatgcaccgacagagaagtccaacacaatctcctccagcagacacatcgttcagcagtcgcaggggaagacagctcccacaagtgccagtgagaagcggcagtatagaacaagcaagcttagtagtggaggagcgaacaagacagatgaaaatgaaagtgcatcgatttaagcagacaacagggtctggttctagtcaagaacttgatcgcgagcaatattccaagtataacatacataaagatcagtacagaagctgtgataacgtctctgccaaatcatcagatagtgatgtcagtgatgtttccgccatttcccgaaccagcagtgcctcacgcctcagcagcacaagctttatgtcagagcaatctgagcgccccaggggtagaatcagacggatggggacttcaggaagatccatcatgaagagcaccagtgtcagtggagagatgtacacactggagcataatgacggcagccagtcagacacagctgtgggtacagttggagcaggtggaaagaaacggagatccagccttagtgccaaagtggttgccatagtgtctcgaaggagtagaagcacatcccagcttagtcaaacagagtcgggccacaaaaagttaaaaagtaccatccagagaagcacagaaacaggcatggcagctgaaatgagaaagatggtaaggcagccgagccgagagtctactgatggcagcatcaacagttacagctctgagggcaatttaatatttcctggagtgcgactgggagctgacagtcaattcagtgattttcttgatggattgggaccagcccagcttgttggccgccaaacccttgccacccctgcaatgggtgatatacaaataggaatggaggacaaaaagggccaattagaagtggaagtcattagagcacgaagcctcacacaaaagcctggttccaaatctacacctgctccatatgtcaaagtatatcttttggaaaatggggcctgtatagccaagaagaagacaagaattgcacgaaaaacccttgatcctttgtatcagcagtctctggtttttgatgaaagtccacagggtaaagttcttcaggtgattgtctggggagactatggcagaatggaccacaaatgctttatgggtgtggctcagatcttgttggaagaactcgacctgtccagcatggtgatcggatggtacaaattgttcccaccgtcctcactggtggatcccacactcactcccctcacccggcgggcttcccagtcatctctggaaagttcaactgggcctccctgtattcgatcatag

SEQ ID NO: 174680 - DNA, 5047 bp, Homo sapiens
  Payload ID: 14301
  Gene Symbol: RIMS1
  Gene Name: regulating synaptic membrane exocytosis 1
  Uniprot ID: Q86UR5
  ENST ID: ENST00000491071
  CDS Start-End: 322-4767
ctctcccgccgcgcctccgcctgcccgcccccgccggccgaggctgggctgcgggaggcggccgggcggccccgagcttcgctagggcgaccaaaacaaaggcagcatccggggctgggtggatgcaaacaaccatgaaagactgggttctcgctctccccggctctgctgctgctgctgctgccgccgccgccgctgctcctcctcctgccgccgccgctagggctccgctgtgagggggaagcaggggcgcagctgctgggcgtgcatccgaaaggtgagagccagagagcgagcagagggggcgggcaggccacgaaaatgtcctcggccgtggggccccgcggtcctcgcccacccacggtgcctccccccatgcaagagctgcccgacctgagccacctgaccgaagaggagaggaacattatcatggcagtgatggaccggcagaaggaagaggaggaaaaagaagaagccatgctcaagtgtgttgtcagggacatggcgaagcctgctgcctgcaaaacaccaagaaatgctgaaaaccagccccaccaaccttcaccgagattgcatcaacagtttgaaagctataaggaacaagtgagaaaaataggggaagaagcgcggcgttaccagggcgagcacaaagacgatgctccgacttgtggaatctgtcataaaacaaagtttgctgatgggtgcggtcatctctgctcctattgtcgcactaagttctgtgcgcgctgcggaggccgcgtgtctctacggtcaaacaacgaggacaaagtggttatgtgggtatgcaatttatgtcgaaagcaacaagaaatcttaaccaaatctggggcatggttctttggaagtggccctcagcagacaagtcaggatggaaccctgagtgatacagctacaggtgctggctctgaggtaccaagagaaaagaaagcacgactccaagagcgatcgcggtctcagacacccctaagcacagcagctgcctcctcccaggatgctgctcctcccagcgcaccaccagacaggagcaaaggggctgagccctcgcagcaagccttggggcctgaacagaagcaggcttcatccaggtctagaagtgaacctcctagagagagaaagaagaccccagggctttccgagcagaatggcaaaggagccctgaagagcgagcggaaacgcgtgccaaagacctcagcgcagcccgtggagggggccgtcgaagaacgggagcgcaaagaaaggcgggaaagccgaaggcttgagaaagggcgatcacaggattacccagacacgccggaaaaacgggatgagggcaaagcggcggatgaggaaaagcaaagaaaagaggaggattatcagaccaggtaccgcagcgacccgaacctagctcggtacccggtgaaaccgccgcctgaggagcagcagatgcgcatgcacgcccgggtgtcccgcgccaggcacgagcggcgccacagcgacgtggcgctcccgcgcaccgaggcgggcgcggcgctgccggagggcaaggccggcaaacgcgcgccggcggcagccagggcctcgccgccggactcgccgcgggcttactcggctgagagaactgcggagaccagggcgccgggcgccaagcagctaacgaaccacagcccgccggcgcccagacatgggccggttcccgcagaagccccggagctcaaagcccaggagcccctcaggaagcagagccgcctggaccccagctcggcggtcctcatgcggaaggccaagcgcgagaaggtggagaccatgctgcggaacgactctttgagctcagaccagtccgagtcggtgcggccgtccccgcccaagccgcaccggtccaagagaggcggcaagaagcggcagatgtcggtgagcagctctgaggaggagggcgtgtcgacgcccgagtacaccagctgcgaggacgtggagctggagagcgagagcgtcagcgagaaaggtgatttggattattactggttggatcctgccacgtggcacagccgggagacatcacctattagttcgcatcctgtaacgtggcaaccatctaaagagggggaccgattaattggacgtgttattcttaacaagagaacaaccatgcccaaagactcaggtgcattgctgggtctgaaagttgttggaggaaaaatgactgacttaggacgacttggtgctttcatcaccaaagtaaagaagggtagcctagcagatgtagttggacacctaagagcaggggatgaagttctagaatggaatggtaaacccctgccgggagctacaaatgaagaagtttacaacattattttagaatcaaaatcagaacctcaagttgaaattattgtttcaaggcctattggtgacattccccggattcctgagagctcccaccctccactggagtccagttcaagttcctttgaatctcagaagatggaaaggccttccatttctgttatttctccaacaagtcctggagctctaaaagatgccccacaagtcttaccagggcaactttctgtgaagttgtggtatgataaagtgggacaccagctgattgtaaatgttctgcaagcaacagatctacctgctagagtagatggacgtcctcgaaatccctatgtaaaaatgtattttcttccagatagaagtgataaaagtaaaaggaggaccaaaacagtaaagaaaatactagaaccaaaatggaatcaaacttttgtctattcacatgtacatcgtagagattttagagaacgaatgttagaaataactgtgtgggaccaaccaagagtgcaagaagaagaaagtgaatttcttggagagatcctcatagaattggagacagcgcttttagatgatgaaccgcattggtataaacttcagacacatgatgagtcttcactacctctgcctcagccatcacctttcatgccaaggcgacatattcatggagaaagctctagcaaaaagctacaaagatctcagcgaatcagtgatagtgacatctcagattatgaggttgatgatggtattggcgtagttcctccagtaggctataggtctagtgctagagaaagtaaatctacaacattaactgtgccagaacagcaaagaacaactcatcaccgctcacgttcagtatctcctcatcgcggcaatgatcagggaaagccgcgttcacgtttaccaaatgtgccattacagaggagtttagatgaaattcatccaacaagaaggtcacgttctccaaccagacaccatgatgcctcccgaagtccagttgatcatagaaccagagatgtggatagtcagtatttatcagaacaagacagtgagcttcttatgctgcccagagcaaaacgaggacgaagtgcagaatgcctacatactaccagtgaactgcagccctttcttgacagggctaggagtgctagtaccaactgcttgagaccagatactagtttgcattcaccagaacgagaaagaatgcaccgacagagaagtccaacacaatctcctccagcagacacatcgttcagcagtcgcaggggaagacagctcccacaagtgccagtgagaagcggcagtatagaacaagcaagcttagtagtggaggagcgaacaagacagatgaaaatgaaagtgcatcgatttaagcagacaacagggtctggttctagtcaagaacttgatcgcgagcaatattccaagtataacatacataaagatcagtacagaagctgtgataacgtctctgccaaatcatcagatagtgatgtcagtgatgtttccgccatttcccgaaccagcagtgcctcacgcctcagcagcacaagctttatgtcagagcaatctgagcgccccaggggtagaatcagttcatttacccccaaaatgcaaggcagacggatggggacttcaggaagatccatcatgaagagcaccagtgtcagtggagagatgtacacactggagcataatgacggcagccagtcagacacagctgtgggtacagttggagcaggtggaaagaaacggagatccagccttagtgccaaagtggttgccatagtgtctcgaaggagtagaagcacatcccagcttagtcaaacagagtcgggccacaaaaagttaaaaagtaccatccagagaagcacagaaacaggcatggcagctgaaatgagaaagatggtaaggcagccgagccgagagtctactgatggcagcatcaacagttacagctctgagggcaatttaatatttcctggagtgcgactgggagctgacagtcaattcagtgattttcttgatggattgggaccagcccagcttgttggccgccaaacccttgccacccctgcaatggctccatatgtcaaagtatatcttttggaaaatggggcctgtatagccaagaagaagacaagaattgcacgaaaaacccttgatcctttgtatcagcagtctctggtttttgatgaaagtccacagggtaaagttcttcaggtgattgtctggggagactatggcagaatggaccacaaatgctttatgggtgtggctcagatcttgttggaagaactcgacctgtccagcatggtgatcggatggtacaaattgttcccaccgtcctcactggtggatcccacactcactcccctcacccggcgggcttcccagtcatctctggaaagttcaactgggcctccctgtattcgatcatagtgaactcataccagagtcattccaataaaactctacttttcaggataataatctgaaccagatatttcatgatcgaaagcattgttggagacagacaatcaacttgtgttttgcctgtagtagtttttcaataatatgtcccaattgttatttaaaacatggcttcatatgacagaacaaggcaatctatcaaatttacaggaagaatcaacatgctggtgagagtcactgatgcttctaacaaatagaaaaagaggaaactttaaatccacgcatacac

SEQ ID NO: 174681 - DNA, 3489 bp, Homo sapiens
  Payload ID: 14301
  Gene Symbol: RIMS1
  Gene Name: regulating synaptic membrane exocytosis 1
  ENST ID: ENST00000517433
  CDS Start-End: 1-3115
ttactcggctgagagaactgcggagaccagggcgccgggcgccaagcagctaacgaaccacagcccgccggcgcccagacatgggccggttcccgcagaagccccggagctcaaagcccaggagcccctcaggaagcagagccgcctggaccccagctcggcggtcctcatgcggaaggccaagcgcgagaaggtggagaccatgctgcggaacgactctttgagctcagaccagtccgagtcggtgcggccgtccccgcccaagccgcaccggtccaagagaggcggcaagaagcggcagatgtcggtgagcagctctgaggaggagggcgtgtcgacgcccgagtacaccagctgcgaggacgtggagctggagagcgagagcgtcagcgagaaaggtgatttggattattactggttggatcctgccacgtggcacagccgggagacatcacctattagttcgcatcctgtaacgtggcaaccatctaaagagggggaccgattaattggacgtgttattcttaacaagagaacaaccatgcccaaagactcaggtgcattgctgggtctgaaagttgttggaggaaaaatgactgacttaggacgacttggtgctttcatcaccaaagtaaagaagggtagcctagcagatgtagttggacacctaagagcaggggatgaagttctagaatggaatggtaaacccctgccgggagctacaaatgaagaagtttacaacattattttagaatcaaaatcagaacctcaagttgaaattattgtttcaaggcctattggtgacattccccggattcctgagagctcccaccctccactggagtccagttcaagttcctttgaatctcagaagatggaaaggccttccatttctgttatttctccaacaagtcctggagctctaaaagatgccccacaagtcttaccagggcaactttctgtgaagttgtggtatgataaagtgggacaccagctgattgtaaatgttctgcaagcaacagatctacctgctagagtagatggacgtcctcgaaatccctatgtaaaaatgtattttcttccagatagaagtgataaaagtaaaaggaggaccaaaacagtaaagaaaatactagaaccaaaatggaatcaaacttttgtctattcacatgtacatcgtagagattttagagaacgaatgttagaaataactgtgtgggaccaaccaagagtgcaagaagaagaaagtgaatttcttggagagatcctcatagaattggagacagcgcttttagatgatgaaccgcattggtataaacttcagacacatgatgagtcttcactacctctgcctcagccatcacctttcatgccaaggcgacatattcatggagaaagctctagcaaaaagctacaaagatctcagcgaatcagtgatagtgacatctcagattatgaggttgatgatggtattggcgtagttcctccagtaggctataggtctagtgctagagaaagtaaatctacaacattaactgtgccagaacagcaaagaacaactcatcaccgctcacgttcagtatctcctcatcgcggcaatgatcagggaaagccgcgttcacgtttaccaaatgtgccattacagaggagtttagatgaaattcatccaacaagaaggtcacgttctccaaccagacaccatgatgcctcccgaagtccagttgatcatagaaccagagatgtggatagtcagtatttatcagaacaagacagaatgcaccgacagagaagtccaacacaatctcctccagcagacacatcgttcagcagtcgcaggggaagacagctcccacaagtgccagtgagaagcggcagtatagaacaagcaagcttagtagtggaggagcgaacaagacagatgaaaatgaaagtgcatcgatttaagcagacaacagggtctggttctagtcaagaacttgatcgcgagcaatattccaagtataacatacataaagatcagtacagaagctgtgataacgtctctgccaaatcatcagatagtgatgtcagtgatgtttccgccatttcccgaaccagcagtgcctcacgcctcagcagcacaagctttatgtcagagcaatctgagcgccccaggggtagaatcagttcatttacccccaaaatgcaaggcagacggatggggacttcaggaagatccatcatgaagagcaccagtgtcagtggagagatgtacacactggagcataatgacggcagccagtcagacacagctgtgggtacagttggagcaggtggaaagaaacggagatccagccttagtgccaaagtggttgccatagtgtctcgaaggagtagaagcacatcccagcttagtcaaacagagtcgggccacaaaaagttaaaaagtaccatccagagaagcacagaaacaggcatggcagctgaaatgagaaagatggtaaggcagccgagccgagagtctactgatggcagcatcaacagttacagctctgagggcaatttaatatttcctggagtgcgactgggagctgacagtcaattcagtgattttcttgatggattgggaccagcccagcttgttggccgccaaacccttgccacccctgcaatgggtgatatacaaataggaatggaggacaaaaagggccaattagaagtggaagtcattagagcacgaagcctcacacaaaagcctggttccaaatctacacctgctccatatgtcaaagtatatcttttggaaaatggggcctgtatagccaagaagaagacaagaattgcacgaaaaacccttgatcctttgtatcagcagtctctggtttttgatgaaagtccacagggtaaagttcttcaggtgattgtctggggagactatggcagaatggaccacaaatgctttatgggtgtggctcagatcttgttggaagaactcgacctgtccagcatggtgatcggatggtacaaattgttcccaccgtcctcactggtggatcccacactcactcccctcacccggcgggcttcccagtcatctctggaaagttcaactgggcctccctgtattcgatcatagtgaactcataccagagtcattccaataaaactctacttttcaggataataatctgaaccagatatttcatgatcgaaagcattgttggagacagacaatcaacttgtgttttgcctgtagtagtttttcaataatatgtcccaattgttatttaaaacatggcttcatatgacagaacaaggcaatctatcaaatttacaggaagaatcaacatgctggtgagagtcactgatgcttctaacaaatagaaaaagaggaaactttaaatccacgcatacacgtacacacacacatgcacacacacacacaccaaattgaacaaactggaaactctcactctgtgaaaagttgtattctacacatttctgcacaga

SEQ ID NO: 174682 - DNA, 4116 bp, Homo sapiens
  Payload ID: 14301
  Gene Symbol: RIMS1
  Gene Name: regulating synaptic membrane exocytosis 1
  Uniprot ID: Q86UR5
  ENST ID: ENST00000518273
  CDS Start-End: 1-4116
atgtcctcggccgtggggccccgcggtcctcgcccacccacggtgcctccccccatgcaagagctgcccgacctgagccacctgaccgaagaggagaggaacattatcatggcagtgatggaccggcagaaggaagaggaggaaaaagaagaagccatgctcaagtgtgttgtcagggacatggcgaagcctgctgcctgcaaaacaccaagaaatgctgaaaaccagccccaccaaccttcaccgagattgcatcaacagtttgaaagctataaggaacaagtgagaaaaataggggaagaagcgcggcgttaccagggcgagcacaaagacgatgctccgacttgtggaatctgtcataaaacaaagtttgctgatgggtgcggtcatctctgctcctattgtcgcactaagttctgtgcgcgctgcggaggccgcgtgtctctacggtcaaacaacgaggacaaagtggttatgtgggtatgcaatttatgtcgaaagcaacaagaaatcttaaccaaatctggggcatggttctttggaagtggccctcagcagacaagtcaggatggaaccctgagtgatacagctacaggtgctggctctgaggtaccaagagaaaagaaagcacgactccaagagcgatcgcggtctcagacacccctaagcacagcagctgcctcctcccaggatgctgctcctcccagcgcaccaccagacaggagcaaaggggctgagccctcgcagcaagccttggggcctgaacagaagcaggcttcatccaggtctagaagtgaacctcctagagagagaaagaagaccccagggctttccgagcagaatggcaaaggagccctgaagagcgagcggaaacgcgtgccaaagacctcagcgcagcccgtggagggggccgtcgaagaacgggagcgcaaagaaaggcgggaaagccgaaggcttgagaaagggcgatcacaggattacccagacacgccggaaaaacgggatgagggcaaagcggcggatgaggaaaagcaaagaaaagaggaggattatcagaccaggtaccgcagcgacccgaacctagctcggtacccggtgaaaccgccgcctgaggagcagcagatgcgcatgcacgcccgggtgtcccgcgccaggcacgagcggcgccacagcgacgtggcgctcccgcgcaccgaggcgggcgcggcgctgccggagggcaaggccggcaaacgcgcgccggcggcagccagggcctcgccgccggactcgccgcgggcttactcggctgagagaactgcggagaccagggcgccgggcgccaagcagctaacgaaccacagcccgccggcgcccagacatgggccggttcccgcagaagccccggagctcaaagcccaggagcccctcaggaagcagagccgcctggaccccagctcggcggtcctcatgcggaaggccaagcgcgagaaggtggagaccatgctgcggaacgactctttgagctcagaccagtccgagtcggtgcggccgtccccgcccaagccgcaccggtccaagagaggcggcaagaagcggcagatgtcggtgagcagctctgaggaggagggcgtgtcgacgcccgagtacaccagctgcgaggacgtggagctggagagcgagagcgtcagcgagaaaggtgatttggattattactggttggatcctgccacgtggcacagccgggagacatcacctattagttcgcatcctgtaacgtggcaaccatctaaagagggggaccgattaattggacgtgttattcttaacaagagaacaaccatgcccaaagactcaggtgcattgctgggtctgaaagttgttggaggaaaaatgactgacttaggacgacttggtgctttcatcaccaaagtaaagaagggtagcctagcagatgtagttggacacctaagagcaggggatgaagttctagaatggaatggtaaacccctgccgggagctacaaatgaagaagtttacaacattattttagaatcaaaatcagaacctcaagttgaaattattgtttcaaggcctattggtgacattccccggattcctgagagctcccaccctccactggagtccagttcaagttcctttgaatctcagaagatggaaaggccttccatttctgttatttctccaacaagtcctggagctctaaaagatgccccacaagtcttaccagggcaactttctgtgaagttgtggtatgataaagtgggacaccagctgattgtaaatgttctgcaagcaacagatctacctgctagagtagatggacgtcctcgaaatccctatgtaaaaatgtattttcttccagatagaagtgataaaagtaaaaggaggaccaaaacagtaaagaaaatactagaaccaaaatggaatcaaacttttgtctattcacatgtacatcgtagagattttagagaacgaatgttagaaataactgtgtgggaccaaccaagagtgcaagaagaagaaagtgaatttcttggagagatcctcatagaattggagacagcgcttttagatgatgaaccgcattggtataaacttcagacacatgatgagtcttcactacctctgcctcagccatcacctttcatgccaaggcgacatattcatggagaaagctctagcaaaaagctacaaagatctcagcgaatcagtgatagtgacatctcagattatgaggttgatgatggtattggcgtagttcctccagtaggctataggtctagtgctagagaaagtaaatctacaacattaactgtgccagaacagcaaagaacaactcatcaccgctcacgttcagtatctcctcatcgcggcaatgatcagggaaagccgcgttcacgtttaccaaatgtgccattacagaggagtttagatgaaattcatccaacaagaaggtcacgttctccaaccagacaccatgatgcctcccgaagtccagttgatcatagaaccagagatgtggatagtcagtatttatcagaacaagacagtgagcttcttatgctgcccagagcaaaacgaggacgaagtgcagaatgcctacatactaccagtgaactgcagccctttcttgacagggctaggagtgctagtaccaactgcttgagaccagatactagtttgcattcaccagaacgagaaaggggtagatggtccccctccctagataggagacgacctcctagtcccaggattcaaatccagcatgcgtctccggagaatgacagaatgcaccgacagagaagtccaacacaatctcctccagcagacacatcgttcagcagtcgcaggggaagacagctcccacaagtgccagtgagaagcggcagtatagaacaagagtcgggccacaaaaagttaaaaagtaccatccagagaagcacagaaacaggcatggcagctgaaatgagaaagatggtaaggcagccgagccgagagtctactgatggcagcatcaacagttacagctctgagggcaatttaatatttcctggagtgcgactgggagctgacagtcaattcagtgattttcttgatggattgggaccagcccagcttgttggccgccaaacccttgccacccctgcaatgggtgatatacaaataggaatggaggacaaaaagggccaattagaagtggaagtcattagagcacgaagcctcacacaaaagcctggttccaaatctacacctgctccatatgtcaaagtatatcttttggaaaatggggcctgtatagccaagaagaagacaagaattgcacgaaaaacccttgatcctttgtatcagcagtctctggtttttgatgaaagtccacagggtaaagttcttcaggtgattgtctggggagactatggcagaatggaccacaaatgctttatgggtgtggctcagatcttgttggaagaactcgacctgtccagcatggtgatcggatggtacaaattgttcccaccgtcctcactggtggatcccacactcactcccctcacccggcgggcttcccagtcatctctggaaagttcaactgggcctccctgtattcgatcatag

SEQ ID NO: 174683 - DNA, 4442 bp, Homo sapiens
  Payload ID: 14301
  Gene Symbol: RIMS1
  Gene Name: regulating synaptic membrane exocytosis 1
  Uniprot ID: Q86UR5
  ENST ID: ENST00000520567
  CDS Start-End: 1-4029
atgtcctcggccgtggggccccgcggtcctcgcccacccacggtgcctccccccatgcaagagctgcccgacctgagccacctgaccgaagaggagaggaacattatcatggcagtgatggaccggcagaaggaagaggaggaaaaagaagaagccatgctcaagtgtgttgtcagggacatggcgaagcctgctgcctgcaaaacaccaagaaatgctgaaaaccagccccaccaaccttcaccgagattgcatcaacagtttgaaagctataaggaacaagtgagaaaaataggggaagaagcgcggcgttaccagggcgagcacaaagacgatgctccgacttgtggaatctgtcataaaacaaagtttgctgatgggtgcggtcatctctgctcctattgtcgcactaagttctgtgcgcgctgcggaggccgcgtgtctctacggtcaaacaacgaggacaaagtggttatgtgggtatgcaatttatgtcgaaagcaacaagaaatcttaaccaaatctggggcatggttctttggaagtggccctcagcagacaagtcaggatggaaccctgagtgatacagctacaggtgctggctctgaggtaccaagagaaaagaaagcacgactccaagagcgatcgcggtctcagacacccctaagcacagcagctgcctcctcccaggatgctgctcctcccagcgcaccaccagacaggagcaaaggggctgagccctcgcagcaagccttggggcctgaacagaagcaggcttcatccaggtctagaagtgaacctcctagagagagaaagaagaccccagggctttccgagcagaatggcaaaggagccctgaagagcgagcggaaacgcgtgccaaagacctcagcgcagcccgtggagggggccgtcgaagaacgggagcgcaaagaaaggcgggaaagccgaaggcttgagaaagggcgatcacaggattacccagacacgccggaaaaacgggatgagggcaaagcggcggatgaggaaaagcaaagaaaagaggaggattatcagaccaggtaccgcagcgacccgaacctagctcggtacccggtgaaaccgccgcctgaggagcagcagatgcgcatgcacgcccgggtgtcccgcgccaggcacgagcggcgccacagcgacgtggcgctcccgcgcaccgaggcgggcgcggcgctgccggagggcaaggccggcaaacgcgcgccggcggcagccagggcctcgccgccggactcgccgcgggcttactcggctgagagaactgcggagaccagggcgccgggcgccaagcagctaacgaaccacagcccgccggcgcccagacatgggccggttcccgcagaagccccggagctcaaagcccaggagcccctcaggaagcagagccgcctggaccccagctcggcggtcctcatgcggaaggccaagcgcgagaaggtggagaccatgctgcggaacgactctttgagctcagaccagtccgagtcggtgcggccgtccccgcccaagccgcaccggtccaagagaggcggcaagaagcggcagatgtcggtgagcagctctgaggaggagggcgtgtcgacgcccgagtacaccagctgcgaggacgtggagctggagagcgagagcgtcagcgagaaaggtgatttggattattactggttggatcctgccacgtggcacagccgggagacatcacctattagttcgcatcctgtaacgtggcaaccatctaaagagggggaccgattaattggacgtgttattcttaacaagagaacaaccatgcccaaagactcaggtgcattgctgggtctgaaagttgttggaggaaaaatgactgacttaggacgacttggtgctttcatcaccaaagtaaagaagggtagcctagcagatgtagttggacacctaagagcaggggatgaagttctagaatggaatggtaaacccctgccgggagctacaaatgaagaagtttacaacattattttagaatcaaaatcagaacctcaagttgaaattattgtttcaaggcctattggtgacattccccggattcctgagagctcccaccctccactggagtccagttcaagttcctttgaatctcagaagatggaaaggccttccatttctgttatttctccaacaagtcctggagctctaaaagatgccccacaagtcttaccagggcaactttctgtgaagttgtggtatgataaagtgggacaccagctgattgtaaatgttctgcaagcaacagatctacctgctagagtagatggacgtcctcgaaatccctatgtaaaaatgtattttcttccagatagaagtgataaaagtaaaaggaggaccaaaacagtaaagaaaatactagaaccaaaatggaatcaaacttttgtctattcacatgtacatcgtagagattttagagaacgaatgttagaaataactgtgtgggaccaaccaagagtgcaagaagaagaaagtgaatttcttggagagatcctcatagaattggagacagcgcttttagatgatgaaccgcattggtataaacttcagacacatgatgagtcttcactacctctgcctcagccatcacctttcatgccaaggcgacatattcatggagaaagctctagcaaaaagctacaaagatctcagcgaatcagtgatagtgacatctcagattatgaggttgatgatggtattggcgtagttcctccaggctataggtctagtgctagagaaagtaaatctacaacattaactgtgccagaacagcaaagaacaactcatcaccgctcacgttcagtatctcctcatcgcggcaatgatcagggaaagccgcgttcacgtttaccaaatgtgccattacagaggagtttagatgaaattcatccaacaagaaggtcacgttctccaaccagacaccatgatgcctcccgaagtccagttgatcatagaaccagagatgtggatagtcagtatttatcagaacaagacagtgagcttcttatgctgcccagagcaaaacgaggacgaagtgcagaatgcctacatactaccagtgaactgcagccctttcttgacagggctaggagtgctagtaccaactgcttgagaccagatactagtttgcattcaccagaacgagaaagaatgcaccgacagagaagtccaacacaatctcctccagcagacacatcgttcagcagtcgcaggggaagacagctcccacaagtgccagtgagaagcggcagtatagaacaagagtcgggccacaaaaagttaaaaagtaccatccagagaagcacagaaacaggcatggcagctgaaatgagaaagatggtaaggcagccgagccgagagtctactgatggcagcatcaacagttacagctctgagggcaatttaatatttcctggagtgcgactgggagctgacagtcaattcagtgattttcttgatggattgggaccagcccagcttgttggccgccaaacccttgccacccctgcaatgggtgatatacaaataggaatggaggacaaaaagggccaattagaagtggaagtcattagagcacgaagcctcacacaaaagcctggttccaaatctacacctgctccatatgtcaaagtatatcttttggaaaatggggcctgtatagccaagaagaagacaagaattgcacgaaaaacccttgatcctttgtatcagcagtctctggtttttgatgaaagtccacagggtaaagttcttcaggtgattgtctggggagactatggcagaatggaccacaaatgctttatgggtgtggctcagatcttgttggaagaactcgacctgtccagcatggtgatcggatggtacaaattgttcccaccgtcctcactggtggatcccacactcactcccctcacccggcgggcttcccagtcatctctggaaagttcaactgggcctccctgtattcgatcatagtgaactcataccagagtcattccaataaaactctacttttcaggataataatctgaaccagatatttcatgatcgaaagcattgttggagacagacaatcaacttgtgttttgcctgtagtagtttttcaataatatgtcccaattgttatttaaaacatggcttcatatgacagaacaaggcaatctatcaaatttacaggaagaatcaacatgctggtgagagtcactgatgcttctaacaaatagaaaaagaggaaactttaaatccacgcatacacgtacacacacacatgcacacacacacacaccaaattgaacaaactggaaactctcactctgtgaaaagttgtattctacacatttctgcacagaccacaagcagtgttatttccctgatgtttgagttgtttt

SEQ ID NO: 174684 - DNA, 3876 bp, Homo sapiens
  Payload ID: 14301
  Gene Symbol: RIMS1
  Gene Name: regulating synaptic membrane exocytosis 1
  Uniprot ID: Q86UR5
  ENST ID: ENST00000522291
  CDS Start-End: 1-3876
atgtcctcggccgtggggccccgcggtcctcgcccacccacggtgcctccccccatgcaagagctgcccgacctgagccacctgaccgaagaggagaggaacattatcatggcagtgatggaccggcagaaggaagaggaggaaaaagaagaagccatgctcaagtgtgttgtcagggacatggcgaagcctgctgcctgcaaaacaccaagaaatgctgaaaaccagccccaccaaccttcaccgagattgcatcaacagtttgaaagctataaggaacaagtgagaaaaataggggaagaagcgcggcgttaccagggcgagcacaaagacgatgctccgacttgtggaatctgtcataaaacaaagtttgctgatgggtgcggtcatctctgctcctattgtcgcactaagttctgtgcgcgctgcggaggccgcgtgtctctacggtcaaacaacgaggacaaagtggttatgtgggtatgcaatttatgtcgaaagcaacaagaaatcttaaccaaatctggggcatggttctttggaagtggccctcagcagacaagtcaggatggaaccctgagtgatacagctacaggtgctggctctgaggtaccaagagaaaagaaagcacgactccaagagcgatcgcggtctcagacacccctaagcacagcagctgcctcctcccaggatgctgctcctcccagcgcaccaccagacaggagcaaaggggctgagccctcgcagcaagccttggggcctgaacagaagcaggcttcatccaggtctagaagtgaacctcctagagagagaaagaagaccccagggctttccgagcagaatggcaaaggagccctgaagagcgagcggaaacgcgtgccaaagacctcagcgcagcccgtggagggggccgtcgaagaacgggagcgcaaagaaaggcgggaaagccgaaggcttgagaaagggcgatcacaggattacccagacacgccggaaaaacgggatgagggcaaagcggcggatgaggaaaagcaaagaaaagaggaggattatcagaccaggtaccgcagcgacccgaacctagctcggtacccggtgaaaccgccgcctgaggagcagcagatgcgcatgcacgcccgggtgtcccgcgccaggcacgagcggcgccacagcgacgtggcgctcccgcgcaccgaggcgggcgcggcgctgccggagggcaaggccggcaaacgcgcgccggcggcagccagggcctcgccgccggactcgccgcgggcttactcggctgagagaactgcggagaccagggcgccgggcgccaagcagctaacgaaccacagcccgccggcgcccagacatgggccggttcccgcagaagccccggagctcaaagcccaggagcccctcaggaagcagagccgcctggaccccagctcggcggtcctcatgcggaaggccaagcgcgagaaggtggagaccatgctgcggaacgactctttgagctcagaccagtccgagtcggtgcggccgtccccgcccaagccgcaccggtccaagagaggcggcaagaagcggcagatgtcggtgagcagctctgaggaggagggcgtgtcgacgcccgagtacaccagctgcgaggacgtggagctggagagcgagagcgtcagcgagaaaggtgatttggattattactggttggatcctgccacgtggcacagccgggagacatcacctattagttcgcatcctgtaacgtggcaaccatctaaagagggggaccgattaattggacgtgttattcttaacaagagaacaaccatgcccaaagactcaggtgcattgctgggtctgaaagttgttggaggaaaaatgactgacttaggacgacttggtgctttcatcaccaaagtaaagaagggtagcctagcagatgtagttggacacctaagagcaggggatgaagttctagaatggaatggtaaacccctgccgggagctacaaatgaagaagtttacaacattattttagaatcaaaatcagaacctcaagttgaaattattgtttcaaggcctattggtgacattccccggattcctgagagctcccaccctccactggagtccagttcaagttcctttgaatctcagaagatggaaaggccttccatttctgttatttctccaacaagtcctggagctctaaaagatgccccacaagtcttaccagggcaactttctgtgaagttgtggtatgataaagtgggacaccagctgattgtaaatgttctgcaagcaacagatctacctgctagagtagatggacgtcctcgaaatccctatgtaaaaatgtattttcttccagatagaagtgataaaagtaaaaggaggaccaaaacagtaaagaaaatactagaaccaaaatggaatcaaacttttgtctattcacatgtacatcgtagagattttagagaacgaatgttagaaataactgtgtgggaccaaccaagagtgcaagaagaagaaagtgaatttcttggagagatcctcatagaattggagacagcgcttttagatgatgaaccgcattggtataaacttcagacacatgatgagtcttcactacctctgcctcagccatcacctttcatgccaaggcgacatattcatggagaaagctctagcaaaaagctacaaagatctcagcgaatcagtgatagtgacatctcagattatgaggttgatgatggtattggcgtagttcctccaggctataggtctagtgctagagaaagtaaatctacaacattaactgtgccagaacagcaaagaacaactcatcaccgctcacgttcagtatctcctcatcgcggcaatgatcagggaaagccgcgttcacgtttaccaaatgtgccattacagaggagtttagatgaaattcatccaacaagaaggtcacgttctccaaccagacaccatgatgcctcccgaagtccagttgatcatagaaccagagatgtggatagtcagtatttatcagaacaagacagaatgcaccgacagagaagtccaacacaatctcctccagcagacacatcgttcagcagtcgcaggggaagacagctcccacaagtgccagtgagaagcggcagtatagaacaagagtcgggccacaaaaagttaaaaagtaccatccagagaagcacagaaacaggcatggcagctgaaatgagaaagatggtaaggcagccgagccgagagtctactgatggcagcatcaacagttacagctctgagggcaatttaatatttcctggagtgcgactgggagctgacagtcaattcagtgattttcttgatggattgggaccagcccagcttgttggccgccaaacccttgccacccctgcaatgggtgatatacaaataggaatggaggacaaaaagggccaattagaagtggaagtcattagagcacgaagcctcacacaaaagcctggttccaaatctacacctgctccatatgtcaaagtatatcttttggaaaatggggcctgtatagccaagaagaagacaagaattgcacgaaaaacccttgatcctttgtatcagcagtctctggtttttgatgaaagtccacagggtaaagttcttcaggtgattgtctggggagactatggcagaatggaccacaaatgctttatgggtgtggctcagatcttgttggaagaactcgacctgtccagcatggtgatcggatggtacaaattgttcccaccgtcctcactggtggatcccacactcactcccctcacccggcgggcttcccagtcatctctggaaagttcaactgggcctccctgtattcgatcatag

SEQ ID NO: 174685 - DNA, 3854 bp, Homo sapiens
  Payload ID: 14302
  Gene Symbol: RIMS2
  Gene Name: regulating synaptic membrane exocytosis 2
  Uniprot ID: Q9UQ26
  ENST ID: ENST00000262231
  CDS Start-End: 249-3815
agaattcttgctacagtcaggagaaagccgaaagctgcacgggtactgaatcttctacgactgaattagaagaataatgactgtacaattaactatcaacctctgttcatttaagcacagtttttacagagctcaggagaaatatggaacttgattggcgtgtttttatttgatggtgtcagcaaatagatgattttaaagacaggtggtagggaaaaataagagaaggggaaaaaaaaagaaagaaaatgcaatttgagacattgcgccaggtctgcaattctgttttatctcattttcatggggttttttcatccccaccaaatatcttacaaaatgagctttttggacaaacactgaacaatgcaaggaaaagaagcccatctgtgtccagagatcagaatagaagatacgaccaaagggaagaaagagaggaatattcacagtatgctacttcggataccgcaatgcctagatctccatcagattatgctgataggcgatctcaacatgaacctcagttttatgaagactctgatcatttaagttatagggactccaacaggagaagtcataggcattccaaagaatatattgtagatgatgaggatgtggaaagcagagatgaatacgaaaggcaaaggagagaggaagagtaccagtcacgctaccgaagtgatccgaatttggcccgttatccagtaaagccacaaccctatgaagaacaaatgcggatccatgctgaagtgtcccgagcacggcatgagagaaggcatagtgatgtttctttggcaaatgctgatctggaagattccaggatttctatgctaaggatggatcgaccatcaaggcaaagatctatatcagaacgtagagctgccatggaaaatcagcgatcttattcaatggaaagaactcgagaggctcagggaccaagttcttatgcacaaaggaccacaaaccatagtcctcctacccccaggaggagtccactacccatagatagaccagacttgaggcgtactgactcactacggaaacagcaccacttagatcctagctctgctgtaagaaaaacaaaacgggaaaaaatggaaacaatgttaaggaatgattctctcagttcagaccagtcagagtcagtgagacctccaccaccaaagcctcataaatcaaagaaaggcggtaaaatgcgccagatttcgttgagcagttcagaggaggaattggcttccacgcctgaatatacaagttgtgatgatgttgagattgaaagtgagagtgtaagtgaaaaaggggacagtcaaaagggaaaaagaaaaactagtgagcaggcagttttgtcggactctaacaccaggtctgagagacaaaaggaaatgatgtactttggtggccactctttggaagaggatttggaatggtctgaacctcagattaaggactctggggtagatacgtgtagtagcacaacccttaacgaggagcatagccatagtgataagcaccctgtaacctggcaaccatctaaagatggagatcgtttaattggtcgcattttattaaataagcgtctaaaagatggaagtgtacctcgagattcaggagcaatgcttggcttgaaggttgtaggaggaaagatgactgaatcaggtcggctttgtgcatttattactaaagtaaaaaaaggaagtttagctgatactgtaggacatcttagaccaggtgatgaagtattagaatggaatggaagactactgcaaggagccacatttgaggaagtgtacaacatcattctagaatccaaacctgaaccacaagtagaacttgtagtttcaaggcctattggagatataccgcgaatacctgatagcacacatgcacaactggagtccagttctagctcctttgaatctcaaaaaatggatcgtccttctatttctgttacctctcccatgagtcctggaatgttgagggatgtcccacagttcttatcaggacaactttcaataaaactatggtttgacaaggttggtcaccaattaatagttacaattttgggagcaaaagatctcccttccagggaagatgggaggccaaggaatccttatgttaaaatttactttcttccagacagaagtgataaaaacaagagaagaactaaaacagtaaagaaaacattggaacccaaatggaaccaaacattcatttattctccagtccaccgaagagaatttcgggaacgaatgctagagattaccctttgggatcaagctcgtgttcgagaggaagaaagtgaattcttaggcgagattttaattgaattagaaacagcattattagatgatgagccacattggtacaaacttcagacgcatgatgtctcttcattgccacttccccacccttctccatatatgccacgaagacagctccatggagagagcccaacacggaggttgcaaaggtcaaagagaataagtgatagtgaagtctctgactatgactgtgatgatggaattggtgtagtatcagattatcgacatgatggtcgagatcttcaaagctcaacattatcagtgccagaacaagtaatgtcatcaaaccactgttcaccatcagggtctcctcatcgagtagatgttataggaaggactagatcatggtcacccagtgtccctcctccacaaagtcggaatgtggaacaggggcttcgagggacccgcactatgaccggacattataatacaattagccgaatggacagacatcgtgtcatggatgaccattattctccagatagagacagggattgtgaagcagcagatagacagccatatcacagatccagatcaacagaacaacggcctctccttgagcggaccaccacccgctccagatccactgaacgtcctgatacaaacctcatgaggtcgatgccttcattaatgactggaagatctgcccctccttcacctgccttatcgaggtctcatcctcgtactgggtctgtccagacaagcccatcaagtactccagtcgcaggacgaaggggccgacagcttccacagcttccaccaaagggaacgttggatagaaaagcaggaggtaaaaaactaaggagcactgtccaaagaagtacagaaacaggcctggccgtggaaatgaggaactggatgactcgacaggcaagccgagagtctacagatggtagcatgaacagctacagctcagaaggaaatctgattttccctggtgttcgcttggcctctgatagccagttcagtgatttcctggatggccttggccctgctcagctagtgggacgccagactctggcaacacctgcaatgggtgacattcaggtaggaatgatggacaaaaagggacagctggaggtagaaatcatccgggcccgtggccttgttgtaaaaccaggttccaagacactgccagcaccgtatgtaaaagtgtatctattagataacggagtctgcatagccaaaaagaaaacaaaagtggcaagaaaaacgctggaacccctttaccagcagctattatctttcgaagagagtccacaaggaaaagttttacagatcatcgtctggggagattatggccgcatggatcacaaatcttttatgggagtggcccagatacttttagatgaactagagctatccaatatggtgatcggatggttcaaacttttcccaccttcctccctagtagatccaaccttggcccctctgacaagaagagcttcccaatcatctctggaaagttcaactggaccttcttactctcgttcatagcagctgtaaaaaaattgttgtcacagcaaccagcgttac

SEQ ID NO: 174686 - DNA, 3780 bp, Homo sapiens
  Payload ID: 14302
  Gene Symbol: RIMS2
  Gene Name: regulating synaptic membrane exocytosis 2
  Uniprot ID: Q9UQ26
  ENST ID: ENST00000339750
  CDS Start-End: 318-1175
ctccagcagctccagcctccaggattctcagctccctcccgggcgagacctcggacgttcactgcgagcagccgctccgcccgccaccgcctccatctcctcctctggacccctctccaataaattggaggtcccggcggccaggaaagccacgtctcctccgggctgggtcagggaggcaggggccagagcctcagggtcccgtggcaccaacctggcttctggcccactggtcccggaaccgctgcggacgctgcgccccagccgccaagacgccgcgtatcttgtaccgcgggaaaagcgggtcctcgtccaagatgggccggcagggcttggggggtgccagcgctgcggggcgctccatgcagcgctcccagagccggagtagcctgtctgcctccttcgaggcactggccggctactttccctgcatgaactccctggaggaggaagaaggagaagcaggaggtaaaaaactaaggagcactgtccaaagaagtacagaaacaggcctggccgtggaaatgaggaactggatgactcgacaggcaagccgagagtctacagatggtagcatgaacagctacagctcagaaggaaatctgattttccctggtgttcgcttggcctctgatagccagttcagtgatttcctggatggccttggccctgctcagctagtgggacgccagactctggcaacacctgcaatgggtgacattcaggtaggaatgatggacaaaaagggacagctggaggtagaaatcatccgggcccgtggccttgttgtaaaaccaggttccaagacactgccagcaccgtatgtaaaagtgtatctattagataacggagtctgcatagccaaaaagaaaacaaaagtggcaagaaaaacgctggaacccctttaccagcagctattatctttcgaagagagtccacaaggaaaagttttacagatcatcgtctggggagattatggccgcatggatcacaaatcttttatgggagtggcccagatacttttagatgaactagagctatccaatatggtgatcggatggttcaaacttttcccaccttcctccctagtagatccaaccttggcccctctgacaagaagagcttcccaatcatctctggaaagttcaactggaccttcttactctcgttcatagcagctgtaaaaaaattgttgtcacagcaaccagcgttacaaaaaaaaaaaaaaaaatcacaggttgcaaaccctggtaacactgcatgcttaatgttgtgtcttctgagcctgtttctagggatacaaagcaatcctgtgttctcagaggaagttgcacacattgtgccctaaagaaggccctcaggtgaaagagcagagctgtgaagaactatcagatttggaattcaatgacactcgagttctggtccaatctgaagccatggattaatctcaaagaatcagtcagtttcatgcaacagaagcccttttcaatggcacctttatatttttatcattcctttttcttcatttatctaaccccaaagccctgatatgccacagaaatggagctatacagccatgaagcggtgttacaggtgaggagtgtaatcctaggaagcatcaggtgaaaagcaggagaccaaagaagtggtcaggaacaatcatcagccctcctctgggcgggaatcagagcagtcagtccagcaggaagagtggcagactttgtagctccatgggcacgtcaattactaatgctaagatgtgttggactctgaaaaacaaaattctgtggctacactgtactgaatgaaattaaagaaactttttttgcatggacacagattagctgaatacttaaattattttcttggggctgcaacttgcaaaaaaaaaaaaaagaataaaaatcagccattttcaacaatttatattatttttaaaaataaatttcactagtgcatggttttaaaaaggagagagaatgcaacagggtgatacaaagatacaccatgtttattctttaatcatagtctgtgttttggcagacattacaaatggaaatactttctagaagatacttaaaattctctttatgtgacaaataagtataatatattcaatttatttccatgttaaatatacaaatcttatgaagttcaatatgtgcaaatttttcacatctttctccttctctcactttacctcttctccctcttttaaacttttctttctccctgccagagtgaaccttatactaaaaaattacaagttttgatctgatcctctctcataccccatgtttgattcagagctgtagatgcctctgaatttgcgaatttctcaagggaaaattaactttaagagctttctttatttcaagcatgttgaaaaggattttgcaacatgacttgggagtacattaaagtaagtcagcatgtatttgacgaagaagatatttgaacttttgcagtttattgtacagtgcatggtaattttttcacctttaaaattcagtttacaggaaaattctaaaatcatgttgccattgtgatgtccaataaatttgtttttagcaccagcattattcatacaggggttaaagtattatttgtagaaggtcttaggttttgtttgttttttaatcatttaaagcaatttctttagccagtttccatttactatgtgaatagaagcactgctaaaaattgggaaccctgaaacacagggctgtttattaattcatttttctgtagtaaaattcaatttttcacaaattatatttctaaagaaatatagtaaacataaatttgcaacaattttaaagctccagtttttaggtgactcaaagaaagtcattatgcctattaatagttatttgatgccatcaccaaaagtctatgtgaaaatctcctaaagtcaaaacccctgcctttggttttacagacggttattaccattgggtggagctgcaaggtcaaatttctcctaagttcccctatttagaggaaaagtcactggttattgtaataaaccacccatggttctttatgtacattttgataacacattattatagcttgattttaattttttgcattaatttttgaaatccacatacatctcatttgtttaaattaaggccatgcacaaatattttttttagttcagtgctgaccattaaaaactatcatgcttgatacggtgcaaaagttaaaatgagtatcactaaaaatgccttctttttatgtggtgcaatatgaaatacaccaagactgtgtcttgacattctgatggacccaggtaaagttgttaaaagaacgaataaaactttattaaaataatttagacacctgtgtaccagcaacaattgatttaatagacctatagtgtctatactatcccttagaataaaggtttatgattttcctgatactaagatgcagtcacataatcttttgtgcatattcctatacaaattatttctaattttaataagaaggacgtgactacggaatatttgtacatacttgtcattatgcagtatttatttaaaagttggtgtttttttttaattttcacatctgcacctcgacttgtggtttagtcatgtaactagcactatgccagtgaccgttgttgccctgtacatagtatgtttgaaaagtaaagggaattccagttgggaaaaaagggcagattagtcctgtaatgaacaccaactaatgtaaatcaaattcattctggtgatggtatttaacactttaaataaaacattttcttta

SEQ ID NO: 174687 - DNA, 4382 bp, Homo sapiens
  Payload ID: 14302
  Gene Symbol: RIMS2
  Gene Name: regulating synaptic membrane exocytosis 2
  ENST ID: ENST00000406091
  CDS Start-End: 371-1783
agaataacctttttcttaacaggcccatcactagaggattctatgactccatcctttgaatgagtgttgtttttgtgtaattttttagtaacttagttttgaaataaaacaattgtaaacaagtagagactttcaaatcatctgattaaggatggctcctatgattttgccagggctagaaggattaaatgaaagcactgcctggcacactgttgatgtatttttgtcaacatgatgcttcatgctcgacagatgtgcattggttgaacaaaggaaaagaagcccatctgtgtccagagatcagaatagaagatacgaccaaagggaagaaagagaggaatattcacagtatgctacttcggataccgcaatgcctagatctccatcagattatgctgataggcgatctcaacatgaacctcagttttatgaagactctgatcatttaagttatagggactccaacaggagaagtcataggcattccaaagaatatattgtagatgatgaggatgtggaaagcagagatgaatacgaaaggcaaaggagagaggaagagtaccagtcacgctaccgaagtgatccgaatttggcccgttatccagtaaagccacaaccctatgaagaacaaatgcggatccatgctgaagtgtcccgagcacggcatgagagaaggcatagtgatgtttctttggcaaatgctgatctggaagattccaggatttctatgctaaggatggatcgaccatcaaggcaaagatctatatcagaacgtagagctgccatggaaaatcagcgatcttattcaatggaaagaactcgagaggctcagggaccaagttcttatgcacaaaggaccacaaaccatagtcctcctacccccaggaggagtccactacccatagatagaccagacttgaggcgtactgactcactacggaaacagcaccacttagatcctagctctgctgtaagaaaaacaaaacgggaaaaaatggaaacaatgttaaggaatgattctctcagttcagaccagtcagagtcagtgagacctccaccaccaaagcctcataaatcaaagaaaggcggtaaaatgcgccagatttcgttgagcagttcagaggaggaattggcttccacgcctgaatatacaagttgtgatgatgttgagattgaaagtgagagtgtaagtgaaaaaggagacatggattacaactggttggatcatacgtcttggcatagcagtgaggcatccccaatgtctttgcaccctgtaacctggcaaccatctaaagatggagatcgtttaattggtcgcattttattaaataagcgtctaaaagatggaagtgtacctcgagattcaggagcaatgcttggcttgaaggttgtaggaggaaagatgactgaatcaggtcggctttgtgcatttattactaaagtaaaaaaaggaagtttagctgatactgtaggacatcttagaccaggtgatgaagtattagaatggaatggaagactactgcaaggagccacatttgaggaagtgtacaacatcattctagaatccaaacctgaaccacaagtagaacttgtagtttcaaggcctattggagatataccgcgaatacctgatagcacacatgcacaactggagtccagttctagctcctttgaatctcaaaaaatggattccttctatttctgttacctctcccatgagtcctggaatgttgagggatgtcccacagttcttatcaggacaactttcaagccaaagccttagtagaagaacaacgccttttgttcctagggttcagataaaactatggtttgacaaggttggtcaccaattaatagttacaattttgggagcaaaagatctcccttccagggaagatgggaggccaaggaatccttatgttaaaatttactttcttccagacagaagtgataaaaacaagagaagaactaaaacagtaaagaaaacattggaacccaaatggaaccaaacattcatttattctccagtccaccgaagagaatttcgggaacgaatgctagagattaccctttgggatcaagctcgtgttcgagaggaagaaagtgaattcttaggcgagattttaattgaattagaaacagcattattagatgatgagccacattggtacaaacttcagacgcatgatgtctcttcattgccacttccccacccttctccatatatgccacgaagacagctccatggagagagcccaacacggaggttgcaaaggtcaaagagaataagtgatagtgaagtctctgactatgactgtgatgatggaattggtgtagtatcagattatcgacatgatggtcgagatcttcaaagctcaacattatcagtgccagaacaagtaatgtcatcaaaccactgttcaccatcagggtctcctcatcgagtagatgttataggaaggactagatcatggtcacccagtgtccctcctccacaaagtcggaatgtggaacaggggcttcgagggacccgcactatgaccggacattataatacaattagccgaatggacagacatcgtgtcatggatgaccattattctccagatagagacagtcattttcttactctacctcgctccagatacagtcagaccattgaccatcatcacagggatggcaggtctcatcctcgtactgggtctgtccagacaagcccatcaagtactccagtcgcaggacgaaggggccgacagcttccacagcttccaccaaagggaacgttggatagaaacaatggagtcaaggagatagaaccttatgaagaagaactggactctacaaggagaagatatgcaggtactatggatatagaggagagaaatcgccaaatgaaaattaacaaatacaaacaggtagccggatcagatcccagactggaacaagattaccattcgaagtatcgatcaggatgggatcctcatagaggggcagataatgtttctactaaatcttcggacagtgatgtaagtgatatatctgcggtttcaaggactagtagtgcttctcgtttcagcagcacaagctacatgtctgtccaatcagaacgcccaggaggaaacaagaaaatcagaccaaagggaatagaagagggagggaaagaaggggataagcatgaagagatagttcatgagaaggaagaggtaaaggaagaaagaattaatgagaatgagaaagggaaagagattgccaaaacgtgtaataaggagaaaaacagagaatcaggagacgaggaaaaaacacaagatatacacgagcaagggaaagaaaaagaacagtggaataaagaggatttgcaaaggagattctcacaagatgataccagtgtctttacatccaaaatgcaaagcagacaaatgggcatatcagggaagaacatgacaaaaagcaccagcatcagtggagacatgtgctcactggagaagaatgatggcagccagtctgacactgcagtgggcaccttgggcaccagtggcaaaaagcggcgctctagccttggtgccaaaatggtagctatcgttggtctgtcacggaaaagtcgcagtgcttctcagctcagccaaacggaagcaggaggtaaaaaactaaggagcactgtccaaagaagtacagaaacaggcctggccgtggaaatgaggaactggatgactcgacaggcaagccgagagtctacagatggtagcatgaacagctacagctcagaaggaaatctgattttccctggtgttcgcttggcctctgatagccagttcagtgatttcctggatggccttggccctgctcagctagtgggacgccagactctggcaacacctgcaatgggtgacattcaggtaggaatgatggacaaaaagggacagctggaggtagaaatcatccgggcccgtggccttgttgtaaaaccaggttccaagacactgccagcaccgtatgtaaaagtgtatctattagataacggagtctgcatagccaaaaagaaaacaaaagtggcaagaaaaacgctggaacccctttaccagcagctattatctttcgaagagagtccacaaggaaaagttttacagatcatcgtctggggagattatggccgcatggatcacaaatcttttatgggagtggcccagatacttttagatgaactagagctatccaatatggtgatcggatggttcaaacttttcccaccttcctccctagtagatccaaccttggcccctctgacaagaagagcttcccaatcatctctggaaagttcaactggaccttcttactctcgttcatagcagctgtaaaaaaattgttgtcacagcaaccagcgttac

SEQ ID NO: 174688 - DNA, 3880 bp, Homo sapiens
  Payload ID: 14302
  Gene Symbol: RIMS2
  Gene Name: regulating synaptic membrane exocytosis 2
  ENST ID: ENST00000408894
  CDS Start-End: 122-3880
agagctcaggagaaatatggaacttgattggcgtgtttttatttgatggtgtcagcaaatagatgattttaaagacaggtggtagggaaaaataagagaaggggaaaaaaaaagaaagaaaatgcaatttgagacattgcgccaggtctgcaattctgttttatctcattttcatggggttttttcatccccaccaaatatcttacaaaatgagctttttggacaaacactgaacaatgcaaggaaaagaagcccatctgtgtccagagatcagaatagaagatacgaccaaagggaagaaagagaggaatattcacagtatgctacttcggataccgcaatgcctagatctccatcagattatgctgataggcgatctcaacatgaacctcagttttatgaagactctgatcatttaagttatagggactccaacaggagaagtcataggcattccaaagaatatattgtagatgatgaggatgtggaaagcagagatgaatacgaaaggcaaaggagagaggaagagtaccagtcacgctaccgaagtgatccgaatttggcccgttatccagtaaagccacaaccctatgaagaacaaatgcggatccatgctgaagtgtcccgagcacggcatgagagaaggcatagtgatgtttctttggcaaatgctgatctggaagattccaggatttctatgctaaggatggatcgaccatcaaggcaaagatctatatcagaacgtagagctgccatggaaaatcagcgatcttattcaatggaaagaactcgagaggctcagggaccaagttcttatgcacaaaggaccacaaaccatagtcctcctacccccaggaggagtccactacccatagatagaccagacttgaggcgtactgactcactacggaaacagcaccacttagatcctagctctgctgtaagaaaaacaaaacgggaaaaaatggaaacaatgttaaggaatgattctctcagttcagaccagtcagagtcagtgagacctccaccaccaaagcctcataaatcaaagaaaggcggtaaaatgcgccagatttcgttgagcagttcagaggaggaattggcttccacgcctgaatatacaagttgtgatgatgttgagattgaaagtgagagtgtaagtgaaaaaggagacatggattacaactggttggatcatacgtcttggcatagcagtgaggcatccccaatgtctttgcaccctgtaacctggcaaccatctaaagatggagatcgtttaattggtcgcattttattaaataagcgtctaaaagatggaagtgtacctcgagattcaggagcaatgcttggcttgaaggttgtaggaggaaagatgactgaatcaggtcggctttgtgcatttattactaaagtaaaaaaaggaagtttagctgatactgtaggacatcttagaccaggtgatgaagtattagaatggaatggaagactactgcaaggagccacatttgaggaagtgtacaacatcattctagaatccaaacctgaaccacaagtagaacttgtagtttcaaggcctattggagatataccgcgaatacctgatagcacacatgcacaactggagtccagttctagctcctttgaatctcaaaaaatggatcgtccttctatttctgttacctctcccatgagtcctggaatgttgagggatgtcccacagttcttatcaggacaactttcaataaaactatggtttgacaaggttggtcaccaattaatagttacaattttgggagcaaaagatctcccttccagggaagatgggaggccaaggaatccttatgttaaaatttactttcttccagacagaagtgataaaaacaagagaagaactaaaacagtaaagaaaacattggaacccaaatggaaccaaacattcatttattctccagtccaccgaagagaatttcgggaacgaatgctagagattaccctttgggatcaagctcgtgttcgagaggaagaaagtgaattcttaggcgagattttaattgaattagaaacagcattattagatgatgagccacattggtacaaacttcagacgcatgatgtctcttcattgccacttccccacccttctccatatatgccacgaagacagctccatggagagagcccaacacggaggttgcaaaggtcaaagagaataagtgatagtgaagtctctgactatgactgtgatgatggaattggtgtagtatcagattatcgacatgatggtcgagatcttcaaagctcaacattatcagtgccagaacaagtaatgtcatcaaaccactgttcaccatcagggtctcctcatcgagtagatgttataggaaggactagatcatggtcacccagtgtccctcctccacaaagtcggaatgtggaacaggggcttcgagggacccgcactatgaccggacattataatacaattagccgaatggacagacatcgtgtcatggatgaccattattctccagatagagacagtcattttcttactctacctcgctccagatacagtcagaccattgaccatcatcacagggatggcagggattgtgaagcagcagatagacagccatatcacagatccagatcaacagaacaacggcctctccttgagcggaccaccacccgctccagatccactgaacgtcctgatacaaacctcatgaggtcgatgccttcattaatgactggaagatctgcccctccttcacctgccttatcgaggtctcatcctcgtactgggtctgtccagacaagcccatcaagtactccagtcgcaggacgaaggggccgacagcttccacagcttccaccaaagggaacgttggatagaaacaatggagtcaaggagatagaaccttatgaagaactggactctacaaggagaagatatgcaggtactatggatatagaggagagaaatcgccaaatgaaaattaacaaatacaaacaggtagccggatcagatcccagactggaacaagattaccattcgaagtatcgatcaggatgggatcctcatagaggggcagataatgtttctactaaatcttcggacagtgatgtaagtgatatatctgcggtttcaaggactagtagtgcttctcgtttcagcagcacaagctacatgtctgtccaatcagaacgcccaggaggaaacaagaaaatcagtgtctttacatccaaaatgcaaagcagacaaatgggcatatcagggaagaacatgacaaaaagcaccagcatcagtggagacatgtgctcactggagaagaatgatggcagccagtctgacactgcagtgggcaccttgggcaccagtggcaaaaagcggcgctctagccttggtgccaaaatggtagctatcgttggtctgtcacggaaaagtcgcagtgcttctcagctcagccaaacggaagcaggaggtaaaaaactaaggagcactgtccaaagaagtacagaaacaggcctggccgtggaaatgaggaactggatgactcgacaggcaagccgagagtctacagatggtagcatgaacagctacagctcagaaggaaatctgattttccctggtgttcgcttggcctctgatagccagttcagtgatttcctggatggccttggccctgctcagctagtgggacgccagactctggcaacacctgcaatgggtgacattcaggtaggaatgatggacaaaaagggacagctggaggtagaaatcatccgggcccgtggccttgttgtaaaaccaggttccaagacactgccagcaccgtatgtaaaagtgtatctattagataacggagtctgcatagcc

SEQ ID NO: 174689 - DNA, 4384 bp, Homo sapiens
  Payload ID: 14302
  Gene Symbol: RIMS2
  Gene Name: regulating synaptic membrane exocytosis 2
  ENST ID: ENST00000436393
  CDS Start-End: 242-4345
agaataacctttttcttaacaggcccatcactagaggattctatgactccatcctttgaatgagtgttgtttttgtgtaattttttagtaacttagttttgaaataaaacaattgtaaacaagtagagactttcaaatcatctgattaaggatggctcctatgattttgccagggctagaaggattaaatgaaagcactgcctggcacactgttgatgtatttttgtcaacatgatgcttcatgctcgacagatgtgcattggttgaacaaaggaaaagaagcccatctgtgtccagagatcagaatagaagatacgaccaaagggaagaaagagaggaatattcacagtatgctacttcggataccgcaatgcctagatctccatcagattatgctgataggcgatctcaacatgaacctcagttttatgaagactctgatcatttaagttatagggactccaacaggagaagtcataggcattccaaagaatatattgtagatgatgaggatgtggaaagcagagatgaatacgaaaggcaaaggagagaggaagagtaccagtcacgctaccgaagtgatccgaatttggcccgttatccagtaaagccacaaccctatgaagaacaaatgcggatccatgctgaagtgtcccgagcacggcatgagagaaggcatagtgatgtttctttggcaaatgctgatctggaagattccaggatttctatgctaaggatggatcgaccatcaaggcaaagatctatatcagaacgtagagctgccatggaaaatcagcgatcttattcaatggaaagaactcgagaggctcagggaccaagttcttatgcacaaaggaccacaaaccatagtcctcctacccccaggaggagtccactacccatagatagaccagacttgaggcgtactgactcactacggaaacagcaccacttagatcctagctctgctgtaagaaaaacaaaacgggaaaaaatggaaacaatgttaaggaatgattctctcagttcagaccagtcagagtcagtgagacctccaccaccaaagcctcataaatcaaagaaaggcggtaaaatgcgccagatttcgttgagcagttcagaggaggaattggcttccacgcctgaatatacaagttgtgatgatgttgagattgaaagtgagagtgtaagtgaaaaaggagacatggattacaactggttggatcatacgtcttggcatagcagtgaggcatccccaatgtctttgcaccctgtaacctggcaaccatctaaagatggagatcgtttaattggtcgcattttattaaataagcgtctaaaagatggaagtgtacctcgagattcaggagcaatgcttggcttgaaggttgtaggaggaaagatgactgaatcaggtcggctttgtgcatttattactaaagtaaaaaaaggaagtttagctgatactgtaggacatcttagaccaggtgatgaagtattagaatggaatggaagactactgcaaggagccacatttgaggaagtgtacaacatcattctagaatccaaacctgaaccacaagtagaacttgtagtttcaaggcctattggagatataccgcgaatacctgatagcacacatgcacaactggagtccagttctagctcctttgaatctcaaaaaatggatcgtccttctatttctgttacctctcccatgagtcctggaatgttgagggatgtcccacagttcttatcaggacaactttcaagccaaagccttagtagaagaacaacgccttttgttcctagggttcagataaaactatggtttgacaaggttggtcaccaattaatagttacaattttgggagcaaaagatctcccttccagggaagatgggaggccaaggaatccttatgttaaaatttactttcttccagacagaagtgataaaaacaagagaagaactaaaacagtaaagaaaacattggaacccaaatggaaccaaacattcatttattctccagtccaccgaagagaatttcgggaacgaatgctagagattaccctttgggatcaagctcgtgttcgagaggaagaaagtgaattcttaggcgagattttaattgaattagaaacagcattattagatgatgagccacattggtacaaacttcagacgcatgatgtctcttcattgccacttccccacccttctccatatatgccacgaagacagctccatggagagagcccaacacggaggttgcaaaggtcaaagagaataagtgatagtgaagtctctgactatgactgtgatgatggaattggtgtagtatcagattatcgacatgatggtcgagatcttcaaagctcaacattatcagtgccagaacaagtaatgtcatcaaaccactgttcaccatcagggtctcctcatcgagtagatgttataggaaggactagatcatggtcacccagtgtccctcctccacaaagtcggaatgtggaacaggggcttcgagggacccgcactatgaccggacattataatacaattagccgaatggacagacatcgtgtcatggatgaccattattctccagatagagacagtcattttcttactctacctcgctccagatacagtcagaccattgaccatcatcacagggatggcaggtctcatcctcgtactgggtctgtccagacaagcccatcaagtactccagtcgcaggacgaaggggccgacagcttccacagcttccaccaaagggaacgttggatagaaacaatggagtcaaggagatagaaccttatgaagaagaactggactctacaaggagaagatatgcaggtactatggatatagaggagagaaatcgccaaatgaaaattaacaaatacaaacaggtagccggatcagatcccagactggaacaagattaccattcgaagtatcgatcaggatgggatcctcatagaggggcagataatgtttctactaaatcttcggacagtgatgtaagtgatatatctgcggtttcaaggactagtagtgcttctcgtttcagcagcacaagctacatgtctgtccaatcagaacgcccaggaggaaacaagaaaatcagaccaaagggaatagaagagggagggaaagaaggggataagcatgaagagatagttcatgagaaggaagaggtaaaggaagaaagaattaatgagaatgagaaagggaaagagattgccaaaacgtgtaataaggagaaaaacagagaatcaggagacgaggaaaaaacacaagatatacacgagcaagggaaagaaaaagaacagtggaataaagaggatttgcaaaggagattctcacaagatgataccagtgtctttacatccaaaatgcaaagcagacaaatgggcatatcagggaagaacatgacaaaaagcaccagcatcagtggagacatgtgctcactggagaagaatgatggcagccagtctgacactgcagtgggcaccttgggcaccagtggcaaaaagcggcgctctagccttggtgccaaaatggtagctatcgttggtctgtcacggaaaagtcgcagtgcttctcagctcagccaaacggaagcaggaggtaaaaaactaaggagcactgtccaaagaagtacagaaacaggcctggccgtggaaatgaggaactggatgactcgacaggcaagccgagagtctacagatggtagcatgaacagctacagctcagaaggaaatctgattttccctggtgttcgcttggcctctgatagccagttcagtgatttcctggatggccttggccctgctcagctagtgggacgccagactctggcaacacctgcaatgggtgacattcaggtaggaatgatggacaaaaagggacagctggaggtagaaatcatccgggcccgtggccttgttgtaaaaccaggttccaagacactgccagcaccgtatgtaaaagtgtatctattagataacggagtctgcatagccaaaaagaaaacaaaagtggcaagaaaaacgctggaacccctttaccagcagctattatctttcgaagagagtccacaaggaaaagttttacagatcatcgtctggggagattatggccgcatggatcacaaatcttttatgggagtggcccagatacttttagatgaactagagctatccaatatggtgatcggatggttcaaacttttcccaccttcctccctagtagatccaaccttggcccctctgacaagaagagcttcccaatcatctctggaaagttcaactggaccttcttactctcgttcatagcagctgtaaaaaaattgttgtcacagcaaccagcgttac

SEQ ID NO: 174690 - DNA, 8002 bp, Homo sapiens
  Payload ID: 14302
  Gene Symbol: RIMS2
  Gene Name: regulating synaptic membrane exocytosis 2
  Uniprot ID: Q9UQ26
  ENST ID: ENST00000507740
  CDS Start-End: 237-3728
acagtcaggagaaagccgaaagctgcacgggtactgaatcttctacgactgaattagaagaataatgactgtacaattaactatcaacctctgttcatttaagcacagtttttacagagctcaggagaaatatggaacttgattggcgtgtttttatttgatggtgtcagcaaatagatgattttaaagacaggtggtagggaaaaataagagaaggggaaaaaaaaagaaagaaaatgcaatttgagacattgcgccaggtctgcaattctgttttatctcattttcatggggttttttcatccccaccaaatatcttacaaaatgagctttttggacaaacactgaacaatgcaaggaaaagaagcccatctgtgtccagagatcagaatagaagatacgaccaaagggaagaaagagaggaatattcacagtatgctacttcggataccgcaatgcctagatctccatcagattatgctgataggcgatctcaacatgaacctcagttttatgaagactctgatcatttaagttatagggactccaacaggagaagtcataggcattccaaagaatatattgtagatgatgaggatgtggaaagcagagatgaatacgaaaggcaaaggagagaggaagagtaccagtcacgctaccgaagtgatccgaatttggcccgttatccagtaaagccacaaccctatgaagaacaaatgcggatccatgctgaagtgtcccgagcacggcatgagagaaggcatagtgatgtttctttggcaaatgctgatctggaagattccaggatttctatgctaaggatggatcgaccatcaaggcaaagatctatatcagaacgtagagctgccatggaaaatcagcgatcttattcaatggaaagaactcgagaggctcagggaccaagttcttatgcacaaaggaccacaaaccatagtcctcctacccccaggaggagtccactacccatagatagaccagacttgaggcgtactgactcactacggaaacagcaccacttagatcctagctctgctgtaagaaaaacaaaacgggaaaaaatggaaacaatgttaaggaatgattctctcagttcagaccagtcagagtcagtgagacctccaccaccaaagcctcataaatcaaagaaaggcggtaaaatgcgccagatttcgttgagcagttcagaggaggaattggcttccacgcctgaatatacaagttgtgatgatgttgagattgaaagtgagagtgtaagtgaaaaaggagacatggattacaactggttggatcatacgtcttggcatagcagtgaggcatccccaatgtctttgcaccctgtaacctggcaaccatctaaagatggagatcgtttaattggtcgcattttattaaataagcgtctaaaagatggaagtgtacctcgagattcaggagcaatgcttggcttgaaggttgtaggaggaaagatgactgaatcaggtcggctttgtgcatttattactaaagtaaaaaaaggaagtttagctgatactgtaggacatcttagaccaggtgatgaagtattagaatggaatggaagactactgcaaggagccacatttgaggaagtgtacaacatcattctagaatccaaacctgaaccacaagtagaacttgtagtttcaaggcctattggagatataccgcgaatacctgatagcacacatgcacaactggagtccagttctagctcctttgaatctcaaaaaatggatcgtccttctatttctgttacctctcccatgagtcctggaatgttgagggatgtcccacagttcttatcaggacaactttcaataaaactatggtttgacaaggttggtcaccaattaatagttacaattttgggagcaaaagatctcccttccagggaagatgggaggccaaggaatccttatgttaaaatttactttcttccagacagaagtgataaaaacaagagaagaactaaaacagtaaagaaaacattggaacccaaatggaaccaaacattcatttattctccagtccaccgaagagaatttcgggaacgaatgctagagattaccctttgggatcaagctcgtgttcgagaggaagaaagtgaattcttaggcgagattttaattgaattagaaacagcattattagatgatgagccacattggtacaaacttcagacgcatgatgtctcttcattgccacttccccacccttctccatatatgccacgaagacagctccatggagagagcccaacacggaggttgcaaaggtcaaagagaataagtgatagtgaagtctctgactatgactgtgatgatggaattggtgtagtatcagattatcgacatgatggtcgagatcttcaaagctcaacattatcagtgccagaacaagtaatgtcatcaaaccactgttcaccatcagggtctcctcatcgagtagatgttataggaaggactagatcatggtcacccagtgtccctcctccacaaagtcggaatgtggaacaggggcttcgagggacccgcactatgaccggacattataatacaattagccgaatggacagacatcgtgtcatggatgaccattattctccagatagagacagtcattttcttactctacctcgctccagatacagtcagaccattgaccatcatcacagggatggcagggattgtgaagcagcagatagacagccatatcacagatccagatcaacagaacaacggcctctccttgagcggaccaccacccgctccagatccactgaacgtcctgatacaaacctcatgaggtcgatgccttcattaatgactggaagatctgcccctccttcacctgccttatcgaggtctcatcctcgtactgggtctgtccagacaagcccatcaagtactccagtcgcaggacgaaggggccgacagcttccacagcttccaccaaagggaacgttggatagaaaagcaggaggtaaaaaactaaggagcactgtccaaagaagtacagaaacaggcctggccgtggaaatgaggaactggatgactcgacaggcaagccgagagtctacagatggtagcatgaacagctacagctcagaaggaaatctgattttccctggtgttcgcttggcctctgatagccagttcagtgatttcctggatggccttggccctgctcagctagtgggacgccagactctggcaacacctgcaatgggtgacattcaggtaggaatgatggacaaaaagggacagctggaggtagaaatcatccgggcccgtggccttgttgtaaaaccaggttccaagacactgccagcaccgtatgtaaaagtgtatctattagataacggagtctgcatagccaaaaagaaaacaaaagtggcaagaaaaacgctggaacccctttaccagcagctattatctttcgaagagagtccacaaggaaaagttttacagatcatcgtctggggagattatggccgcatggatcacaaatcttttatgggagtggcccagatacttttagatgaactagagctatccaatatggtgatcggatggttcaaacttttcccaccttcctccctagtagatccaaccttggcccctctgacaagaagagcttcccaatcatctctggaaagttcaactggaccttcttactctcgttcatagcagctgtaaaaaaattgttgtcacagcaaccagcgttacaaaaaaaaaaaaaaaaatcacaggttgcaaaccctggtaacactgcatgcttaatgttgtgtcttctgagcctgtttctagggatacaaagcaatcctgtgttctcagaggaagttgcacacattgtgccctaaagaaggccctcaggtgaaagagcagagctgtgaagaactatcagatttggaattcaatgacactcgagttctggtccaatctgaagccatggattaatctcaaagaatcagtcagtttcatgcaacagaagcccttttcaatggcacctttatatttttatcattcctttttcttcatttatctaaccccaaagccctgatatgccacagaaatggagctatacagccatgaagcggtgttacaggtgaggagtgtaatcctaggaagcatcaggtgaaaagcaggagaccaaagaagtggtcaggaacaatcatcagccctcctctgggcgggaatcagagcagtcagtccagcaggaagagtggcagactttgtagctccatgggcacgtcaattactaatgctaagatgtgttggactctgaaaaacaaaattctgtggctacactgtactgaatgaaattaaagaaactttttttgcatggacacagattagctgaatacttaaattattttcttggggctgcaacttgcaaaaaaaaaaaaaagaataaaaatcagccattttcaacaatttatattatttttaaaaataaatttcactagtgcatggttttaaaaaggagagagaatgcaacagggtgatacaaagatacaccatgtttattctttaatcatagtctgtgttttggcagacattacaaatggaaatactttctagaagatacttaaaattctctttatgtgacaaataagtataatatattcaatttatttccatgttaaatatacaaatcttatgaagttcaatatgtgcaaatttttcacatctttctccttctctcactttacctcttctccctcttttaaacttttctttctccctgccagagtgaaccttatactaaaaaattacaagttttgatctgatcctctctcataccccatgtttgattcagagctgtagatgcctctgaatttgcgaatttctcaagggaaaattaactttaagagctttctttatttcaagcatgttgaaaaggattttgcaacatgacttgggagtacattaaagtaagtcagcatgtatttgacgaagaagatatttgaacttttgcagtttattgtacagtgcatggtaattttttcacctttaaaattcagtttacaggaaaattctaaaatcatgttgccattgtgatgtccaataaatttgtttttagcaccagcattattcatacaggggttaaagtattatttgtagaaggtcttaggttttgtttgttttttaatcatttaaagcaatttctttagccagtttccatttactatgtgaatagaagcactgctaaaaattgggaaccctgaaacacagggctgtttattaattcatttttctgtagtaaaattcaatttttcacaaattatatttctaaagaaatatagtaaacataaatttgcaacaattttaaagctccagtttttaggtgactcaaagaaagtcattatgcctattaatagttatttgatgccatcaccaaaagtctatgtgaaaatctcctaaagtcaaaacccctgcctttggttttacagacggttattaccattgggtggagctgcaaggtcaaatttctcctaagttcccctatttagaggaaaagtcactggttattgtaataaaccacccatggttctttatgtacattttgataacacattattatagcttgattttaattttttgcattaatttttgaaatccacatacatctcatttgtttaaattaaggccatgcacaaatattttttttagttcagtgctgaccattaaaaactatcatgcttgatacggtgcaaaagttaaaatgagtatcactaaaaatgccttctttttatgtggtgcaatatgaaatacaccaagactgtgtcttgacattctgatggacccaggtaaagttgttaaaagaacgaataaaactttattaaaataatttagacacctgtgtaccagcaacaattgatttaatagacctatagtgtctatactatcccttagaataaaggtttatgattttcctgatactaagatgcagtcacataatcttttgtgcatattcctatacaaattatttctaattttaataagaaggacgtgactacggaatatttgtacatacttgtcattatgcagtatttatttaaaagttggtgtttttttttaattttcacatctgcacctcgacttgtggtttagtcatgtaactagcactatgccagtgaccgttgttgccctgtacatagtatgtttgaaaagtaaagggaattccagttgggaaaaaagggcagattagtcctgtaatgaacaccaactaatgtaaatcaaattcattctggtgatggtatttaacactttaaataaaacattttctttacaggcgtctgcagtgctttctctgacttttctccccacacagccctgagcctgctgcagctcattccctgaactcatgtgtcatttaaagaatgaaatcaccgtctcctacttctcgataacataagtggactgctggtcttagcagcggccctcagtagagcatttctttaaaacgccaaaggatttctgctcacactatgaaaaggtgctgttttttaaaaggttgttattttggattgagtttctttctgattaaatgactcagcaactcacagattttttgagtgaaatttttaatttagtcatggccttcactgacagcatagtcacaaatactcaggcacaggctctgctagcccctgggtgaagatggcgaaggcataactggctttatgcagcatatgtgtttctgctaaagtgtcagttttgctttgtggggagtggagggtgtgttttcgggatggggagacgtggtaacctgacatgtaacaacctgtccggagactagcttctacgtgtggatatgaatgggtgagaggatttctccatatccttctggggcgattcctcaactgggagaaggaaaccctgcagagttctcatgggagtctgcttcaggtttgaaatttaagagctagtttggattcatgtttagtaatcgaactgaaatctaagtctagctgtctctctattcttggaaacaaccatttcctccatttccaaagactcaactcgagtccaattccccctatctgtcccatatatttttcctttatcccatatataccccctactctagtgaattgtttctttgttgttcattcctgttctttgttgttcatatacattcctgtatatgaacaacattttcctttatcccatatataccccctactctagtgaattgtttctttgttgttcattcctgtttctttgttgttcatatacattcctgttataaaaattcccttccctttcttatgtgccctctcctgaaaagcccttctacttttctcaataatgatccatgcgagtcccttcttgcaactcccagctcacgaatgagctctttcggcaactcctgactaaaccctaacaacatggctgccattgatgccaacaccttcactttcccagggaccccagatgccaaggctccataggcaacaataaaggatatgatggtcctgtagtgggtatgatagaattaggcaagagatcaccaaagctgtctgcctactactgatgtaaaccttgacattctgtgcacgtaaaaatcatgtgctcaatgtgtttgtctcaactccctcagctcgtgatgccctcagggttctgtgggcatttatgcactgaagaaacaggagttcacacatccacctctggactgtgaaatgtgtattgagaaatactttgcaagagagaatttttttaagtgaacaaacaacaagtctgtgccacacacatcttccatatgccctgactcaggtcacttaatctccaggatttcatttcctcacctggaaaatatggagtttgaggtagattctcatctatcattaaatcaacactttaactaaaacgtaagctccttcagggcagagaccgtatcttcagtatcaaaaacaatgtttgacacatagctgctcaataaacatctgtccaatgaa

SEQ ID NO: 174691 - DNA, 2285 bp, Homo sapiens
  Payload ID: 14302
  Gene Symbol: RIMS2
  Gene Name: regulating synaptic membrane exocytosis 2
  ENST ID: ENST00000515551
  CDS Start-End: 289-2285
acacttcagctgggaatgcccaaaaagcttactgctgtttagaattcttgctacagtcaggagaaagccgaaagctgcacgggtactgaatcttctacgactgaattagaagaataatgactgtacaattaactatcaacctctgttcatttaagcacagtttttacagagctcaggagaaatatggaacttgattggcgtgtttttatttgatggtgtcagcaaatagatgattttaaagacaggtggtagggaaaaataagagaaggggaaaaaaaaagaaagaaaatgcaatttgagacattgcgccaggtctgcaattctgttttatctcattttcatggggttttttcatccccaccaaatatcttacaaaatgagctttttggacaaacactgaacaatgcaaggaaaagaagcccatctgtgtccagagatcagaatagaagatacgaccaaagggaagaaagagaggaatattcacagtatgctacttcggataccgcaatgcctagatctccatcagattatgctgataggcgatctcaacatgaacctcagttttatgaagactctgatcatttaagttatagggactccaacaggagaagtcataggcattccaaagaatatattgtagatgatgaggatgtggaaagcagagatgaatacgaaaggcaaaggagagaggaagagtaccagtcacgctaccgaagtgatccgaatttggcccgttatccagtaaagccacaaccctatgaagaacaaatgcggatccatgctgaagtgtcccgagcacggcatgagagaaggcatagtgatgtttctttggcaaatgctgatctggaagattccaggatttctatgctaaggatggatcgaccatcaaggcaaagatctatatcagaacgtagagctgccatggaaaatcagcgatcttattcaatggaaagaactcgagaggctcagggaccaagttcttatgcacaaaggaccacaaaccatagtcctcctacccccaggaggagtccactacccatagatagaccagacttgaggcgtactgactcactacggaaacagcaccacttagatcctagctctgctgtaagaaaaacaaaacgggaaaaaatggaaacaatgttaaggaatgattctctcagttcagaccagtcagagtcagtgagacctccaccaccaaagcctcataaatcaaagaaaggcggtaaaatgcgccagatttcgttgagcagttcagaggaggaattggcttccacgcctgaatatacaagttgtgatgatgttgagattgaaagtgagagtgtaagtgaaaaaggagacatggattacaactggttggatcatacgtcttggcatagcagtgaggcatccccaatgtctttgcaccctgtaacctggcaaccatctaaagatggagatcgtttaattggtcgcattttattaaataagcgtctaaaagatggaagtgtacctcgagattcaggagcaatgcttggcttgaaggttgtaggaggaaagatgactgaatcaggtcggctttgtgcatttattactaaagtaaaaaaaggaagtttagctgatactgtaggacatcttagaccaggtgatgaagtattagaatggaatggaagactactgcaaggagccacatttgaggaagtgtacaacatcattctagaatccaaacctgaaccacaagtagaacttgtagtttcaaggcctattggagatataccgcgaatacctgatagcacacatgcacaactggagtccagttctagctcctttgaatctcaaaaaatggatcgtccttctatttctgttacctctcccatgagtcctggaatgttgagggatgtcccacagttcttatcaggacaactttcaataaaactatggtttgacaaggttggtcaccaattaatagttacaattttgggagcaaaagatctcccttccagggaagatgggaggccaaggaatccttatgttaaaatttactttcttccagacagaagtgataaaaacaagagaagaactaaaacagtaaagaaaacattggaacccaaatggaaccaaacattcatttattctccagtccaccgaagagaatttcgggaacgaatgctagagattaccctttgggatcaagctcgtgttcgagaggaagaaagtgaattcttaggcgagattttaattgaattagaaacagcattattagatgatgagccacattggtacaaacttcagacgcatgatgtctc

SEQ ID NO: 174692 - DNA, 4228 bp, Homo sapiens
  Payload ID: 14302
  Gene Symbol: RIMS2
  Gene Name: regulating synaptic membrane exocytosis 2
  Uniprot ID: Q9UQ26
  ENST ID: ENST00000504942
  CDS Start-End: 140-4189
gctgtcgccttggattgaaggccattgatttgtatgtatttgtcccagcgctggaggctgccccagccgccgcgccggtgccgccgctgccagtggagttgcctccccgcttccctagggtggttcggctccaccaaacatgtcggctcctgtcgggccccggggccgcctggctcccatcccggcggcctctcagccgcctctgcagcccgagatgcctgacctcagccacctcacggaggaggagaggaaaatcatcctggccgtcatggataggcagaagaaagaagaggagaaggagcagtccgtgctcaaaaaactgcatcagcagtttgaaatgtataaagagcaggtaaagaagatgggagaagaatcacagcaacagcaagaacagaagggtgatgcgccaacctgtggtatctgccacaaaacaaagtttgctgatggatgtggccataactgttcatattgccaaacaaagttctgtgctcgttgtggaggtcgagtgtcattacgctcaaacaaggttatgtgggtatgtaatttgtgccgaaaacaacaagaaatcctcactaaatcaggagcatggttttataatagtggatctaatacaccacagcaacctgatcaaaaggttcttcgagggctaagaaatgaggaggcacctcaggagaagaaaccaaaactacatgagcagacccagttccaaggaccctcaggtgacttatctgtacctgcagtggagaaaagtcgatctcatgggctcacaagacagcattctattaaaaatgggtcaggcgtgaagcatcacattgccagtgacatagcttcagacaggaaaagaagcccatctgtgtccagagatcagaatagaagatacgaccaaagggaagaaagagaggaatattcacagtatgctacttcggataccgcaatgcctagatctccatcagattatgctgataggcgatctcaacatgaacctcagttttatgaagactctgatcatttaagttatagggactccaacaggagaagtcataggcattccaaagaatatattgtagatgatgaggatgtggaaagcagagatgaatacgaaaggcaaaggagagaggaagagtaccagtcacgctaccgaagtgatccgaatttggcccgttatccagtaaagccacaaccctatgaagaacaaatgcggatccatgctgaagtgtcccgagcacggcatgagagaaggcatagtgatgtttctttggcaaatgctgatctggaagattccaggatttctatgctaaggatggatcgaccatcaaggcaaagatctatatcagaacgtagagctgccatggaaaatcagcgatcttattcaatggaaagaactcgagaggctcagggaccaagttcttatgcacaaaggaccacaaaccatagtcctcctacccccaggaggagtccactacccatagatagaccagacttgaggcgtactgactcactacggaaacagcaccacttagatcctagctctgctgtaagaaaaacaaaacgggaaaaaatggaaacaatgttaaggaatgattctctcagttcagaccagtcagagtcagtgagacctccaccaccaaagcctcataaatcaaagaaaggcggtaaaatgcgccagatttcgttgagcagttcagaggaggaattggcttccacgcctgaatatacaagttgtgatgatgttgagattgaaagtgagagtgtaagtgaaaaaggagacatggattacaactggttggatcatacgtcttggcatagcagtgaggcatccccaatgtctttgcaccctgtaacctggcaaccatctaaagatggagatcgtttaattggtcgcattttattaaataagcgtctaaaagatggaagtgtacctcgagattcaggagcaatgcttggcttgaaggttgtaggaggaaagatgactgaatcaggtcggctttgtgcatttattactaaagtaaaaaaaggaagtttagctgatactgtaggacatcttagaccaggtgatgaagtattagaatggaatggaagactactgcaaggagccacatttgaggaagtgtacaacatcattctagaatccaaacctgaaccacaagtagaacttgtagtttcaaggcctattggagatataccgcgaatacctgatagcacacatgcacaactggagtccagttctagctcctttgaatctcaaaaaatggatcgtccttctatttctgttacctctcccatgagtcctggaatgttgagggatgtcccacagttcttatcaggacaactttcaagccaaagccttagtagaagaacaacgccttttgttcctagggttcagataaaactatggtttgacaaggttggtcaccaattaatagttacaattttgggagcaaaagatctcccttccagggaagatgggaggccaaggaatccttatgttaaaatttactttcttccagacagaagtgataaaaacaagagaagaactaaaacagtaaagaaaacattggaacccaaatggaaccaaacattcatttattctccagtccaccgaagagaatttcgggaacgaatgctagagattaccctttgggatcaagctcgtgttcgagaggaagaaagtgaattcttaggcgagattttaattgaattagaaacagcattattagatgatgagccacattggtacaaacttcagacgcatgatgtctcttcattgccacttccccacccttctccatatatgccacgaagacagctccatggagagagcccaacacggaggttgcaaaggtcaaagagaataagtgatagtgaagtctctgactatgactgtgatgatggaattggtgtagtatcagattatcgacatgatggtcgagatcttcaaagctcaacattatcagtgccagaacaagtaatgtcatcaaaccactgttcaccatcagggtctcctcatcgagtagatgttataggaaggactagatcatggtcacccagtgtccctcctccacaaagtcggaatgtggaacaggggcttcgagggacccgcactatgaccggacattataatacaattagccgaatggacagacatcgtgtcatggatgaccattattctccagatagagacagggattgtgaagcagcagatagacagccatatcacagatccagatcaacagaacaacggcctctccttgagcggaccaccacccgctccagatccactgaacgtcctgatacaaacctcatgaggtcgatgccttcattaatgactggaagatctgcccctccttcacctgccttatcgaggtctcatcctcgtactgggtctgtccagacaagcccatcaagtactccagtcgcaggacgaaggggccgacagcttccacagcttccaccaaagggaacgttggatagaaaagcaggaggtaaaaaactaaggagcactgtccaaagaagtacagaaacaggcctggccgtggaaatgaggaactggatgactcgacaggcaagccgagagtctacagatggtagcatgaacagctacagctcagaaggaaatctgattttccctggtgttcgcttggcctctgatagccagttcagtgatttcctggatggccttggccctgctcagctagtgggacgccagactctggcaacacctgcaatgggtgacattcaggtaggaatgatggacaaaaagggacagctggaggtagaaatcatccgggcccgtggccttgttgtaaaaccaggttccaagacactgccagcaccgtatgtaaaagtgtatctattagataacggagtctgcatagccaaaaagaaaacaaaagtggcaagaaaaacgctggaacccctttaccagcagctattatctttcgaagagagtccacaaggaaaagttttacagatcatcgtctggggagattatggccgcatggatcacaaatcttttatgggagtggcccagatacttttagatgaactagagctatccaatatggtgatcggatggttcaaacttttcccaccttcctccctagtagatccaaccttggcccctctgacaagaagagcttcccaatcatctctggaaagttcaactggaccttcttactctcgttcatagcagctgtaaaaaaattgttgtcacagcaaccagcgttac

SEQ ID NO: 174693 - DNA, 1062 bp, Homo sapiens
  Payload ID: 14302
  Gene Symbol: RIMS2
  Gene Name: regulating synaptic membrane exocytosis 2
  ENST ID: ENST00000523362
  CDS Start-End: 289-1062
agctccctcccgggcgagacctcggacgttcactgcgagcagccgctccgcccgccaccgcctccatctcctcctctggacccctctccaataaattggaggtcccggcggccaggaaagccacgtctcctccgggctgggtcagggaggcaggggccagagcctcagggtcccgtggcaccaacctggcttctggcccactggtcccggaaccgctgcggacgctgcgccccagccgccaagacgccgcgtatcttgtaccgcgggaaaagcgggtcctcgtccaagatgggccggcagggcttggggggtgccagcgctgcggggcgctccatgcagcgctcccagagccggagtagcctgtctgcctccttcgaggcactggccggctactttccctgcatgaactccctggaggaggaagaaggagaagcaggaggtaaaaaactaaggagcactgtccaaagaagtacagaaacaggcctggccgtggaaatgaggaactggatgactcgacaggcaagccgagagtctacagatggtagcatgaacagctacagctcagaaggaaatctgattttccctggtgttcgcttggcctctgatagccagttcagtgatttcctggatggccttggccctgctcagctagtgggacgccagactctggcaacacctgcaatgggtgacattcaggtaggaatgatggacaaaaagggacagctggaggtagaaatcatccgggcccgtggccttgttgtaaaaccaggttccaagacactgccagcaccgtatgtaaaagtgtatctattagataacggagtctgcatagccaaaaagaaaacaaaagtggcaagaaaaacgctggaacccctttaccagcagctattatctttcgaagagagtccacaaggaaaagttttacagatcatcgtctggggagattatggccgcatggatcacaaatcttttatgggagtggcccagatacttttagatgaactagagctatccaatatggtgatcggatggttcaaacttttcccaccttcctccctagta

SEQ ID NO: 174694 - DNA, 4143 bp, Homo sapiens
  Payload ID: 14302
  Gene Symbol: RIMS2
  Gene Name: regulating synaptic membrane exocytosis 2
  ENST ID: ENST00000626043
  CDS Start-End: 1-3181
agaaaactgcatcagcagtttgaaatgtataaagagcaggtaaagaagatgggagaagaatcacagcaacagcaagaacagaagggtgatgcgccaacctgtggtatctgccacaaaacaaagtttgctgatggatgtggccataactgttcatattgccaaacaaagttctgtgctcgttgtggaggtcgagtgtcattacgctcaaacaaggttatgtgggtatgtaatttgtgccgaaaacaacaagaaatcctcactaaatcaggagcatggttttataatagtggatctaatacaccacagcaacctgatcaaaaggttcttcgagggctaagaaatgaggaggcacctcaggagaagaaaccaaaactacatgagcagacccagttccaaggaccctcaggtgacttatctgtacctgcagtggagaaaagtcgatctcatgggctcacaagacagcattctattaaaaatgggtcaggcgtgaagcatcacattgccagtgacatagcttcagacaggaaaagaagcccatctgtgtccagagatcagaatagaagatacgaccaaagggaagaaagagaggaatattcacagtatgctacttcggataccgcaatgcctagatctccatcagattatgctgataggcgatctcaacatgaacctcagttttatgaagactctgatcatttaagttatagggactccaacaggagaagtcataggcattccaaagaatatattgtagatgatgaggatgtggaaagcagagatgaatacgaaaggcaaaggagagaggaagagtaccagtcacgctaccgaagtgatccgaatttggcccgttatccagtaaagccacaaccctatgaagaacaaatgcggatccatgctgaagtgtcccgagcacggcatgagagaaggcatagtgatgtttctttggcaaatgctgatctggaagattccaggatttctatgctaaggatggatcgaccatcaaggcaaagatctatatcagaacgtagagctgccatggaaaatcagcgatcttattcaatggaaagaactcgagaggctcagggaccaagttcttatgcacaaaggaccacaaaccatagtcctcctacccccaggaggagtccactacccatagatagaccagacttgaggcgtactgactcactacggaaacagcaccacttagatcctagctctgctgtaagaaaaacaaaacgggaaaaaatggaaacaatgttaaggaatgattctctcagttcagaccagtcagagtcagtgagacctccaccaccaaagcctcataaatcaaagaaaggcggtaaaatgcgccagatttcgttgagcagttcagaggaggaattggcttccacgcctgaatatacaagttgtgatgatgttgagattgaaagtgagagtgtaagtgaaaaaggagacatggattacaactggttggatcatacgtcttggcatagcagtgaggcatccccaatgtctttgcaccctgtaacctggcaaccatctaaagatggagatcgtttaattggtcgcattttattaaataagcgtctaaaagatggaagtgtacctcgagattcaggagcaatgcttggcttgaaggttgtaggaggaaagatgactgaatcaggtcggctttgtgcatttattactaaagtaaaaaaaggaagtttagctgatactgtaggacatcttagaccaggtgatgaagtattagaatggaatggaagactactgcaaggagccacatttgaggaagtgtacaacatcattctagaatccaaacctgaaccacaagtagaacttgtagtttcaaggcctattggagatataccgcgaatacctgatagcacacatgcacaactggagtccagttctagctcctttgaatctcaaaaaatggatcgtccttctatttctgttacctctcccatgagtcctggaatgttgagggatgtcccacagttcttatcaggacaactttcaagccaaagccttagtagaagaacaacgccttttgttcctagggttcagataaaactatggtttgacaaggttggtcaccaattaatagttacaattttgggagcaaaagatctcccttccagggaagatgggaggccaaggaatccttatgttaaaatttactttcttccagacagaagtgataaaaacaagagaagaactaaaacagtaaagaaaacattggaacccaaatggaaccaaacattcatttattctccagtccaccgaagagaatttcgggaacgaatgctagagattaccctttgggatcaagctcgtgttcgagaggaagaaagtgaattcttaggcgagattttaattgaattagaaacagcattattagatgatgagccacattggtacaaacttcagacgcatgatgtctcttcattgccacttccccacccttctccatatatgccacgaagacagctccatggagagagcccaacacggaggttgcaaaggtcaaagagaataagtgatagtgaagtctctgactatgactgtgatgatggaattggtgtagtatcagattatcgacatgatggtcgagatcttcaaagctcaacattatcagtgccagaacaagtaatgtcatcaaaccactgttcaccatcagggtctcctcatcgagtagatgttataggaaggactagatcatggtcacccagtgtccctcctccacaaagtcggaatgtggaacaggggcttcgagggacccgcactatgaccggacattataatacaattagccgaatggacagacatcgtgtcatggatgaccattattctccagatagagacagggattgtgaagcagcagatagacagccatatcacagatccagatcaacagaacaacggcctctccttgagcggaccaccacccgctccagatccactgaacgtcctgatacaaacctcatgaggtcgatgccttcattaatgactggaagatctgcccctccttcacctgccttatcgaggtctcatcctcgtactgggtctgtccagacaagcccatcaagtactccagtcgcaggacgaaggggccgacagcttccacagcttccaccaaagggaacgttggatagaaacaatggagtcaaggagatagaaccttatgaagaactggactctacaaggagaagatatgcaggtactatggatatagaggagagaaatcgccaaatgaaaattaacaaatacaaacaggtagccggatcagatcccagactggaacaagattaccattcgaagtatcgatcaggatgggatcctcatagaggggcagataatgtttctactaaatcttcggacagtgatgtaagtgatatatctgcggtttcaaggactagtagtgcttctcgtttcagcagcacaagctacatgtctgtccaatcagaacgcccaggaggaaacaagaaaatcagtgtctttacatccaaaatgcaaagcagacaaatgggcatatcagggaagaacatgacaaaaagcaccagcatcagtggagacatgtgctcactggagaagaatgatggcagccagtctgacactgcagtgggcaccttgggcaccagtggcaaaaagcggcgctctagccttggtgccaaaatggtagctatcgttggtctgtcacggaaaagtcgcagtgcttctcagctcagccaaacggaagcaggaggtaaaaaactaaggagcactgtccaaagaagtacagaaacaggcctggccgtggaaatgaggaactggatgactcgacaggcaagccgagagtctacagatggtagcatgaacagctacagctcagaaggaaatctgattttccctggtgttcgcttggcctctgatagccagttcagtgatttcctggatggccttggccctgctcagctagtgggacgccagactctggcaacacctgcaatgggtgacattcaggtaggaatgatggacaaaaagggacagctggaggtagaaatcatccgggcccgtggccttgttgtaaaaccaggttccaagacactgccagcaccgtatgtaaaagtgtatctattagataacggagtctgcatagcc

SEQ ID NO: 174695 - DNA, 3500 bp, Homo sapiens
  Payload ID: 14302
  Gene Symbol: RIMS2
  Gene Name: regulating synaptic membrane exocytosis 2
  ENST ID: ENST00000632716
  CDS Start-End: 137-3500
gtcgccttggattgaaggccattgatttgtatgtatttgtcccagcgctggaggctgccccagccgccgcgccggtgccgccgctgccagtggagttgcctccccgcttccctagggtggttcggctccaccaaacatgtcggctcctgtcgggccccggggccgcctggctcccatcccggcggcctctcagccgcctctgcagcccgagatgcctgacctcagccacctcacggaggaggagaggaaaatcatcctggccgtcatggataggcagaagaaagaagaggagaaggagcagtccgtgctcaaaaaactgcatcagcagtttgaaatgtataaagagcaggtaaagaagatgggagaagaatcacagcaacagcaagaacagaagggtgatgcgccaacctgtggtatctgccacaaaacaaagtttgctgatggatgtggccataactgttcatattgccaaacaaagttctgtgctcgttgtggaggtcgagtgtcattacgctcaaacaaggaggacaaagtggttatgtgggtatgtaatttgtgccgaaaacaacaagaaatcctcactaaatcaggagcatggttttataatagtggatctaatacaccacagcaacctgatcaaaaggttcttcgagggctaagaaatgaggaggcacctcaggagaagaaaccaaaactacatgagcagacccagttccaaggaccctcaggtgacttatctgtacctgcagtggagaaaagtcgatctcatgggctcacaagacagcattctattaaaaatgggtcaggcgtgaagcatcacattgccagtgacatagcttcagacaggaaaagaagcccatctgtgtccagagatcagaatagaagatacgaccaaagggaagaaagagaggaatattcacagtatgctacttcggataccgcaatgcctagatctccatcagattatgctgataggcgatctcaacatgaacctcagttttatgaagactctgatcatttaagttatagggactccaacaggagaagtcataggcattccaaagaatatattgtagatgatgaggatgtggaaagcagagatgaatacgaaaggcaaaggagagaggaagagtaccagtcacgctaccgaagtgatccgaatttggcccgttatccagtaaagccacaaccctatgaagaacaaatgcggatccatgctgaagtgtcccgagcacggcatgagagaaggcatagtgatgtttctttggcaaatgctgatctggaagattccaggatttctatgctaaggatggatcgaccatcaaggcaaagatctatatcagaacgtagagctgccatggaaaatcagcgatcttattcaatggaaagaactcgagaggctcagggaccaagttcttatgcacaaaggaccacaaaccatagtcctcctacccccaggaggagtccactacccatagatagaccagacttgaggcgtactgactcactacggaaacagcaccacttagatcctagctctgctgtaagaaaaacaaaacgggaaaaaatggaaacaatgttaaggaatgattctctcagttcagaccagtcagagtcagtgagacctccaccaccaaagcctcataaatcaaagaaaggcggtaaaatgcgccagatttcgttgagcagttcagaggaggaattggcttccacgcctgaatatacaagttgtgatgatgttgagattgaaagtgagagtgtaagtgaaaaaggagacatggattacaactggttggatcatacgtcttggcatagcagtgaggcatccccaatgtctttgcaccctgtaacctggcaaccatctaaagatggagatcgtttaattggtcgcattttattaaataagcgtctaaaagatggaagtgtacctcgagattcaggagcaatgcttggcttgaaggttgtaggaggaaagatgactgaatcaggtcggctttgtgcatttattactaaagtaaaaaaaggaagtttagctgatactgtaggacatcttagaccaggtgatgaagtattagaatggaatggaagactactgcaaggagccacatttgaggaagtgtacaacatcattctagaatccaaacctgaaccacaagtagaacttgtagtttcaaggcctattggagatataccgcgaatacctgatagcacacatgcacaactggagtccagttctagctcctttgaatctcaaaaaatggatcgtccttctatttctgttacctctcccatgagtcctggaatgttgagggatgtcccacagttcttatcaggacaactttcaataaaactatggtttgacaaggttggtcaccaattaatagttacaattttgggagcaaaagatctcccttccagggaagatgggaggccaaggaatccttatgttaaaatttactttcttccagacagaagtgataaaaacaagagaagaactaaaacagtaaagaaaacattggaacccaaatggaaccaaacattcatttattctccagtccaccgaagagaatttcgggaacgaatgctagagattaccctttgggatcaagctcgtgttcgagaggaagaaagtgaattcttaggcgagattttaattgaattagaaacagcattattagatgatgagccacattggtacaaacttcagacgcatgatgtctcttcattgccacttccccacccttctccatatatgccacgaagacagctccatggagagagcccaacacggaggttgcaaaggtcaaagagaataagtgatagtgaagtctctgactatgactgtgatgatggaattggtgtagtatcagattatcgacatgatggtcgagatcttcaaagctcaacattatcagtgccagaacaagtaatgtcatcaaaccactgttcaccatcagggtctcctcatcgagtagatgttataggaaggactagatcatggtcacccagtgtccctcctccacaaagtcggaatgtggaacaggggcttcgagggacccgcactatgaccggacattataatacaattagccgaatggacagacatcgtgtcatggatgaccattattctccagatagagacagtcattttcttactctacctcgctccagatacagtcagaccattgaccatcatcacagggatggcagggattgtgaagcagcagatagacagccatatcacagatccagatcaacagaacaacggcctctccttgagcggaccaccacccgctccagatccactgaacgtcctgatacaaacctcatgaggtcgatgccttcattaatgactggaagatctgcccctccttcacctgccttatcgaggtctcatcctcgtactgggtctgtccagacaagcccatcaagtactccagtcgcaggacgaaggggccgacagcttccacagcttccaccaaagggaacgttggatagaa

SEQ ID NO: 174696 - DNA, 3073 bp, Homo sapiens
  Payload ID: 14302
  Gene Symbol: RIMS2
  Gene Name: regulating synaptic membrane exocytosis 2
  ENST ID: ENST00000507677
  CDS Start-End: 1-1112
gaagtgtacctcgagattcaggagcaatgcttggcttgaaggttgtaggaggaaagatgactgaatcaggtcggctttgtgcatttattactaaagtaaaaaaaggaagtttagctgatactgtaggacatcttagaccaggtgatgaagtattagaatggaatggaagactactgcaaggagccacatttgaggaagtgtacaacatcattctagaatccaaacctgaaccacaagtagaacttgtagtttcaaggcctattggagatataccgcgaatacctgatagcacacatgcacaactggagtccagttctagctcctttgaatctcaaaaaatggatcgtccttctatttctgttacctctcccatgagtcctggaatgttgagggatgtcccacagttcttatcaggacaactttcaataaaactatggtttgacaaggttggtcaccaattaatagttacaattttgggagcaaaagatctcccttccagggaagatgggaggccaaggaatccttatgttaaaatttactttcttccagacagaagtgataaaaacaagagaagaactaaaacagtaaagaaaacattggaacccaaatggaaccaaacattcatttattctccagtccaccgaagagaatttcgggaacgaatgctagagattaccctttgggatcaagctcgtgttcgagaggaagaaagtgaattcttaggcgagattttaattgaattagaaacagcattattagatgatgagccacattggtacaaacttcagacgcatgatgtctcttcattgccacttccccacccttctccatatatgccacgaagacagctccatggagagagcccaacacggaggttgcaaaggtcaaagagaataagtgatagtgaagtctctgactatgactgtgatgatggaattggtgtagtatcagattatcgacatgatggtcgagatcttcaaagctcaacattatcagtgccagaacaagtaatgtcatcaaaccactgttcaccatcagggtctcctcatcgagtagatgttataggaaggactagatcatggtcacccagtgtccctcctccacaaaggtaagatagactacttattttatttgtagggtggctgtattagtcagtgttctccagagggacaaaactaataggatatatgtatatacgaaagggagtttattagggagaattggctcatatgattataagacaaagtcccaccatagaatttctgcaagctggggaagggagaagccagtagtggcttagtccaagtgtgagtccattttgaaaggcttaaaaccagggaagctgacaggacaggcttcagtctgtggtcaaaggcctgagagccaccagcaagccactggtgcaagttccagagtccaaaggccaaagaacctagtgttggatgtccaagggcaggaagagtgaaaggaatcatccagcacaggaaaaagaaagaagccagaaaacttagcaagcaaggttatcccaccttcttcacccgctttgttccagctgcattggcagccgactggatggtggattgggtgagtcttcctctcctagtccacatattcaaatgtcagtctcctctggcaacaccttacagacacatctagaaacaatactttaccagcctaggcttccttcattccattcaagttgacacgtaatgttaatcatcaaaatggcattacagacctatttatcacatatcggtaataatctctaaagataagagattcttgtggaaaaagaatttaaggaaagcaagatggttttgtttatttaaggaaaaacaaaatgctattcaaggaaaaacaagatgctatacaataacctatgtaacgagagtaaaatgaaacatgacttgttttgtaattttagacaacctatatgttattttattgtaagagttcaaaataattcagaagaaccagttttcaatcacatattgatatgagtatatctaggtagaaccaactaattatactcatgaatgatatagataatcggtaatttaatatataggaaataatgaaaatctgactgatatttaaaattagtaacaaatatcagaatactaatttttttctttttctttttctttttcttttttttttttttttttgagacagagtcctgctctgtcaccaggctggagtgcagtggtgcgatctcggctcactgcaacctccgcctcctgggttcaagcgattcccctgcctcagcctcccaagtagctgggattacaagcgcacaccaccatgcctggctaattttttgtatttcagtagagacggggtttcaccatgttggccaggatggtcttgatctcctgacctggtgatccgcccaccttggcctcccaaagtgctgggattacaggcgagaataataatttttaaaagcatgtgcagtgggaagaatggctcagaaaatctgcagctacaggtcttaagcttactggaaatctctgatcaacctggttaagtacagacaagcttaatggaataagaatcacggaaataatagttgaagctaacaagaaatatgtgcataatttacattgtacatacttggaatgtttaagaaattttgaccagttagaatgacacacttatacatcctattttaaataaatgattatttgacttagaattttaattgagtcttaattttacacagaatattggaatgtctaagacagctttagatttattatgtttgaaggatataagacactaaaataagatttatgtaacttagacaattgcagaaattaaacaatatctgacatattaagttgacaaacatggtttaaagtgtttgaagatgttgaattaacaaagtttataaatgggaccaaaattattaaacattttttaaaagtacttaaatgtgatacacttatcaatagaataacgtgtaatctgaaatttaaagtttgagaactagttttaaatttgtaactttaataaattgaacccttccctcctctaggaaaataaaagaatacctatgtaaaaggaaaaa

SEQ ID NO: 174697 - DNA, 1408 bp, Homo sapiens
  Payload ID: 14303
  Gene Symbol: RIMS3
  Gene Name: regulating synaptic membrane exocytosis 3
  Uniprot ID: Q9UJD0
  ENST ID: ENST00000372683
  CDS Start-End: 179-1105
gcctcggcctgtggaggccccctccctgtctggaccccggccccacctccggaagtcaattgaagccttgtgcaaatgccctaggggtgtgctgttgggaggcagccccctgtgatgcggaacaccaggctcagattcatcagttcgagctgcctgaggccctgccaccccggggaccatgtttaacggggagccaggtcctgcctcatctggggcctccaggaatgtggtgcggagctccagcattagcggtgaaatctgcggatcccagcaagccgggggcggggctgggaccaccaccgccaagaagcggcggagcagcctgggtgccaagatggtggccatcgtgggcctgactcagtggagcaagagcacactccagcttccgcagcctgaaggggccaccaagaagctgcgcagcaacatccgccggagcacggagacaggcatcgcggtggagatgcggagccgggtcacacgccagggcagccgggagtccaccgatgggagcaccaacagcaacagctccgacggcacgttcatcttccccactacccggctaggggctgaaagccagttcagcgatttcctggatgggctgggaccagctcagattgtggggcgacagacactggcaacaccacccatgggagatgtgcacattgccatcatggaccggagtggccagctggaggtggaagtgattgaagctcggggcctgacccccaaaccaggctccaaatccctcccagccacctatatcaaggtttacctgctggagaatggggcctgcttggccaagaagaagacaaagatgaccaagaagacctgtgatcccctgtaccagcaggctctgctctttgacgagggaccccagggcaaggtgctgcaggtgatcgtctggggagactatggccgcatggaccacaagtgcttcatgggcatggcccagatcatgctggacgagctggacctcagcgccgcggtcaccggctggtacaaactcttccccacctcctcagtggcagactccacactcggatccctcaccaggcgcctgtcccagtcttccctggagagtgccaccagcccctcatgctcttaaggatgtcaggaagaggccaggatggtggtgtggggaggggtgcctgctggccccatgtcctcccctgtacatagtcttcgtgtctttctggaccccttgtcctgctgcatgcctgttggctactgggctcatcccagctggcagtggagactgtagtgtgtgcgtgtgtgcgtgcgtgtgtgtgtgtgtgtacgtgaccacgttctatctgttcatttgtctgggtatagtcactcctggtgatgatatgggctgaaatgtctccacgtctctttgtgtcttgttgaaaagaaacccaaagga

SEQ ID NO: 174698 - DNA, 7235 bp, Homo sapiens
  Payload ID: 14303
  Gene Symbol: RIMS3
  Gene Name: regulating synaptic membrane exocytosis 3
  Uniprot ID: Q9UJD0
  ENST ID: ENST00000372684
  CDS Start-End: 471-1397
acggtggctgctgcggagccggcagcgcaggcgggcggagcggagctgcccccgtggtggcgggcgatgcccccgtgagcctccctcgccgcccctccccgccccgcgtgcctatccactcggagtccgcgccagcctggggccgggccgcgcctactgccgggttcgcggggcggggtcccggggcagcacctgccccgccttgcggagccgcctcggcctgtggaggccccctccctgtctggaccccggccccacctccggacccttttatcacatcgcctcctctgggagcctgccctgattgccttcacctcatttcttgaaaattggtgttttggcagaagtcaattgaagccttgtgcaaatgccctaggggtgtgctgttgggaggcagccccctgtgatgcggaacaccaggctcagattcatcagttcgagctgcctgaggccctgccaccccggggaccatgtttaacggggagccaggtcctgcctcatctggggcctccaggaatgtggtgcggagctccagcattagcggtgaaatctgcggatcccagcaagccgggggcggggctgggaccaccaccgccaagaagcggcggagcagcctgggtgccaagatggtggccatcgtgggcctgactcagtggagcaagagcacactccagcttccgcagcctgaaggggccaccaagaagctgcgcagcaacatccgccggagcacggagacaggcatcgcggtggagatgcggagccgggtcacacgccagggcagccgggagtccaccgatgggagcaccaacagcaacagctccgacggcacgttcatcttccccactacccggctaggggctgaaagccagttcagcgatttcctggatgggctgggaccagctcagattgtggggcgacagacactggcaacaccacccatgggagatgtgcacattgccatcatggaccggagtggccagctggaggtggaagtgattgaagctcggggcctgacccccaaaccaggctccaaatccctcccagccacctatatcaaggtttacctgctggagaatggggcctgcttggccaagaagaagacaaagatgaccaagaagacctgtgatcccctgtaccagcaggctctgctctttgacgagggaccccagggcaaggtgctgcaggtgatcgtctggggagactatggccgcatggaccacaagtgcttcatgggcatggcccagatcatgctggacgagctggacctcagcgccgcggtcaccggctggtacaaactcttccccacctcctcagtggcagactccacactcggatccctcaccaggcgcctgtcccagtcttccctggagagtgccaccagcccctcatgctcttaaggatgtcaggaagaggccaggatggtggtgtggggaggggtgcctgctggccccatgtcctcccctgtacatagtcttcgtgtctttctggaccccttgtcctgctgcatgcctgttggctactgggctcatcccagctggcagtggagactgtagtgtgtgcgtgtgtgcgtgcgtgtgtgtgtgtgtgtacgtgaccacgttctatctgttcatttgtctgggtatagtcactcctggtgatgatatgggctgaaatgtctccacgtctctttgtgtcttgttgaaaagaaacccaaaggagtgttgtgtggacatgactcaccctgaggagtctccagggatggaggtggggcatgcggccactggtcggtgctgcctggtcctggcctggggcagagcctgtgtgttcttcacctgtgcctgctcctggtggtctctgctttgttttctgtcttgtcttttgttccactcttgactctcccggctctgccactgttttctgagaaatgtagcatccgctgcagctggccacactgagggccctctgggaaccccaccccactggagccgctccggcagctcttcctgccactgaatgcgttctgcagcatgtagcatgcccacctagctccctggccagggccctggggaggcagagggtacccaggggactgagggcttagaaatgactttctctatgaggctggaacctcctccttcttccagtgaagcacgaggtcttggttccagggttcctggccaggtgcccccttagcatttgttcttcatctcctgtctcttcaagcctccccactccaccgtgccgaaggagctctgccagtgggcctgggcaggcagccacagagggcatgttatctgctaaagcaaacagtcctcctgaggccctgagggtggccctgaccccctcagggctcattcctggtgggcatgactcggtaaggaggttctgtgggtagggctgtttgctggaataaggagggctgaggctgagttgttccccgccactgttgaggatcccatctgacatttggggattcactgcatgaagttgttcatttggggctccagtttttgtgcatttccagaccagggtccctgtctgggagctcagacttagctgggctccagcagcctggctccggactctcgtctgccaccatcaccagctctgtctaagcaatacttacccctccgggcttccctgctttcctgtgccccactgctgccctctgcagagccatctgctccaggcacccacctgcctctgcttgctttctcacccatgtctggttggagcttctcacagccactcaaaccctgacttgatttgacaactgggccctgttggtggagaccagtgcctgaactggaccctgtgaaatctgtcccgtgggaatcctgaagtctgactcaggaatgcccagacctgtccctgtccctcctcagctctagggtgaaaggcgagaggttgcacaggacatggacagagcagcccttgggtttgtatctggtaggggagaaagcagcaggacagtggaggtgtgtggaaggcactctttccacctctctccaggcattatccccaggtgctgaaatggctgtggccccagcacctgaggcaggggtacgctacctggggtagcagtagaaaggtcttggggtctgaatgacttggggcctccattcataaccaaagttgtaggggcatggaggcagtggcgccttatggataggtcatctcagcccaaagggcctccttggctggcatggttctgtgttacgttgaagccagagtcttataacacctcccaagaaagataggggaagaagccagaaccccacctggcctgcccacaggacaagaagtgggtaagggcaggaaggaaatgaacggagttagctcccaggctcctatctctgcctgagcctctattcttatattatcagagaaagggaccattgggtgcatagagatggggaggaggccactgggctgaattttctctttaggcggaaatgctctccccaggcccattgcgttcgtcaagttcttggaaatggacaaagggctctgtcctcctcgaccctagtgggggatcaagaaggaaactccgttgcaaaagggtattttaatctcctgtttatgatatattcacctctagagcagtcactgtcagggtgttgcgaaaatactctacacctttgggatgatagggttgttagtgacccacaggacagtatagatgtttgtggatgtagcactgagtggtgatacccagaccagcagtcaccccaggaagtgggggctacccataccctcattcctctggtggggagctgcctgcagagaggcctgccactgggggttccaggccgtggtgacccttgcctctggggaagggttagcacaggggaggttctagctggaggaggggtctgatgtgctggtaacttgggctgacctacctacagtccctggctgccaaaactgctcagcagttgggccactccactattccacctctctaaaagaaggtaatttcctccccaaattgaccttggggaattattcttttaaccctttgcaccaaataagttactcatccccacctggattttaccccatgagggtaaagttgtgtgaggctgacacgtctgtgtgatgcagtgtggctgcacttaagggtctgtttctcagcatcatggatgcaggggcttgtctgaaaagccactctggacctagcctgtcccagaagaggagaatgcacaagtgtaactcctggttgtttgctggggtgggggagcatctgctgtttgaggacggggggtggggaaggaaggaacatgatccctccagaagtctcccaccctggggccaactcactgccatgttcagtgtcccggctccaaatgcccccttgcccagatgaaaccctgcagtggttacaggaatggagctctttgtcattccacctcctctggtcaggcgaggttcactgtgcatatggcagagacaggagtggccctgcagtgatgttgggttgtgggcagggacagtgatggatgactcagagcgtctgtctttgtatttctgctctgttcattctgtcccactttcttcatagactccttttccctgcaatgggtttttggtatgaaaaaggctccagtaaatggagccaagtcttggtttgacaaggggaacttgatccttcagggaagaatcatctccaaaatgactccccatctggtttcttctaccacccaattctactaggaaaggagcacttaggaggctcttgggatgcagcaagtcccaggcaatgccagcatttcatgggggctgaggcagaacccaggagctccaagaaaggccacccatagagctcatcctctgtggaatcactgccggttagaacactgaggtcaagccagtcctcccatggtcatgccacccaccagggaagcatgcctgatctcttctttactgccagccttgaggagagcagaagcctccatttttaaagacaataaagacctccaagggtacttctttggaaatgaaatgtagcacaatcttagcctacgttaccaggagccctgacatgcaaccagggtccctcttccatgccctgctgcccaggagttgctgagctcctcttcccctggggttccagccctcctaatacctcatattccccatcttcctcagcccagaaagcaatggggctttagtgatgctcctcttttgtgtctctctggttgcctctagcactgtgcaaactctgcaagaaattgctgcctttgcttgatgttgtagatgagttgccctccacctggctggagagatggcacatcattcagggccagaaggttgtccagcagtgtttctgcagtggctgcagggagatggaaaagaagagccctgcttccctgcctcctcctacctttctcttccactcctcagagttttcttctccagtatcctgacatgtaaagagattctttaaaatgctgcttcttctactggactgtctttcactgagtagtcagggaggagatgaaaatgtggacacatccccccgccttctccctcaaccttttcactcacgtcagaagaggttggggcaaaacaaaacaagcatgattgaagagcaggggaagcccacacaatcaggtgagccctgatgggggctggactggcctggtctggctgggaaaggattcttttaaaagcgtgcctgagcatctcagagcaatgtcagtgatgccaaagagagcaacttggcctccttgggcaccaactctgatggctgagttgcacaaacgtggctcagatgttggcatgcccgatggtgggaccttgttctctgataaagggcttaatctttccatgtagcaaagcaactttccctccctcccctccccccgaaccctgagcttgggcttgtgtgggcccagcatggctgtgcctgtgagggaagccacatcagtgagagaaagttgcattctctcaggggcctagattggcttggggcaggtgcttgttgaaaagcatgagtgtttctgctttgggaaacccttccagggctctggttggaaacttggccagtaaggacagggccttgggcctcccaaggagttcacaatgatgccaggaagggtccctgagcctgggttccagtcagcttggctaacagaatggggcttgggaattccaggggcaactgagcatccaccccattagccagtgatctggacagggacagctggctacagggaatcaaaggctgttctgtacagttttaccagaaactgtgaccttgggtaaggctcctcacttttctgggcctcaacttcctcatctgcaaaatcagagcattagctgctctccccatgattccctcccagttttaattaaaagtctctgatctggagcacatgagggttgcgagcctggtgcacctggttcctgtctccgtgggctggtttccttcagcccctgatgcccaggctgggtgcaggctctcatctggtccatgcccagatgctgcctcagacaagaactctgggaatcctaacagactctgctttcctctcttcgtggtttgtcctccctcttttattcttgtgtaatgatgagacataattaagggtcatctacaatggacaattttcaaggtgctgatgtgatgtcacaacctccgctacatcctgagtaagtcagtgtccccaacagcagatgaggctgggtctttcctcatttctgcttctgggatgacatcagtgggagagttgaagatctgagaattctaaaggaaatgttctctgatgggaggagagagggaacttatttcccttcaaagtagtttgcttcttaagaccactcctccctccagaatgtctttaaccagacatcatttcagaaggtggggcagctgcttccttaggaagagtgggcctgatagctcaaccaactcctttagcatgtaaactcacagaaggcaagaacccctttttttagactttccaaatgcatcctgcaaagagagagatagctgatagggactgacaagcacactgtttagataagaagcaattagccttttatatctgtgctctatacattttctatgtgcagcatctttcctaacttgttgtggttcccgggtggcaggtgcacagctgggagggactgccggctgtttcgtacaacattcttgccaattcccttgaggagaaaattcttcacatggcttctgcatgtacagtatttgggcagcaaaacatgattaaagtcagtttgaaaatggt

SEQ ID NO: 174699 - DNA, 5203 bp, Homo sapiens
  Payload ID: 14304
  Gene Symbol: RIMS4
  Gene Name: regulating synaptic membrane exocytosis 4
  Uniprot ID: Q9H426
  ENST ID: ENST00000372851
  CDS Start-End: 68-877
caagctgcccaagccgcccgccgccgccgccgccgccgcggccgaggcgcccggcgccggcgcgggcatggagcgctcgcagagccgcctcagtctgtccgcctccttcgaggcgctcgccatctacttcccgtgcatgaactccttcgacgacgaggacgcaggggacagccggaggctgaagggggccatccagaggagcacggagacgggcctggcagtggagatgcccagccggacactgcgccaggccagccacgagtccattgaggacagcatgaacagctatggctcagagggcaaccttaactatggaggagtttgcctggcgtcggacgcccagttcagtgacttcctgggaagcatggggccggcacagtttgtgggccgccagaccctggccaccacacccatgggggatgtggagatcggtctgcaggagcggaacggtcagttggaggtggacattatccaggctcggggactgacagccaagccaggctccaagacactgccagcggcctacatcaaggcctacctgctagagaatggcatctgcattgccaagaagaagaccaaagtcgctcgcaagtcgctggacccactgtataaccaggtgctgctgtttcctgagagtccccagggcaaagtcctccaggtgatcgtgtgggggaactacgggcggatggagcggaagcagttcatgggtgtggctcgcgtgctgctggaggagctggacttgaccaccctggccgtgggctggtacaagctcttccccacctcctccatggtggacccagccacaggccccctgctccggcaggcatcccagttgtccctcgagagcaccgtggggccctgcggagaacgatcttagtgctggaatggggaggggctccccaagatggcctggagaccacccagccctgacctgggaccccaggcccaggggcacattgaacaggaggacggggctctcccccacagtggggaagcagaacggggagacctgcccccccttgggcccctcctcaccccttctttgcctcctacccccgagacctcccctctcccaacgggattggctacacttttgacttggccggttcttgacctggtggatgtggctgcagtccagagaaaggaaagattgaggtggcagagcagaccactctcccttcccaaactgtccaacttctccccctttttgcctcctcggaagctcgctgcccagagccatgtccagaacccagccggccatctccatggtgccaattaccagcaagtgtctttcctgcggcaccgggttcaggcagctactcctgccccagagatgaaggggcagctttgcaaggatccggagccagctcccaggggcccagagccccccacttgaagaggagcttgagcttccctctgcctgcccgtggaaggagctttgccgcagcctgtccgagtccatccgtccgtcccctcctgcctgcccctcttctggtggctctaggaattggggttcagcagggaccaaaggaaaggaggaggtgccgggggcctggcacagacccctaggtgcctcgctccatgggattgcaacaagctagtttaggaaccgctggcggactagaaagaatgttgtcgtctgtgttccggtggaggagctgtggaacctgagtttccagaaccccaaccctagagagcatttgggggtgctgtattggagggggaggctaaggaaagttgggattgggactggtggtgccaagataagggtttctcaaattggagaacccctccttgttgcatgaggtcaatggtcatcctgtctacccaccctgcctccaggccagggggctggggaggcaaatagagcccccctattttagtctttttaaaaaaaacatcctatactaagggcagaacccactgccccggcctcaattaccttggctgaaggaaagatggcggtaggagagaaaagtgaagaggcgtgagtgtaagaactgggagattccttttccagcaggcctgggtagctgccttcccagcccagccctccctggggcctgcgggagcccttttgcatgcaagggaggatggaggctggcccctctttatagaagcacatttctgccacctcccctgggaggcacccagaagcctgccactctttacctagtccctgctgtgtagggcgtagtccaggttagctaggtagagttagtgctccaagccctggggcctgttcttagctcatgcatagtccttacagagtcccaggaccgggggtggagaggagcctcaagtacattccaggagaccactgtctcctcgctggcctgggcctagatggggcagcctggctcacaggaggccagcccctcctcctccgcccccttccttcccttgtccccgtagggttatagctggagctgcctgttatactcggctgttctgatttattattcttggtactgactttctttatgagggactcctaagggttgtaggaccttggcagagggggcctggtctccattagagggtgttgttttctcctgaggacacccaggctgcctttggtcccaccctgttcctggtcccggtcccggtcccagtcccaccaggcaactccttccacccggaaattcttcccttcccttagcctgtggaaaccctgggtattctttaaagttctggtcaatgtatatcacctccacagagctgcttaccctgcactgggaaggggagatggagacgccccctttacccaggaggtcttcagagtttcctgggaccgcggtgggtggaatcccaaggctgggggtggaaggagcagggctctggagggattcgcattcaaggcacagaattggccccttgcctgtttgtttttctaaccagtgtgatttctctgctgttcgtttattacttaccattggaatattttgagccaggagagcgccttctctctccagccatcaccgctgtggttgttcaggggtagcttttcaaaaacagggcagagcctggctgtcccaaccagggggagcaggggcttggccctgacagcctgagcccttcccctggtgtctgcacagcctttataaagagagagagagctccgaagcaataacaacacctgggggtggtcagtgagggccccctcaatgattttcttgtttgttctgtgaaatcccgctcacctcctggaggggtggagcagctgggggctggagccctgtttctttgtgtcatcgtgagcatgtgccccttcccaggggctgtgaccattgggtgtgggaactacggtctgtcctcaccaagggatgggggtttggggaggagagtgacattttcatcattagcttcggagaagcttcaagcccatcctgtccccgctactgcctggccccttgctgactcaggctgcactgtttgaagaggagcagagaggctggcactaggggccactggggggctggggtctccaggggatgactgttttcaatctctgggccaagatcacatgcaggataccatgggaaggagccatctccactctccttctccagaacccccttgaagggcctttgggaccattagtccatttccattttacagacaaggaaatcaagacccagcttgggggaaaagccacccctggagtcacctgtgtgttcagtggcacccccagcctgggtcccctcctcccaatagaggctgagccggagccagggcagtatgaggtggggctgccactgcccatacctcctcctcccttctttctttgaagcctaatggccccccaaaagatgggcaggacaagctgtagcccatctgagaggttgggaaactgaggcccagaaacaggaagtgactcacacaagacccctcagcaagggtgcaaagggggaagaactaggggctccattgttcttcaggcgacaggagaccgttgctccagtgcatgtctgctgggacaaggattcctggcctcgaagccctgggctgcacagccctactgggctccacctctataaaccagtgacttctctgggcctgggtctgggggagagggttgccagggagactcagctctccttgggggctggcccagctgactgagggtacacaggattgggtctagaccttgatgcctgggtggagggcccttgtaaggggccatagcctcttcaggaccaactggagggagagttaggaaacaccagctcctgcctggggcagtgagggaatgggagcagctgtgggcgcctcatttcaggcaagtcctccccaaaccttcagatgcagtgagacctggccttcctgttgtgcttttcagactttgttttcagaatgcttttatctcgagtgtgcccttcggccctcacaagagcccctggggagtaggtggtggcctgtgccgtcatccccatttcaaagcagggagctgaggtcctgggaggggaaagtgcttgcctgaggtcccactgtgttagtgggtgggcaggactggaactcggttctccaacagcccagagctcactcttttacacccagaggtggagcaggtggcttagggggtggttatgtacttcacaagccaattcccttcagccaggagctcctgggtgcatttccgtgtcagaaacagtaccgagtcccaccccctctggaggcacagctgttgcgtcaggcaaggtcacctgcatttatttattgagcagcagtgctgtgtcaggcccagggaccgagcccctctccctgttcccctatggtgtctccgaggccctctgggagggccccacatctggagcagcacctcagagtggacagaaagcattagcgtccacgagctcacccgacgccgagcctgtgaggtgggctgatggtgcccgtctaacccagcgcttcagggaggtcagaatggagccgaacccagggctgtgagcatcacctctggagccctttcactttatgactgcttcctggacgggtggtgggaaggcaggagcctgggtccttaggctgggggcctctctccatccacccacctttccctcattccctctcttggagcagcagccgcccaggcctttagggagggagggtttctggggcccttgggttggagtggggtcgcgttgcattgtgttcatgaccatgtagctcatgttgaaattaaagtttttggcttttctaa

SEQ ID NO: 174700 - DNA, 1036 bp, Homo sapiens
  Payload ID: 14304
  Gene Symbol: RIMS4
  Gene Name: regulating synaptic membrane exocytosis 4
  Uniprot ID: Q9H426
  ENST ID: ENST00000541604
  CDS Start-End: 1-813
atggagcgctcgcagagccgcctcagtctgtccgcctccttcgaggcgctcgccatctacttcccgtgcatgaactccttcgacgacgaggacgcagaaggggacagccggaggctgaagggggccatccagaggagcacggagacgggcctggcagtggagatgcccagccggacactgcgccaggccagccacgagtccattgaggacagcatgaacagctatggctcagagggcaaccttaactatggaggagtttgcctggcgtcggacgcccagttcagtgacttcctgggaagcatggggccggcacagtttgtgggccgccagaccctggccaccacacccatgggggatgtggagatcggtctgcaggagcggaacggtcagttggaggtggacattatccaggctcggggactgacagccaagccaggctccaagacactgccagcggcctacatcaaggcctacctgctagagaatggcatctgcattgccaagaagaagaccaaagtcgctcgcaagtcgctggacccactgtataaccaggtgctgctgtttcctgagagtccccagggcaaagtcctccaggtgatcgtgtgggggaactacgggcggatggagcggaagcagttcatgggtgtggctcgcgtgctgctggaggagctggacttgaccaccctggccgtgggctggtacaagctcttccccacctcctccatggtggacccagccacaggccccctgctccggcaggcatcccagttgtccctcgagagcaccgtggggccctgcggagaacgatcttagtgctggaatggggaggggctccccaagatggcctggagaccacccagccctgacctgggaccccaggcccaggggcacattgaacaggaggacggggctctcccccacagtggggaagcagaacggggagacctgcccccccttgggcccctcctcaccccttctttgcctcctacccccgagacctcccctctcccaacgggattggctacacttttgactt

SEQ ID NO: 174701 - DNA, 1850 bp, Homo sapiens
  Payload ID: 14305
  Gene Symbol: RPRD1A
  Gene Name: regulation of nuclear pre-mRNA domain containing 1A
  Uniprot ID: Q96P16
  ENST ID: ENST00000357384
  CDS Start-End: 153-1091
ttgctggtttgcggccggtcttggatgaagcggcggccgtggtgagagcgtggggaagggtggggtgagggggcgaggccgcagctagggcggcgaaactctcctcccctcggccccaccgcgtgggacggcgtgaacgtggtgtcggagggatgtcagccttctctgaggcggcgctggagaagaagctgtcggagttgagcaactcgcagcagagcgtgcagaccttgtccctgtggctcattcaccaccgtaaacactcgcgtcccatcgtcaccgtgtgggagcgggagctgcggaaagccaaaccaaacaggaagcttacttttctctacctagccaatgatgtcatacagaacagcaagaggaaggggccagagtttacaaaagattttgcaccagttatagtggaggcttttaagcatgtttcaagtgaaactgatgaaagttgtaagaagcaccttggaagagtgttatctatttgggaagaaaggtctgtttatgaaaatgatgtattagaacaacttaaacaagctctgtatggtgataagaagcctaggaagcgaacttatgaacagataaaggtggatgaaaatgaaaactgttcctctctgggatctccaagtgaaccaccacagactctagatctcgttagagcattacaagatctggaaaatgcagcctcaggtgatgcagcagttcatcagaggatagcttctttacctgttgaagtccaagaagtatctctattagataaaataacagataaagaatctggagaaaggctttccaaaatggtagaggatgcgtgtatgttgctggcagattacaatggcagattggcggcagaaatagatgatagaaagcaactcactcgaatgttagcagattttcttcgttgtcaaaaggaagcccttgcagagaaagagcataaattggaagagtacaagcgcaagctagccagagtttccctggtgcgcaaagaactcaggtcccggatccagagcctgccagacttatctcgattgcccaatgtcactggcagccacatgcacctgccctttgcgggagacatctacagtgaagattgatggaccagcctctttccaggtcccaggactttgcaagagatggagacagtgcagagagctgtctggagtcacaatctgaacagattctcgggcgctccttctctccttccatcactacagtaagtaaaaggaccatagaggggaaccaggaatctgagaatcagctgtgctcaatagccaacctccctgtccagatgcagctattttggtatctcctatcacatgcactctgaatcagggtttttctataagaaatctttcagaatcagcaaaagtggggatgacccaggcatcttgatttgcaaaatcacaaaactaagttgtcagttatcactgtagatgagcaactcatctttttaaagtatagttactgaactgattctgagaaatctttagagagaaaaaactcaacagtacaaattaactaattgggaaagttagaatgtcctttctgaatttttcattaaaaaaattacattatctgaaataacataaagctactaaactgctttgtattctattaagaaatagctcctaaggatgtagtcttgtttcatagttgttgcactatatcaaaacttaaaatgtaagcccagttcttctctgtatagaaaggaaacattgtgttacttaatgaattatttatacagagcatttgttgccaactgttgttccagccatccacacaggagtctgttctgaggtggcaatagcacatgggaagatgaactttccctgtttgtttacccgttcttcttt

SEQ ID NO: 174702 - DNA, 4438 bp, Homo sapiens
  Payload ID: 14305
  Gene Symbol: RPRD1A
  Gene Name: regulation of nuclear pre-mRNA domain containing 1A
  Uniprot ID: Q96P16
  ENST ID: ENST00000399022
  CDS Start-End: 173-1111
actgccggccggacgccatcttgctggtttgcggccggtcttggatgaagcggcggccgtggtgagagcgtggggaagggtggggtgagggggcgaggccgcagctagggcggcgaaactctcctcccctcggccccaccgcgtgggacggcgtgaacgtggtgtcggagggatgtcagccttctctgaggcggcgctggagaagaagctgtcggagttgagcaactcgcagcagagcgtgcagaccttgtccctgtggctcattcaccaccgtaaacactcgcgtcccatcgtcaccgtgtgggagcgggagctgcggaaagccaaaccaaacaggaagcttacttttctctacctagccaatgatgtcatacagaacagcaagaggaaggggccagagtttacaaaagattttgcaccagttatagtggaggcttttaagcatgtttcaagtgaaactgatgaaagttgtaagaagcaccttggaagagtgttatctatttgggaagaaaggtctgtttatgaaaatgatgtattagaacaacttaaacaagctctgtatggtgataagaagcctaggaagcgaacttatgaacagataaaggtggatgaaaatgaaaactgttcctctctgggatctccaagtgaaccaccacagactctagatctcgttagagcattacaagatctggaaaatgcagcctcaggtgatgcagcagttcatcagaggatagcttctttacctgttgaagtccaagaagtatctctattagataaaataacagataaagaatctggagaaaggctttccaaaatggtagaggatgcgtgtatgttgctggcagattacaatggcagattggcggcagaaatagatgatagaaagcaactcactcgaatgttagcagattttcttcgttgtcaaaaggaagcccttgcagagaaagagcataaattggaagagtacaagcgcaagctagccagagtttccctggtgcgcaaagaactcaggtcccggatccagagcctgccagacttatctcgattgcccaatgtcactggcagccacatgcacctgccctttgcgggagacatctacagtgaagattgatggaccagcctctttccaggtcccaggactttgcaagagatggagacaggttaggtggatagtcctgtagtgttatttttgtatattgttgagaaagaaacactaacaaaaggaacaacgagtaatttataaaattgtttaaaatgttggtttgtttactattttattggtaaattaacatgacttaatttgaacaaagtgatgatttgtgtgtattaataagctcacaaatagtgattattttcaaaagatctttttgtaaattttttttttgatccaaggccttgtgagaaatctcttgtttgtatttcttcaggtattttcaattgtttttctttattttcttcagcatttaatcactgtatactatgtaattcctgaaggggaagaactaattaggagttgattgagactttattatggtatagttaggacttgattgtagaagggactaaatgttccaacataatctttacccttctccccaaacaaaatatcaattctgtgtctctacatgcctttgattccttagaggtcggtaatttaacataaaacagggatgtcactttgaggggcagatgaaagtctagagaactgttccttaatagcattgtaaaagttccattccaactgccagtgtagattttaaaagtgttaaatagtgactcccttgattaaactgtttgtaattatttgagtagattaataatgaaaatactttggaaataatatacattttgacattctaccaagaggacaactttggttctggaactggtttctatttgtcaaatcagtttccttttaacataattaatccctttaacaaaaagccgtctatgggattaaaagacacgtgaaatgatacttttattattcccttgctcatataactttaaaaataatacttttagctctaatagctcaagaacacaatattcgttaatgttcagtaaagtagcctgagacattttcaatgtttccttaaggtttttgaatgactgtatatttggcagttaagcagtgccacactacagggtagatatggtaaattttatatttgtatatttacagttacaaaacaaatgtacttttaccttttatttctgaccctgtgtgttagagcagttgcatgctctcctgctgttaaaaacacattgttaagctgtggatttgtactcaataatgacttaggataaacatttattttcattcattgctttacatactagacatttttcttctctttgtaagtagattcaaattagatagtcaataaaacatcttgaaaatcccacaagccaattatgtctctctagtctgaatggcttcattgtttctttctcagtattagaaattatagttacaatgaattgcatatgaagaaggcagacatttatttttaatagccaagtagttctgcaaatagttcttttaacaatttgacctctctccaaaacagagacacatataagtagtgctcatccatgcactactaataatacatggcttattccaaagtttttagtcaacttttgggacttggggtgcattttctcacagaaagaatagtagttaggttccctaacactaccgctgatagctcacctgggaactgaatccacctaaccatgaatgtccttcacttgtaacgtggttcacaggttactaatcatagatcctgaccagcatttgtaacactgctctaactaggacacagcatgcagcagccacactcacaccctgggatgtctgtgtacctctgtccctaggtgtaggaaatggaagaaaaagattcagccaagtggggaggtgacagatgcacaattatgaaacctggttgtacatgttatgaaagtatactaagtaagttagtttttattattaatgtgaaagcaaaaacttgtatgttaacttattttcaatatcttgaccttatttatgatctgctaaagtggtgatttatccattcaaaatatatatttttttccatttaaaactaatttataaactatgtactcctgggaagatttgaaatcttttagaagtttgttgaaatattttcaccatttcagacagacttctgacttagatactgattttaatgccagtatctgctctaaatatttatgataaaaatgcattatttttttaaagagcttgatgagatttgtgataagtgatagtactcaaaaacctgaatcccacccctcgaccaatcctccacaaacttcagttgttggttaacgtattaactgaacacagacaatacagtctgatttagaagtcatcttttcagccgtgtgataattaacatggtaagccttagcagcaaacattcttcctaaaaggaagacttcattttctcaagaaatgggattagttgggggtattataataccaaattgtaaatcatgagcgttttctccactgtgcacctgaggcagatcatgcatctttgagtgcagtttggtctgacccctcaagagaaaagcatggtgccgtagggctgctatggtttgaatggatgccatcactcttttctccacatacagtgcagagagctgtctggagtcacaatctgaacagattctcgggcgctccttctctccttccatcactacagtaagtaaaaggaccatagaggggaaccaggaatctgagaatcagctgtgctcaatagccaacctccctgtccagatgcagctattttggtatctcctatcacatgcactctgaatcagggtttttctataagaaatctttcagaatcagcaaaagtggggatgacccaggcatcttgatttgcaaaatcacaaaactaagttgtcagttatcactgtagatgagcaactcatctttttaaagtatagttactgaactgattctgagaaatctttagagagaaaaaactcaacagtacaaattaactaattgggaaagttagaatgtcctttctgaatttttcattaaaaaaattacattatctgaaataacataaagctactaaactgctttgtattctattaagaaatagctcctaaggatgtagtcttgtttcatagttgttgcactatatcaaaacttaaaatgtaagcccagttcttctctgtatagaaaggaaacattgtgttacttaatgaattatttatacagagcatttgttgccaactgttgttccagccatccacacaggagtctgttctgaggtggcaatagcacatgggaagatgaactttccctgtttgtttacccgttcttctttggctgtatctgatgacagtataagatgttcttaataaagttttatgttctttttgaaatgtg

SEQ ID NO: 174703 - DNA, 1264 bp, Homo sapiens
  Payload ID: 14305
  Gene Symbol: RPRD1A
  Gene Name: regulation of nuclear pre-mRNA domain containing 1A
  Uniprot ID: Q96P16
  ENST ID: ENST00000588737
  CDS Start-End: 323-1153
atcttgctggtttgcggccggtcttggatgaagcggcggccgtggtgagagcgtggggaagggtggggtgagggggcgaggccgcagctagggcggcgaaactctcctcccctcggccccaccgcgtgggacggcgtgaacgtggtgtcggagggatgtcagccttctctgaggcggcgctggagaagaagctgtcggagttgagcaactcgcagcagagcgtgcagaccttgtccctgtggctcattcaccaccgtaaacactcgcgtcccatcgtcaccgtgtgggagcgggagctgcggaaagagtggaggtgcaacaaatgagaaattccaattggagattttgtcaaacaggaatttactccaaaccaaacaggaagcttacttttctctacctagccaatgatgtcatacagaacagcaagaggaaggggccagagtttacaaaagattttgcaccagttatagtggaggcttttaagcatgtttcaagtgaaactgatgaaagttgtaagaagcaccttggaagagtgttatctatttgggaagaaaggtctgtttatgaaaatgatgtattagaacaacttaaacaagctctgtatggtgataagaagcctaggaagcgaacttatgaacagataaaggtggatgaaaatgaaaactgttcctctctgggatctccaagtgaaccaccacagactctagatctcgttagagcattacaagatctggaaaatgcagcctcaggtgatgcagcagttcatcagaggatagcttctttacctgttgaagtccaagaagtatctctattagataaaataacagataaagaatctggagaaaggctttccaaaatggtagaggatgcgtgtatgttgctggcagattacaatggcagattggcggcagaaatagatgatagaaagcaactcactcgaatgttagcagattttcttcgttgtcaaaaggaagcccttgcagagaaagagcataaattggaagagtacaagcgcaagctagccagagtttccctggtgcgcaaagaactcaggtcccggatccagagcctgccagacttatctcgattgcccaatgtcactggcagccacatgcacctgccctttgcgggagacatctacagtgaagattgatggaccagcctctttccaggtcccaggactttgcaagagatggagacaggttaggtggatagtcctgtagtgttatttttgtatattgttgagaaagaaacactaacaaaa

SEQ ID NO: 174704 - DNA, 2357 bp, Homo sapiens
  Payload ID: 14305
  Gene Symbol: RPRD1A
  Gene Name: regulation of nuclear pre-mRNA domain containing 1A
  ENST ID: ENST00000585953
  CDS Start-End: 1-370
tgaaaactgttcctctctgggatctccaagtgaaccaccacagactctagatctcgttagagcattacaagatctggaaaatgcagcctcaggtgatgcagcagttcatcagaggatagcttctttacctgttgaagtccaagaagtatctctattagataaaataacagataaagaatctggagaaaggctttccaaaatggtagaggatgcgtgtatgttgctggcagattacaatggcagattggcggcagaaatagatgatagaaagcaactcactcgaatgttagcagattttcttcgttgtcaaaaggaagcccttgcagagaaagagcataaattggaagtgcgtaacctttttcttctttagtgcttatttatttaattctctttttgttaggaattttaaaatattttaatctatgtgcacattttgcattttttaacatagacctttttaagcagtagcccaggtaagcttctccttgtattaatggtttttcttctacttgaaccaaattaatcttgcaagtaaacttagaaatttggaattagcaaaattgattgcatttaaaaattattcttgtgaaattccatgcaactataatttatcttaccagtttaaccctaatgtatcacagaaataataggaaaatagcaggtggcagtcacttgtagtaggatttatttagtttctgttttgagaagatgtagtcttttaggtataccattaagtctttaaattactcccttaattccacccgccaattctaatgcttacatgttccagccccactcccggctcacactcttaggcagaaattcattgctcctgtaaattaagtaataattaataccgctaatgagaaatctgggagtacaggaggtgattttaaaaaatgctcgtatttcctttgattagagtagcaattgttagggatacatgagccagatttggttttatgtaaaaaaaatctttcagttgatgagttcttgtttaaattgtattgctgtggcaatttcttattgtaataatatgtaggagaatttctaatttgaatccctttatttacagaaagctcactgtaaatttgtaggaatgtcatggtactaccccattaagttatttttattagtgtttagttattgattcagcagtctctaattgtgccaaaaatggtgcttagattagattgccattgctacccatgggagctgctacttaattattcccacctcaaattcccagctctcaagttagcactactcctttgcaatttactccttctctgctcgtataaataccctcagatgatgatagttggtggccactatacctttgaagaggttgcccacttctacatggaaaggaaaagatggtttttttttttaaaagatgaatttgataattaacttgccactatttcaccttgtgatgaaacctcaattttaaacatagtgttaattgttttattgtccacagaattaagggtaagtaatgtcatacaatttttgtctttagtcttttagtatggtttctttaacttctattgagcttctgttgcagatattggacatgggcgtatcttctaacgatgtcgtcaccattagtatattcttcctgctaaaaataaatatcaaaccctgaagcctgtattgtctcatgtttttgaaaattgaagagaagactgtaactttattctgctttatactttctcacttatgatgatggtcatttgtcactgtttacaaaaacagaatttatatttgaagtgtaactgtagaaaatagatcagatgccactccccacaacccccttttcccccagtgccttccagccacatttcatagttgacagtcatagattatgaggctgatgataataataatgttaacattcatgtgtcaggtactattctaggcacttcacataagcaactcatttaatcttacacagcaggatgtattatccacatttgatagatacagaactgaggcacaggaagattaagtaacttgcctaaggtcacaaagagctagtgagttgtttggaacgcagagaatctgcctccagagccagtgcacttcatcaaaaagacacattgcttcctgtttttacttaaatctaagattaaagcaaatgctaaagtcctattttttccaactttttctgctccctctcttctcagaggtaatcactgtcttgaaataaagccttctaggaactttttttgttgttcttctgcataactggattttatattataaagaagaaatcacctcaattatgttcagctgttttttaacaagtaaatactctttacaagtacagaaataaacttgaaagttattccaca

SEQ ID NO: 174705 - DNA, 566 bp, Homo sapiens
  Payload ID: 14305
  Gene Symbol: RPRD1A
  Gene Name: regulation of nuclear pre-mRNA domain containing 1A
  ENST ID: ENST00000592674
  CDS Start-End: 173-394
actgccggccggacgccatcttgctggtttgcggccggtcttggatgaagcggcggccgtggtgagagcgtggggaagggtggggtgagggggcgaggccgcagctagggcggcgaaactctcctcccctcggccccaccgcgtgggacggcgtgaacgtggtgtcggagggatgtcagccttctctgaggcggcgctggagaagaagctgtcggagttgagcaactcgcagcagagcgtgcagaccttgtccctgtggctcattcaccaccgtaaacactcgcgtcccatcgtcaccgtgtgggagcgggagctgcggaaagaaagagtttctgtttggagggataaacttcaaggcctttgtgaagaccaaaatggcatacaattttcctgataaatgcagtaaagtgtaaccaaaaatagtggaggtgcaacaaatgagaaattccaattggagattttgtcaaacaggaatttactccaaaccaaacaggaagcttacttttctctacctagccaatgatgtcatacagaacagcaagaggaaggggccagagtttacaaaa

SEQ ID NO: 174706 - DNA, 1945 bp, Homo sapiens
  Payload ID: 14305
  Gene Symbol: RPRD1A
  Gene Name: regulation of nuclear pre-mRNA domain containing 1A
  Uniprot ID: Q96P16
  ENST ID: ENST00000590898
  CDS Start-End: 294-1124
gaagcggcggccgtggtgagagcgtggggaagggtggggtgagggggcgaggccgcagctagggcggcgaaactctcctcccctcggccccaccgcgtgggacggcgtgaacgtggtgtcggagggatgtcagccttctctgaggcggcgctggagaagaagctgtcggagttgagcaactcgcagcagagcgtgcagaccttgtccctgtggctcattcaccaccgtaaacactcgcgtcccatcgtcaccgtgtgggagcgggagctgcggaaagagtggaggtgcaacaaatgagaaattccaattggagattttgtcaaacaggaatttactccaaaccaaacaggaagcttacttttctctacctagccaatgatgtcatacagaacagcaagaggaaggggccagagtttacaaaagattttgcaccagttatagtggaggcttttaagcatgtttcaagtgaaactgatgaaagttgtaagaagcaccttggaagagtgttatctatttgggaagaaaggtctgtttatgaaaatgatgtattagaacaacttaaacaagctctgtatggtgataagaagcctaggaagcgaacttatgaacagataaaggtggatgaaaatgaaaactgttcctctctgggatctccaagtgaaccaccacagactctagatctcgttagagcattacaagatctggaaaatgcagcctcaggtgatgcagcagttcatcagaggatagcttctttacctgttgaagtccaagaagtatctctattagataaaataacagataaagaatctggagaaaggctttccaaaatggtagaggatgcgtgtatgttgctggcagattacaatggcagattggcggcagaaatagatgatagaaagcaactcactcgaatgttagcagattttcttcgttgtcaaaaggaagcccttgcagagaaagagcataaattggaagagtacaagcgcaagctagccagagtttccctggtgcgcaaagaactcaggtcccggatccagagcctgccagacttatctcgattgcccaatgtcactggcagccacatgcacctgccctttgcgggagacatctacagtgaagattgatggaccagcctctttccaggtcccaggactttgcaagagatggagacagtgcagagagctgtctggagtcacaatctgaacagattctcgggcgctccttctctccttccatcactacagtaagtaaaaggaccatagaggggaaccaggaatctgagaatcagctgtgctcaatagccaacctccctgtccagatgcagctattttggtatctcctatcacatgcactctgaatcagggtttttctataagaaatctttcagaatcagcaaaagtggggatgacccaggcatcttgatttgcaaaatcacaaaactaagttgtcagttatcactgtagatgagcaactcatctttttaaagtatagttactgaactgattctgagaaatctttagagagaaaaaactcaacagtacaaattaactaattgggaaagttagaatgtcctttctgaatttttcattaaaaaaattacattatctgaaataacataaagctactaaactgctttgtattctattaagaaatagctcctaaggatgtagtcttgtttcatagttgttgcactatatcaaaacttaaaatgtaagcccagttcttctctgtatagaaaggaaacattgtgttacttaatgaattatttatacagagcatttgttgccaactgttgttccagccatccacacaggagtctgttctgaggtggcaatagcacatgggaagatgaactttccctgtttgtttacccgttcttctttggctgtatctgatgacagtataagatgttcttaataaagttttatgttctttttgaaatgtg

SEQ ID NO: 174707 - DNA, 643 bp, Homo sapiens
  Payload ID: 14305
  Gene Symbol: RPRD1A
  Gene Name: regulation of nuclear pre-mRNA domain containing 1A
  ENST ID: ENST00000587563
  CDS Start-End: 1-150
gagtacaagcgcaagctagccagagtttccctggtgcgcaaagaactcaggtcccggatccagagcctgccagacttatctcgattgcccaatgtcactggcagccacatgcacctgccctttgcgggagacatctacagtgaagattgatggaccagcctctttccaggtcccaggactttgcaagagatggagacagtgcagagagctgtctggagtcacaatctgaacagattctcgggcgctccttctctccttccatcactacagtgtttttcatgcaccatctcactgagacctcaacaaagtttttatgagttctgtctctggcgtggtctaatgtagcagcaccattactgttcctgagtaaaagcatcccgatcttgggtttttggtatcagtgtgaatttctgctcaaaagtagcaagatctcttggacagtggctgcttccatgtcaggggctgaaggagtgaagatggtcctggaacttttctttgcagagaagcaagcaggggatgccttcaaagttctgatggagctgaacaaagaagccagcttacagcttactggccaaggtttaacaacttgagcatcaaaatggaaaatacaaattgtaattaattaaaacaagtagactgtgaa

SEQ ID NO: 174708 - DNA, 425 bp, Homo sapiens
  Payload ID: 14305
  Gene Symbol: RPRD1A
  Gene Name: regulation of nuclear pre-mRNA domain containing 1A
  ENST ID: ENST00000585879
  CDS Start-End: 1-13
cagtgaagattgatggaccagcctctttccaggtcccaggactttgcaagagatggagacagtgcagagagctgtctggagtcacaatctgaacagattctcgggcgctccttctctccttccatcactacagttttatacagtggaacccatacccagagattctgtttcagaagatttgggatagatgcagaaatctgcattttaaacaagctactcagatgattctaatgcaggtgtttttcatgcaccatctcactgagacctcaacaaagtttttatgagagaagcaagcaggggatgccttcaaagttctgatggagctgaacaaagaagccagcttacagcttactggccaaggtttaacaacttgagcatcaaaatggaaaatacaaattgtaattaattaaaacaagtagactgtg

SEQ ID NO: 174709 - DNA, 1022 bp, Homo sapiens
  Payload ID: 14305
  Gene Symbol: RPRD1A
  Gene Name: regulation of nuclear pre-mRNA domain containing 1A
  ENST ID: ENST00000589050
  CDS Start-End: 154-1022
cttgctggtttgcggccggtcttggatgaagcggcggccgtggtgagagcgtggggaagggtggggtgagggggcgaggccgcagctagggcggcgaaactctcctcccctcggccccaccgcgtgggacggcgtgaacgtggtgtcggagggatgtcagccttctctgaggcggcgctggagaagaagctgtcggagttgagcaactcgcagcagagcgtgcagaccttgtccctgtggctcattcaccaccgtaaacactcgcgtcccatcgtcaccgtgtgggagcgggagctgcggaaagccaaaccaaacaggaagcttacttttctctacctagccaatgatgtcatacagaacagcaagaggaaggggccagagtttacaaaagattttgcaccagttatagtggaggcttttaagcatgtttcaagtgaaactgatgaaagttgtaagaagcaccttggaagagtgttatctatttgggaagaaaggtctgtttatgaaaatgatgtattagaacaacttaaacaagctctgtatggtgataagaagcctaggaagcgaacttatgaacagataaaggtggatgaaaatgaaaactgttcctctctgggatctccaagtgaaccaccacagactctagatctcgttagagcattacaagatctggaaaatgcagcctcaggtgatgcagcagttcatcagaggatagcttctttacctgttgaagtccaagaagtatctctattagataaaataacagataaagaatctggagaaaggctttccaaaatggtagaggatgcgtgtatgttgctggcagattacaatggcagattggcggcagaaatagatgatagaaagcaactcactcgaatgttagcagattttcttcgttgtcaaaaggaagcccttgcagagaaagagcataaattggaaatattggacatgggcgtatcttctaacgatgtcgtcaccattagtatattcttcctgctaaaaataaatatcaaaccctg

SEQ ID NO: 174710 - DNA, 3874 bp, Homo sapiens
  Payload ID: 14306
  Gene Symbol: RPRD1B
  Gene Name: regulation of nuclear pre-mRNA domain containing 1B
  Uniprot ID: Q9NQG5
  ENST ID: ENST00000373433
  CDS Start-End: 403-1383
aggctcgagcggtcaaagctctttccgggggcccggggaactactctccttgcctcgctctgtctccttcgaagtgctctgcgcgaggttcagagcggccgccgcctccaaagggacggttttctagagctccgacgcctctcggtgcccctctgctccggcccttgccctttgacctcgctctcgcggcagggtgagaggtcgggtggccatcttgtggcggcggcgcgggcggctgttactgcggagacccatcccctcccccttctcgcacccctggcagtctgtcagtcggtaaaaagtcccgcagcctgtcaggtgaggccccggcctcgtgccgtcgctcttcccgccgcactgggcggcccaggccgctccctgccgggcctcactgccgccaccatgtcctccttctctgagtcggcgctggagaagaagctctcggagctgagcaactctcagcagagcgtgcagaccctgtccctttggctcatccaccaccgcaagcacgcgggacccatcgtctccgtgtggcaccgcgagctccgcaaagccaaatcaaatagaaagcttacttttctgtatttagcgaatgatgtcatccaaaacagtaaaaggaaaggacctgaattcactagagaatttgaatctgtccttgtggatgctttttctcatgttgccagagaggcagatgaaggctgtaaaaaacctttagaaagattgctgaacatctggcaagaacgaagtgtgtatggcggcgagttcatacagcagctgaagctgtctatggaggactccaagagccctccccccaaagcaacagaagagaagaaatctctgaaacgaacttttcagcaaattcaggaggaggaggatgacgactaccctggcagctactctcctcaggatccttctgcaggacccctcttgactgaggaactaatcaaagctttgcaggatctggaaaatgccgcatcaggggatgctactgtccgacagaaaattgcttctctgccccaggaagtgcaagatgtttctctattggaaaaaataacagacaaagaggcagctgaacgtctttcaaaaacagtagatgaagcatgtctgttactagcagaatataacgggcgcctggcagcagaactggaggaccgtcgccagctggctcggatgttggtggagtatacccagaatcagaaagatgttttgtcggagaaggagaaaaaactagaggaatacaaacagaagcttgcacgagtaacccaggtccgcaaggaactgaaatcccatattcagagcttgccagacctctcactgctgcccaacgtcacagggggcttagcccccctgccctctgctggggacctgttttcaactgactaggatgggtgtcatgtcccagatttctgtttgtaccagcagaaagaagagggcaagtcatggttggaaataaccttctagcccctggttctatcccttcttccgcccagccccccagcctcaagaaagaacctcagactctgattctcctcttcagcctctcatcttgagcacagttcagaacagtggcgactggaatctggtttatattcatatttgcaaagactacagactttttctcccacttcatattttcatgcccccctgttggttttccattcttaactgtctccttatacctaagaagttatgaaaatcatgtgtacttctggaagctttcgaaagaatcttgtccctcatgacagcattttatcatgaaagcagcttctcctttctgggctgggcttgttcaagttcggtgtgggcttccactaaggcacttgtcctggagacgttggctttcccagctgcatctgccccaaaaggttgtaggcacagctgtcgtagcgttgccataaagagtttgccaaatctctgatcctccctttccattgcttctcctagtgatgcacgaagattaggtgcatttattttgtaaacagattggagaatctagcaataagattcaaagctaatctggagcataaaggcacagttcagagacagaataacagggatcacaagcatgaattaaaaggaatttatttgcttcaagttcctagatacaaccttcccatgctgcacttctccactgtcggagcacgttccgaaaaacagaatgccttgatccctggtgggtgcgaaggcagttgttagggatggcaggcattggtgggctccaaaagatgaaggccccacacacaggtgtgctgcatttgggatctgtgtgggtgtttcttggaccctttcttctgggagtagggtacacactaacgtttaatccgctgtctgggtgcatgtccacagtacggtggctaaactcgaacatcactgcaaataggacgctgagcaggtccgtctgtcatgtcacgccactgcacaggtccttgtccccacacgacggggagtacttgcgtcagatgttattgaatagctcgtctcgggcaggggaagcggggagttggggatattaattgggggttttaattctattatcatgtcagctgacattatgactatataatgtagttagagacaatttttatcttgcttatagtaaaggttcagcctgccaattgtaaatcattctaatttggcaggcttatttttgacattggaaagggcagaaagcgatttgccccagtagtgtaataggagttatagaccagaggctgaaacccaaactatataaaaaggaattcagtggagggggctttgtaatctccattaatttgtgttgctacttccaggatcaccaaaaattacatgtaattttacatgttaaacacattgaaacataacctatgtttataaagcataacgggcttcccttccagaagctctcctgcttgtcatgaagtgagaacaatgaaaagtcatagcagatactcagtttaactctgtgtagaacctagtagtgtttgagctgttattcagatttgaattcagactgtgtgttgtttgcttatggacactgcctgtcgttctgtcactgttaaattaatgagtctataaggtttttcttccagaggccataggtgacatcactaaaattgcaagataaattgtaatctttgctgctgctgcactccccaacctctcccccaccccccgtggtgtgctgctttctagatgagcgtgttttggagcaggcccatctgggacactctatgctttcaccaaggaagtgcgatctgagcagccacaatccagccaaaagaggatcgtagatatttgctctgatcaactagatgaaaatatagcagaatggatttagcccactgctctgttttatccaactgagtctctgaccagcaattggtgcataattattacagcaaaagttaagaaatgaaactgtagcaattatgtaaatgaatgtgttggcctcttaatacctgttactagtggacttcctgtgaggaagttagttttttgttttgatgaaatgctttcgttttttaaatcttaattctgctgtccacatcctcccaaagtgtgcttacttcatttgtttaatttaaatgaactttcctccttgtatgtatgaggtgacttggtgggtggggtgggtggtttttgtttttgtgttttttctttcttagggcatctgtaggcctcaaaggacctttcctttaggtcatattcctcagaaagtcttcaatcttcccttgtttttgtttgtttgtttttcttaaagaatattttcaaagcttaaatttgtatattaatttaggactatttagaagtataggctgtcgttggcggcagcagtatattctgaaatgtctcatagatatatatttttgaataaagatggtgttgttgaacaaca

SEQ ID NO: 174711 - DNA, 591 bp, Homo sapiens
  Payload ID: 14306
  Gene Symbol: RPRD1B
  Gene Name: regulation of nuclear pre-mRNA domain containing 1B
  ENST ID: ENST00000449186
  CDS Start-End: 1-591
atgtttcttagctacagatctgatctgcctgcatacatgtttcctggaggatcgagtccaacaacagaagagaagaaatctctgaaacgaacttttcagcaaattcaggaggaggaggatgacgactaccctggcagctactctcctcaggatccttctgcaggacccctcttgactgaggaactaatcaaagctttgcaggatctggaaaatgccgcatcaggggatgctactgtccgacagaaaattgcttctctgccccaggaagtgcaagatgtttctctattggaaaaaataacagacaaagaggcagctgaacgtctttcaaaaacagtagatgaagcatgtctgttactagcagaatataacgggcgcctggcagcagaactggaggaccgtcgccagctggctcggatgttggtggagtatacccagaatcagaaagatgttttgtcggagaaggagaaaaaactagaggaatacaaacagaagcttgcacgagtaacccaggtccgcaaggaactgaaatcccatattcagagcttgccagacctctcactgctgcccaacgtcacagggggcttagccccc

SEQ ID NO: 174712 - DNA, 542 bp, Homo sapiens
  Payload ID: 14306
  Gene Symbol: RPRD1B
  Gene Name: regulation of nuclear pre-mRNA domain containing 1B
  ENST ID: ENST00000495457
  CDS Start-End: 117-458
gtcagtcggtaaaaagtcccgcagcctgtcaggtgaggccccggcctcgtgccgtcgctcttcccgccgcactgggcggcccaggccgctccctgccgggcctcactgccgccaccatgtcctccttctctgagtcggcgctggagaagaagctctcggagctgagcaactctcagcagagcgtgcagaccctgtccctttggctcatccaccaccgcaagcacgcgggacccatcgtctccgtgtggcaccgcgagctccgcaaagccaaatcaaatagaaagcttacttttctgtatttagcgaatgatgtcatccaaaacagtaaaaggaaaggacctgaattcactagagaatttgaatctgtccttgtggatgctttttctcatgttgccagcaacagaagagaagaaatctctgaaacgaacttttcagcaaattcaggaggaggaggatgacgactaccctggcagctactctcctcaggatccttctgcaggacccctcttgactgaggaactaatcaaagctttgcaggatct

SEQ ID NO: 174713 - DNA, 2436 bp, Homo sapiens
  Payload ID: 14306
  Gene Symbol: RPRD1B
  Gene Name: regulation of nuclear pre-mRNA domain containing 1B
  ENST ID: ENST00000462548
  CDS Start-End: 224-406
gctctcgcggcagggtgagaggtcgggtggccatcttgtggcggcggcgcgggcggctgttactgcggagacccatcccctcccccttctcgcacccctggcagtctgtcagtcggtaaaaagtcccgcagcctgtcaggtgaggccccggcctcgtgccgtcgctcttcccgccgcactgggcggcccaggccgctccctgccgggcctcactgccgccaccatgtcctccttctctgagtcggcgctggagaagaagctctcggagctgagcaactctcagcagagcgtgcagaccctgtccctttggctcatccaccaccgcaagcacgcgggacccatcgtctccgtgtggcaccgcgagctccgcaaagagaggcagatgaaggctgtaaaaaacctttagaaagattgctgaacatctggcaagaacgaagtgtgtatggcggcgagttcatacagcagctgaagctgtctatggaggactccaagagccctccccccaaagcaacagaagagaagaaatctctgaaacgaacttttcagcaaattcaggaggaggaggatgacgactaccctggcagctactctcctcaggatccttctgcaggacccctcttgactgaggaactaatcaaagctttgcaggatctggaaaatgccgcatcaggggatgctactgtccgacagaaaattgcttctctgccccaggaagtgcaagatgtttctctattggaaaaaataacagacaaagaggcagctgaacgtctttcaaaaacagtagatgaagcatgtctgttactagcagaatataacgggcgcctggcagcagaactggaggaccgtcgccagctggctcggatgttggtggagtatacccagaatcagaaagatgttttgtcggagaaggagaaaaaactagaggaatacaaacagaagcttgcacgagtaacccaggtccgcaaggaactgaaatcccatattcagagcttgccagacctctcactgctgcccaacgtcacagggggcttagcccccctgccctctgctggggacctgttttcaactgactaggatgggtgtcatgtcccagatttctgtttgtaccagcagaaagaagagggcaagtcatggttggaaataaccttctagcccctggttctatcccttcttccgcccagccccccagcctcaagaaagaacctcagactctgattctcctcttcagcctctcatcttgagcacagttcagaacagtggcgactggaatctggtttatattcatatttgcaaagactacagactttttctcccacttcatattttcatgcccccctgttggttttccattcttaactgtctccttatacctaagaagttatgaaaatcatgtgtacttctggaagctttcgaaagaatcttgtccctcatgacagcattttatcatgaaagcagcttctcctttctgggctgggcttgttcaagttcggtgtgggcttccactaaggcacttgtcctggagacgttggctttcccagctgcatctgccccaaaaggttgtaggcacagctgtcgtagcgttgccataaagagtttgccaaatctctgatcctccctttccattgcttctcctagtgatgcacgaagattaggtgcatttattttgtaaacagattggagaatctagcaataagattcaaagctaatctggagcataaaggcacagttcagagacagaataacagggatcacaagcatgaattaaaaggaatttatttgcttcaagttcctagatacaaccttcccatgctgcacttctccactgtcggagcacgttccgaaaaacagaatgccttgatccctggtgggtgcgaaggcagttgttagggatggcaggcattggtgggctccaaaagatgaaggccccacacacaggtgtgctgcatttgggatctgtgtgggtgtttcttggaccctttcttctgggagtagggtacacactaacgtttaatccgctgtctgggtgcatgtccacagtacggtggctaaactcgaacatcactgcaaataggacgctgagcaggtccgtctgtcatgtcacgccactgcacaggtccttgtccccacacgacggggagtacttgcgtcagatgttattgaatagctcgtctcgggcaggggaagcggggagttggggatattaattgggggttttaattctattatcatgtcagctgacattatgactatataatgtagttagagacaatttttatcttgcttatagtaaaggttcagcctgccaattgtaaatcattctaatttggcaggcttatttttgacattggaaagggcagaaagcgatttgccccagtagtgtaataggagttatagaccagaggctgaaacccaaactatataaaaaggaattcagtg

SEQ ID NO: 174714 - DNA, 469 bp, Homo sapiens
  Payload ID: 14306
  Gene Symbol: RPRD1B
  Gene Name: regulation of nuclear pre-mRNA domain containing 1B
  ENST ID: ENST00000622494
  CDS Start-End: 1-103
ccagctggctcggatgttggtggagtatacccagaatcagaaagatgttttgtcggagaaggagaaaaaactagagggtgtcatgattgactttggcctatgatgttggcccttaaacaccaggcaagggtggaaggaatgctgctgaaaatctgtgggtaatgtttttgtcatgaacatgagaaaacctagaaatggagaaggcacgtggaaggaagcacaaatggcagcccaaagaggaggttagagaatgtggagggtatagaagaaagcccattcagaaaggcaaaggccaaagataccagaaaagccttccagcttcacttccagagcaaagagaagctttgtttgtggttgacagaggtgactacattactcccagatgtctgctcaaagctcataagacatagcgtgagtgggttggatagggttcctgtcttgtcagcgtgaataaagcatgatacagaca

SEQ ID NO: 174715 - DNA, 659 bp, Homo sapiens
  Payload ID: 14306
  Gene Symbol: RPRD1B
  Gene Name: regulation of nuclear pre-mRNA domain containing 1B
  ENST ID: ENST00000614670
  CDS Start-End: 1-190
caaagaggcagctgaacgtctttcaaaaacagtagatgaagcatgtctgttactagcagaatataacgggcgcctggcagcagaactggaggaccgtcgccagctggctcggatgttggtggagtatacccagaatcagaaagatgttttgtcggagaaggagaaaaaactagagctggtgactcactgatacaattatcaagccacccagccagcaccaggttgtagcgtccaaggaacagaaggattcggcacccagaacacgtgatgtcatgtttttattttgatttattttttatgtgcatgtcatgtctttctacatgacttcccaagggtggggactgtccccatcatctattcattcaacagatactcatgagtgcttcgatggtggggaatgagatgaatgaccaagtctgcacatccacggaatcgcagtctagacctgcttcatccagtactagccagactggctaccgagcacttgaaatgcagctagttcaaattgagacctgctgtcagtataaaacacacaccacatttcaaagattgagtacaaaaataagaaggtcaaataccttactaattcttatattgattacatgttgaaataatgttttggatatattggattaaataaaatacattattaaagctaa

SEQ ID NO: 174716 - DNA, 1043 bp, Homo sapiens
  Payload ID: 14307
  Gene Symbol: RPRD2
  Gene Name: regulation of nuclear pre-mRNA domain containing 2
  Uniprot ID: Q5VT52
  ENST ID: ENST00000369067
  CDS Start-End: 8-466
cgggaagatggcggccggcggcggcggaggcagcagtaaggcctcctcctcgtcggcctcttcggcaggggctctggagtcctcgttggatcgaaaattccagtcggtaaccaacaccatggagtccattcaaggcttgtcgtcttggtgtatagagaacaaaaaacaccacagtactatcgtctatcattggatgaagtggctccggagatctgcatatccccaccgtttgaatctcttttaccttgccaatgatgtcatacagaactgtaaaaggaaaaatgcaatcatattccgtgaatcatttgctgatgtacttcctgaagcagctgctctagtgaaggatccatctgtctctaagtctgtagaacgaatctttaaaatctgggaagatagaaatgtatacccagaagaaatgattgtggcattgagagaagctttgagtaagtgtctttttctctcctaaaagaaaatttttgagtcagtctttacaattacataattttatagatctggtcatgttgtataatagtgaaaaattaagttttgaatctagccctatttgtttaaagttaaatatttatgaaaaatctagatctgtttgaattaaaatgtaagtagaattggttttagggatggggtcggattttgttttttagtgactacaaaagtcaagcatgttaagtggtaatagccatctggttattttcctgcatttgcgttgagtgtttcaaatggttcattgtttgtgttaataaatactgccctgtgcccttactgttggagaatttttgcacagggtgtcagttcttactaagctgtttggtagtaagcatatatcagcagtctttagactgtcttttgatttagatttacagtaagtggtgtactgttttgttaaaaggaattatgtattatatgcatgtaattaagttattgaacagaagtttgtgataatctgctaccatgaccgtcattttactagaaatttgctttaaaaatggcatcttctaagaagctgttaaattcttcattttaatttg

SEQ ID NO: 174717 - DNA, 4612 bp, Homo sapiens
  Payload ID: 14307
  Gene Symbol: RPRD2
  Gene Name: regulation of nuclear pre-mRNA domain containing 2
  Uniprot ID: Q5VT52
  ENST ID: ENST00000369068
  CDS Start-End: 5-4390
gaagatggcggccggcggcggcggaggcagcagtaaggcctcctcctcgtcggcctcttcggcaggggctctggagtcctcgttggatcgaaaattccagtcggtaaccaacaccatggagtccattcaaggcttgtcgtcttggtgtatagagaacaaaaaacaccacagtactatcgtctatcattggatgaagtggctccggagatctgcatatccccaccgtttgaatctcttttaccttgccaatgatgtcatacagaactgtaaaaggaaaaatgcaatcatattccgtgaatcatttgctgatgtacttcctgaagcagctgctctagtgaaggatccatctgtctctaagtctgtagaacgaatctttaaaatctgggaagatagaaatgtatacccagaagaaatgattgtggcattgagagaagctttgagtaccactttcaaaactcagaagcagctgaaagaaaatctgaacaaacaaccgaataagcagtggaagaaatcacaaacatctacaaatccaaaagctgctctcaagtctaagatagttgctgaatttcgatctcaggccctaattgaagagctgttgctatacaagcgctcagaagatcagatagaactgaaggaaaagcagttgtcaactatgagggtggatgtgtgcagcacagaaactctcaaatgcttaaaagataaaacaggtgggaagaagttctccaaagaatttgaagaggcaagctccaagctggaagaatttgtgaatggattagataagcaggtgaaaaacggaccctcattaacagaagcactggaaaatgctggaattttctatgaagcacaatacaaagaagtaaaagtggtggctaatgcatataaaacctttgctaaccgagtaaacaatttaaagaagaagttggatcaattgaagtcaacccttccagatcctgaagaatcaccagttccttccccaagcatggacgctccctccccgactggttctgagtctccttttcagggaatgggaggtgaggaatcccagtcaccaaccatggagagtgagaaatctgccacacctgaacctgtgacagataatcgtgatgtggaagacatggaactctcagatgtggaagatgatgggtcaaaaatcattgtcgaggacaggaaggaaaaacctgcagagaagtcagctgtatccacttctgtacctacaaagccaacagaaaatatctcaaaggcctcttcatgtaccccagtgcctgtgaccatgacagcaactccacctcttccaaagcctgtgaatacttctctttccccttccccagcattggctttgccaaacctggctaatgtggatctggcaaagatcagttccatccttagcagtttaacatcagtcatgaaaaatactggggtcagtcctgcatcaagaccttctccaggaacgcccaccagccccagcaacctcaccagtggcctgaaaacacctgcacctgccacgacaacatctcacaaccctctggcaaatatcctctccaaggtggagatcaccccagagagcattctgtctgcactttccaaaacccagacacagtcagcccctgcactgcaaggcctgtcatctttacttcagagtgttactgggaacccagttccagccagtgaagctgcctcacagagcacttcagcctcccctgccaacaccacagtctctaccataaagggaagaaatctgccctccagtgcccaaccttttattcccaaaagcttcaactattctcctaactcatcaacttctgaagtctcttcaacttcagccagcaaggcctcaattgggcaaagcccagggctcccaagcactacttttaaactaccttccaactctttggggtttacagctacccacaatactagccctgctgccccacctactgaagttaccatctgccaatcttcagaggtctccaagccaaagctggagtcagagtccacctccccaagcctggaaatgaagattcacaacttcttaaaaggtaatcctggtttcagtggcttaaacttaaacatcccaatcctgagcagtttggggtccagcgccccatcagagagccatccctcagacttccagcgtggccctactagcacctcaatcgacaacattgatggaacccctgtacgggatgaacggagtgggacacccacccaggatgagatgatggacaagcccacatccagcagtgtagatactatgtccctgctttctaagatcattagccctggttcctcaacacccagcagtacaagatcaccaccccctgggagagatgaaagctacccccgagagctctccaattctgtatctacatatcgaccctttggtctgggcagtgaatctccctataagcagccttctgatggaatggagagaccatcttccctgatggactcttcacaggaaaagttctacccagatacttctttccaagaagatgaggattaccgagattttgagtattcagggcctccaccctctgccatgatgaacctagagaagaaaccagccaaatctatcctgaaatcaagcaagctgtctgataccaccgagtaccagccaattctgtccagttatagccacagagcccaagaatttggggtaaagtctgccttccctccatctgtaagggccctcctggactctagtgagaactgtgaccgtctctcatcttcccctgggctatttggtgccttcagcgtaagagggaatgaacctgggtctgaccggtcaccatcaccgagtaagaatgattcatttttcacccctgactccaaccacaatagcttgtctcaatctaccactgggcatctcagtttgccacagaagcagtacccagactctcctcacccagtcccacatcgttcccttttctctccgcagaacacccttgccgctcccacgggtcacccacccacgtcaggcgtggagaaagtcctggcctccaccatttccaccacgtcgacgattgaatttaagaatatgcttaaaaacgcctcacgtaagccctcagatgataagcattttggccaggctcccagcaagggcactccaagtgatggtgtcagtctctcaaacctcacccaacccagcttgaccgccactgatcagcagcaacaagaagagcactaccgcatagaaacccgcgtctcctcctcctgcttagacttgcctgatagcacagaagaaaagggggcccctatagaaaccttgggttatcacagtgcatccaataggaggatgtcaggggagccgatccagaccgtagagtccatccgagttcctgggaagggaaatagaggacatgggcgtgaggcttcaagggtgggttggtttgatctgagcacatcaggtagctcttttgacaatggcccttcaagtgcctctgagttggcatcccttgggggtgggggcagcggaggcctcactggctttaaaacagcaccatacaaggaacgggcacctcaatttcaggagagtgtcggcagctttcgttccaacagtttcaactcaacatttgagcatcatcttcccccatcccccttggaacatgggacacccttccagagagagccagtggggccatcatctgccccacctgtccctcctaaggatcatggtggtatcttctctcgagatgcacccactcatctaccctctgtggatctttcgaaccccttcacaaaggaggcagccctggcccatgctgccccaccccctcctcctggagagcacagtggaattcctttccctaccccacctcctcctccccctcctggggaacatagcagcagtggtgggagtggtgtccccttttctactccaccccctcctccaccccctgttgaccactctggagttgtacccttcccagccccaccactggcagagcacggagtggcaggggctgtggcagtatttcccaaggaccatagttccctccttcaagggaccctggctgagcattttggggtactcccaggacccagggaccacgggggccccacccaacgggacctcaacggccctggccttagccgtgtacgagagagcctcaccctaccctcccattctctggaacacctgggcccaccccatggaggaggaggtgggggaggcagcaacagcagcagtggcccccccttgggtccctcacacagagacaccatcagccggagtggtataatcttacggagtccccggccagactttcggcctagggaaccttttctcagcagagacccatttcacagtttaaagagacccaggccaccttttgctaggggccctccgttctttgcaccaaaacgcccattcttccctcccaggtactgatggaaaccaagggaaaggcattttgaacagtctagagaacattggaagtaggagtttggtttattgttgttgtttttatttgttttctctttctcgattttttttttattataacaaagggcctctcttccaaagtaagaaatcacatacgcttacgttttactattcaattcaatcctccctcccattgcacttatctaccttccccaagttgtttgtatt

SEQ ID NO: 174718 - DNA, 7605 bp, Homo sapiens
  Payload ID: 14307
  Gene Symbol: RPRD2
  Gene Name: regulation of nuclear pre-mRNA domain containing 2
  Uniprot ID: Q5VT52
  ENST ID: ENST00000401000
  CDS Start-End: 66-4373
ccgctcccgccgccgccgccgccgccgccgccagaggagcagcagcgcttgtgcaaaccgggaagatggcggccggcggcggcggaggcagcagtaaggcctcctcctcgtcggcctcttcggcaggggctctggagtcctcgttggatcgaaaattccagtcggtaaccaacaccatggagtccattcaaggcttgtcgtcttggtgtatagagaacaaaaaacaccacagtactatcgtctatcattggatgaagtggctccggagatctgcatatccccaccgtttgaatctcttttaccttgccaatgatgtcatacagaactgtaaaaggaaaaatgcaatcatattccgtgaatcatttgctgatgtacttcctgaagcagctgctctagtgaaggatccatctgtctctaagtctgtagaacgaatctttaaaatctgggaagatagaaatgtatacccagaagaaatgattgtggcattgagagaagctttgacatctacaaatccaaaagctgctctcaagtctaagatagttgctgaatttcgatctcaggccctaattgaagagctgttgctatacaagcgctcagaagatcagatagaactgaaggaaaagcagttgtcaactatgagggtggatgtgtgcagcacagaaactctcaaatgcttaaaagataaaacaggtgggaagaagttctccaaagaatttgaagaggcaagctccaagctggaagaatttgtgaatggattagataagcaggtgaaaaacggaccctcattaacagaagcactggaaaatgctggaattttctatgaagcacaatacaaagaagtaaaagtggtggctaatgcatataaaacctttgctaaccgagtaaacaatttaaagaagaagttggatcaattgaagtcaacccttccagatcctgaagaatcaccagttccttccccaagcatggacgctccctccccgactggttctgagtctccttttcagggaatgggaggtgaggaatcccagtcaccaaccatggagagtgagaaatctgccacacctgaacctgtgacagataatcgtgatgtggaagacatggaactctcagatgtggaagatgatgggtcaaaaatcattgtcgaggacaggaaggaaaaacctgcagagaagtcagctgtatccacttctgtacctacaaagccaacagaaaatatctcaaaggcctcttcatgtaccccagtgcctgtgaccatgacagcaactccacctcttccaaagcctgtgaatacttctctttccccttccccagcattggctttgccaaacctggctaatgtggatctggcaaagatcagttccatccttagcagtttaacatcagtcatgaaaaatactggggtcagtcctgcatcaagaccttctccaggaacgcccaccagccccagcaacctcaccagtggcctgaaaacacctgcacctgccacgacaacatctcacaaccctctggcaaatatcctctccaaggtggagatcaccccagagagcattctgtctgcactttccaaaacccagacacagtcagcccctgcactgcaaggcctgtcatctttacttcagagtgttactgggaacccagttccagccagtgaagctgcctcacagagcacttcagcctcccctgccaacaccacagtctctaccataaagggaagaaatctgccctccagtgcccaaccttttattcccaaaagcttcaactattctcctaactcatcaacttctgaagtctcttcaacttcagccagcaaggcctcaattgggcaaagcccagggctcccaagcactacttttaaactaccttccaactctttggggtttacagctacccacaatactagccctgctgccccacctactgaagttaccatctgccaatcttcagaggtctccaagccaaagctggagtcagagtccacctccccaagcctggaaatgaagattcacaacttcttaaaaggtaatcctggtttcagtggcttaaacttaaacatcccaatcctgagcagtttggggtccagcgccccatcagagagccatccctcagacttccagcgtggccctactagcacctcaatcgacaacattgatggaacccctgtacgggatgaacggagtgggacacccacccaggatgagatgatggacaagcccacatccagcagtgtagatactatgtccctgctttctaagatcattagccctggttcctcaacacccagcagtacaagatcaccaccccctgggagagatgaaagctacccccgagagctctccaattctgtatctacatatcgaccctttggtctgggcagtgaatctccctataagcagccttctgatggaatggagagaccatcttccctgatggactcttcacaggaaaagttctacccagatacttctttccaagaagatgaggattaccgagattttgagtattcagggcctccaccctctgccatgatgaacctagagaagaaaccagccaaatctatcctgaaatcaagcaagctgtctgataccaccgagtaccagccaattctgtccagttatagccacagagcccaagaatttggggtaaagtctgccttccctccatctgtaagggccctcctggactctagtgagaactgtgaccgtctctcatcttcccctgggctatttggtgccttcagcgtaagagggaatgaacctgggtctgaccggtcaccatcaccgagtaagaatgattcatttttcacccctgactccaaccacaatagcttgtctcaatctaccactgggcatctcagtttgccacagaagcagtacccagactctcctcacccagtcccacatcgttcccttttctctccgcagaacacccttgccgctcccacgggtcacccacccacgtcaggcgtggagaaagtcctggcctccaccatttccaccacgtcgacgattgaatttaagaatatgcttaaaaacgcctcacgtaagccctcagatgataagcattttggccaggctcccagcaagggcactccaagtgatggtgtcagtctctcaaacctcacccaacccagcttgaccgccactgatcagcagcaacaagaagagcactaccgcatagaaacccgcgtctcctcctcctgcttagacttgcctgatagcacagaagaaaagggggcccctatagaaaccttgggttatcacagtgcatccaataggaggatgtcaggggagccgatccagaccgtagagtccatccgagttcctgggaagggaaatagaggacatgggcgtgaggcttcaagggtgggttggtttgatctgagcacatcaggtagctcttttgacaatggcccttcaagtgcctctgagttggcatcccttgggggtgggggcagcggaggcctcactggctttaaaacagcaccatacaaggaacgggcacctcaatttcaggagagtgtcggcagctttcgttccaacagtttcaactcaacatttgagcatcatcttcccccatcccccttggaacatgggacacccttccagagagagccagtggggccatcatctgccccacctgtccctcctaaggatcatggtggtatcttctctcgagatgcacccactcatctaccctctgtggatctttcgaaccccttcacaaaggaggcagccctggcccatgctgccccaccccctcctcctggagagcacagtggaattcctttccctaccccacctcctcctccccctcctggggaacatagcagcagtggtgggagtggtgtccccttttctactccaccccctcctccaccccctgttgaccactctggagttgtacccttcccagccccaccactggcagagcacggagtggcaggggctgtggcagtatttcccaaggaccatagttccctccttcaagggaccctggctgagcattttggggtactcccaggacccagggaccacgggggccccacccaacgggacctcaacggccctggccttagccgtgtacgagagagcctcaccctaccctcccattctctggaacacctgggcccaccccatggaggaggaggtgggggaggcagcaacagcagcagtggcccccccttgggtccctcacacagagacaccatcagccggagtggtataatcttacggagtccccggccagactttcggcctagggaaccttttctcagcagagacccatttcacagtttaaagagacccaggccaccttttgctaggggccctccgttctttgcaccaaaacgcccattcttccctcccaggtactgatggaaaccaagggaaaggcattttgaacagtctagagaacattggaagtaggagtttggtttattgttgttgtttttatttgttttctctttctcgattttttttttattataacaaagggcctctcttccaaagtaagaaatcacatacgcttacgttttactattcaattcaatcctccctcccattgcacttatctaccttccccaagttgtttgtattaaaaaaaaaaaaaaaaaaaaaaagtaaagaaacacaaccaaagccatttcatttggctggggggttggggagtggggaggaaaacaatctttattttaccccatctattgaagagtattattacatttgaaataaaacttccatcagtacagataaccacatgtgcaatgttgggatgttattttgggcttggcttatcgagtagtcaatggaaggattcccgtcccctctctcggcagcttagtaactgctgtagccagctcggctcccttccctgtgtatctgtgtcctgctaacagccaagagatgttgcaagggaggaaatgtgagagaccttgaacctgtcaggtttatttgttttgtttttaaaggcatgttgaagtttagttctttacccttctcctaaaatctttttttaatcagcctcaaggttaaaataaggagtgactacagtatgtaaaataaggaaaggaagcattaatggtgtgatgtgacctgcctgtttttttgtaaacaagagaataggaaatgttttcaaggtagtttcacatgtcttgcaccaagctcatgcctcttgcttttcctttttgactttatctccctcagtttttcttctgctgtggccagaaagacagtcactacagttgactattgatacaaaggtgcaacagaaatattatccctgcatttttaaatataagaagtagacattaattttaccatggtgcctccctaatgtaagtgatatttattggtggttttcaacaaaggttaactattaaagaaagaaatatttgtctttatcttccttttccccttgcctcagtcgtgttattcacccctattcttgatattttaaaggaggagattcagtagcattttcctttatattatacacatgtgtctatcccatttcaaggctcaagtcttacccccacctctcgctcccaataggaaataaagaccatttctgcccttagttgttttacatgcaagataagtgctttccttctccctggactgaaagacttgtttgtatttctacatctagtacttgggaaatagacaatcactgtactttgagtgtttatatctttatatctagggacactgaaaagtaaatgttgctttactacaatttttttttaatttagtgtcttaccccaaggcatactcaactgataatctccagctagatgagtaaaacagtatgtgtttagttttccagagaattctggcaagtttcatattttcttccaagttagtatagaactaactataggaagtatggggttgctttttcctccagtagaatattaaagatgggggagggtgggcaatgtagtgacagaaaatgattctctcagaatgaacttttcagagaaagagcagcataaaccaggtgcacatcatgatttgggagtttttgcgtaatttattctgttatttatttgggctcgccatgtgttctggggttaggatgctgcaggtcattcatcttcttaatgcctgtctggtcttaagccaactgttctttctttcctcgaccctctctgccctgtagctctccccacaaaaatgcatgataccatgaccttacgtgtgggatggggtatgtagtgtagcaaagaaaagaaagtatagttatattgagtcctaagacatttgttagggaaaagcataagagaaaatggggtgggaggtggggaaatgatatttgactttcaaaattgaaataggttttttttttgcagaaattaaatgggatgtttttcattctagaataaaagaatgtgaattctctttgctgctcttgtttaagctaaaagtagtgtttacttgataaggctctctgaccatttaatttttatcagaaaatgtggggatgtcaggaaagtggcttcctgaacgttggggcgggataattgtcctcaaaagtatgatggttaatacatgaaaggaagactttgttggacagtttcgaaggtgggcttttaaggagttgggtttttgtggggtacttttttgttttttaagccacaaaatcctcaatatgtttgttttaggatggaagtgaggatttgtatgagactgtcagctattaattttaaggaaatcttaaaatttacatttacatcagtaaatgaagatgacagtgtgtatatatgtgataaatagtgaaacagaaaagacagttctggtattcataacgtgaaagaaaggggttttattctttctgtgtctgtgatttaaaactccgtgaccatgctctgacttttgtatttcaacctgagtttaaacaaataaacaagatattttttaaagaaagcataacatagtgtgtcttagcaaggacatgattcatatggaagcagaatgtgagaagttgtaaggtccttggtactcactgtaaaatcacagacagagaattggtaggggttgtgaatacactagtaccacttaaagttcagtgatacagttcagaaatagggtccttaagtattttgaaagagtttactcttcagtcagcttagatgagagctctctccctgctcccctctaccctctcaaaagttgagagtaaatagaatttggtttgattccagggaggggaaaataagcagagaataggacttttatactttccaataccaggaataaaatgtttgtgatatatatgggtccagcaaacctatcgagataatgtgaatacgataaacttcctaatggcaggatattcactctcaatcctgaagttaccggttcctgcagaattgagcttcagctgttactgttttgaagccgctgtaaattactgctttccccagttcccccactattttttttaagtgggcgggggcgcctgttaagatctaaaatagatatgttggattgatattctcacgtgttcggtgtggaaaacaaaacaagtacatgctttagaagcaacaacaatgaaatccttttgaaatgtgtgttaatatcgtttaataaaataactagtttgaaa

SEQ ID NO: 174719 - DNA, 2490 bp, Homo sapiens
  Payload ID: 14308
  Gene Symbol: RCAN1
  Gene Name: regulator of calcineurin 1
  Uniprot ID: P53805
  ENST ID: ENST00000313806
  CDS Start-End: 132-890
gcctgccgccgcgcgattccgagggggttaacggcggagccgccggccgggcgcggaccggagcgcgtgaggctccggcgcgcaagcccggagcagcccgctggggcgcacagggtcgcgcgggcgcggggatggaggacggcgtggccggtccccagctcggggccgcggcggaggcggcggaggcggccgaggcgcgagcgcggcccggggtgacgctgcggcccttcgcgcccctctcgggggcggccgaggcggacgagggcggcggcgactggagcttcattgactgcgagatggaggaggtggacctgcaggacctgcccagcgccaccatcgcctgtcacctggacccgcgcgtgttcgtggacggcctgtgccgggccaaatttgagtccctctttaggacgtatgacaaggacatcacctttcagtattttaagagcttcaaacgagtcagaataaacttcagcaaccccttctccgcagcagatgccaggctccagctgcataagactgagtttctgggaaaggaaatgaagttatattttgctcagaccttacacataggaagctcacacctggctccgccaaatccagacaagcagtttctgatctcccctcccgcctctccgccagtgggatggaaacaagtggaagatgcgaccccagtcataaactatgatctcttatatgccatctccaagctggggccaggggaaaagtatgaattgcacgcagcgactgacaccactcccagcgtggtggtccatgtatgtgagagtgatcaagagaaggaggaagaagaggaaatggaaagaatgaggagacctaagccaaaaattatccagaccaggaggccggagtacacgccgatccacctcagctgaactggcacgcgacgaggacgcattccaaatcatactcacgggaggaatcttttactgtggaggtggctggtcacgacttcttcggaggtggcagccgagatcggggtggcagaaatcccagttcatgttgctcagaagagaatcaaggccgtgtccccttgttctaatgctgcacaccagttactgttcatggcacccgggaatgacttgggccaatcactgagtttgtggtgatcgcacaaggacatttgggactgtcttgagaaaacagataatgatagtgttttgtacttgttcttttctggtaggttctgtctgtgccaagggcaggttgatcagtgagctcaggagagagcttcctgtttctaagtggcctgcaggggccactctctactggtaggaagaggtaccacaggaagccgcctagtgcagagaggttgtgaaaacagcagcaatgcaatgtggaaattgtagcgtttcctttcttccctcatgttctcatgtttgtgcatgtatattactgatttacaagactaacctttgttcgtatataaagttacaccgttgttgttttacatcttttgggaagccaggaaagcgtttggaaaacgtatcacctttcccagattctcggattctcgactctttgcaacagcacttgcttgcggaactcttcctggaatgcattcactcagcatccccaaccgtgcaacgtgtaacttgtgcttttgcaaaagaagttgatctgaaattcctctgtagaatttagcttatacaattcagagaatagcagtttcactgccaacttttagtgggtgagaaattttagtttaggtgtttgggatcggacctcagtttctgttgtttcttttatgtggtggtttctatacatgaatcatagccaaaaacttttttggaaactgttggttgagatagttggttcttttaccccacgaagacatcaagatacacttgtaaataaagctgatagcatatattcatacctgttgtacacttgggtgaaaagtatggcagtgggagactaagatgtattaacctacctgtgaatcatatgttgtaggaaaagctgttcccatgtctaacaggacttgaattcaaagcatgtcaagtggatagtagatctgtggcgatatgagagggatgcagtgcctttccccattcattcctgatggaattgttatactaggttaacatttgtaatttttttctagttgtaatgtgtatgtctggtaaataggtattatattttggccttacaataccgtaacaatgtttgtcattttgaaatacttaatgccaagtaacaatgcatgctttggaaatttggaagatggttttattctttgagaagcaaatatgtttgcattaaatgctttgattgttcatatcaagaaattgattgaacgttctcaaaccctgtttacggtacttggtaagagggagccggtttgggagagaccattgcatcgctgtccaagtgtttcttgttaagtgcttttaaactggagaggctaacctcaaaatattttttttaactgcattctataataaatgggcacagtatgctccttacagaaaa

SEQ ID NO: 174720 - DNA, 2408 bp, Homo sapiens
  Payload ID: 14308
  Gene Symbol: RCAN1
  Gene Name: regulator of calcineurin 1
  Uniprot ID: P53805
  ENST ID: ENST00000381132
  CDS Start-End: 215-808
tgtctgcctgcaagcatgcaggacttgactcaggaatttgctgtccaaacaggatgctgtggaagctgcactttttttttccccagggagtgggggctggcccttactgctttataagcaccagctcaagaaggaacctacagcctcttggaaaggaatctcactaggggcttgactgcgtgggtctgtagcgctttcactgtaagaaagcaagatgcattttagaaactttaactacagttttagctccctgattgcctgtgtggcaaacagtgatatcttcagcgaaagtgaaaccagggccaaatttgagtccctctttaggacgtatgacaaggacatcacctttcagtattttaagagcttcaaacgagtcagaataaacttcagcaaccccttctccgcagcagatgccaggctccagctgcataagactgagtttctgggaaaggaaatgaagttatattttgctcagaccttacacataggaagctcacacctggctccgccaaatccagacaagcagtttctgatctcccctcccgcctctccgccagtgggatggaaacaagtggaagatgcgaccccagtcataaactatgatctcttatatgccatctccaagctggggccaggggaaaagtatgaattgcacgcagcgactgacaccactcccagcgtggtggtccatgtatgtgagagtgatcaagagaaggaggaagaagaggaaatggaaagaatgaggagacctaagccaaaaattatccagaccaggaggccggagtacacgccgatccacctcagctgaactggcacgcgacgaggacgcattccaaatcatactcacgggaggaatcttttactgtggaggtggctggtcacgacttcttcggaggtggcagccgagatcggggtggcagaaatcccagttcatgttgctcagaagagaatcaaggccgtgtccccttgttctaatgctgcacaccagttactgttcatggcacccgggaatgacttgggccaatcactgagtttgtggtgatcgcacaaggacatttgggactgtcttgagaaaacagataatgatagtgttttgtacttgttcttttctggtaggttctgtctgtgccaagggcaggttgatcagtgagctcaggagagagcttcctgtttctaagtggcctgcaggggccactctctactggtaggaagaggtaccacaggaagccgcctagtgcagagaggttgtgaaaacagcagcaatgcaatgtggaaattgtagcgtttcctttcttccctcatgttctcatgtttgtgcatgtatattactgatttacaagactaacctttgttcgtatataaagttacaccgttgttgttttacatcttttgggaagccaggaaagcgtttggaaaacgtatcacctttcccagattctcggattctcgactctttgcaacagcacttgcttgcggaactcttcctggaatgcattcactcagcatccccaaccgtgcaacgtgtaacttgtgcttttgcaaaagaagttgatctgaaattcctctgtagaatttagcttatacaattcagagaatagcagtttcactgccaacttttagtgggtgagaaattttagtttaggtgtttgggatcggacctcagtttctgttgtttcttttatgtggtggtttctatacatgaatcatagccaaaaacttttttggaaactgttggttgagatagttggttcttttaccccacgaagacatcaagatacacttgtaaataaagctgatagcatatattcatacctgttgtacacttgggtgaaaagtatggcagtgggagactaagatgtattaacctacctgtgaatcatatgttgtaggaaaagctgttcccatgtctaacaggacttgaattcaaagcatgtcaagtggatagtagatctgtggcgatatgagagggatgcagtgcctttccccattcattcctgatggaattgttatactaggttaacatttgtaatttttttctagttgtaatgtgtatgtctggtaaataggtattatattttggccttacaataccgtaacaatgtttgtcattttgaaatacttaatgccaagtaacaatgcatgctttggaaatttggaagatggttttattctttgagaagcaaatatgtttgcattaaatgctttgattgttcatatcaagaaattgattgaacgttctcaaaccctgtttacggtacttggtaagagggagccggtttgggagagaccattgcatcgctgtccaagtgtttcttgttaagtgcttttaaactggagaggctaacctcaaaatattttttttaactgcattctataataaatgggcacagtatgctccttacagaaaa

SEQ ID NO: 174721 - DNA, 2526 bp, Homo sapiens
  Payload ID: 14308
  Gene Symbol: RCAN1
  Gene Name: regulator of calcineurin 1
  ENST ID: ENST00000381135
  CDS Start-End: 54-887
agaaacttgcccgtgctcaagagaggtggggaaaaagagtgagaggcggccagatgaactctaccgtccgccagctccgcgttccttcgcacgtgcctctgcgggatccctcgtgggaaagtctcagaaatgtccctaaactgaagaaaagccggggaatgcaaggagagcaaggtcgtaggttgttccgactgctccttaacgacctgcctggcagggaccgactaccctgctcctacccgcagccccatgtggagcaggcatccaccagtgcctccccgcgcttgctagcagtgaacattcctgaagacactctcctctcttatcctgaatcctcgctcccactgcagagacactgcgccttccataggttctccaaggccaaatttgagtccctctttaggacgtatgacaaggacatcacctttcagtattttaagagcttcaaacgagtcagaataaacttcagcaaccccttctccgcagcagatgccaggctccagctgcataagactgagtttctgggaaaggaaatgaagttatattttgctcagaccttacacataggaagctcacacctggctccgccaaatccagacaagcagtttctgatctcccctcccgcctctccgccagtgggatggaaacaagtggaagatgcgaccccagtcataaactatgatctcttatatgccatctccaagctggggccaggggaaaagtatgaattgcacgcagcgactgacaccactcccagcgtggtggtccatgtatgtgagagtgatcaagagaaggaggaagaagaggaaatggaaagaatgaggagacctaagccaaaaattatccagaccaggaggccggagtacacgccgatccacctcagctgaactggcacgcgacgaggacgcattccaaatcatactcacgggaggaatcttttactgtggaggtggctggtcacgacttcttcggaggtggcagccgagatcggggtggcagaaatcccagttcatgttgctcagaagagaatcaaggccgtgtccccttgttctaatgctgcacaccagttactgttcatggcacccgggaatgacttgggccaatcactgagtttgtggtgatcgcacaaggacatttgggactgtcttgagaaaacagataatgatagtgttttgtacttgttcttttctggtaggttctgtctgtgccaagggcaggttgatcagtgagctcaggagagagcttcctgtttctaagtggcctgcaggggccactctctactggtaggaagaggtaccacaggaagccgcctagtgcagagaggttgtgaaaacagcagcaatgcaatgtggaaattgtagcgtttcctttcttccctcatgttctcatgtttgtgcatgtatattactgatttacaagactaacctttgttcgtatataaagttacaccgttgttgttttacatcttttgggaagccaggaaagcgtttggaaaacgtatcacctttcccagattctcggattctcgactctttgcaacagcacttgcttgcggaactcttcctggaatgcattcactcagcatccccaaccgtgcaacgtgtaacttgtgcttttgcaaaagaagttgatctgaaattcctctgtagaatttagcttatacaattcagagaatagcagtttcactgccaacttttagtgggtgagaaattttagtttaggtgtttgggatcggacctcagtttctgttgtttcttttatgtggtggtttctatacatgaatcatagccaaaaacttttttggaaactgttggttgagatagttggttcttttaccccacgaagacatcaagatacacttgtaaataaagctgatagcatatattcatacctgttgtacacttgggtgaaaagtatggcagtgggagactaagatgtattaacctacctgtgaatcatatgttgtaggaaaagctgttcccatgtctaacaggacttgaattcaaagcatgtcaagtggatagtagatctgtggcgatatgagagggatgcagtgcctttccccattcattcctgatggaattgttatactaggttaacatttgtaatttttttctagttgtaatgtgtatgtctggtaaataggtattatattttggccttacaataccgtaacaatgtttgtcattttgaaatacttaatgccaagtaacaatgcatgctttggaaatttggaagatggttttattctttgagaagcaaatatgtttgcattaaatgctttgattgttcatatcaagaaattgattgaacgttctcaaaccctgtttacggtacttggtaagagggagccggtttgggagagaccattgcatcgctgtccaagtgtttcttgttaagtgcttttaaactggagaggctaacctcaaaatattttttttaactgcattctataataaatgggcacagtatgctccttacagaaaagttgtcattttatttctagaataaatctgtgaaccttct

SEQ ID NO: 174722 - DNA, 2164 bp, Homo sapiens
  Payload ID: 14308
  Gene Symbol: RCAN1
  Gene Name: regulator of calcineurin 1
  Uniprot ID: P53805
  ENST ID: ENST00000399272
  CDS Start-End: 49-564
gaactatagttgaaggctgctgccaatacaacaccactgtgaaacagaatggtgtatgccaaatttgagtccctctttaggacgtatgacaaggacatcacctttcagtattttaagagcttcaaacgagtcagaataaacttcagcaaccccttctccgcagcagatgccaggctccagctgcataagactgagtttctgggaaaggaaatgaagttatattttgctcagaccttacacataggaagctcacacctggctccgccaaatccagacaagcagtttctgatctcccctcccgcctctccgccagtgggatggaaacaagtggaagatgcgaccccagtcataaactatgatctcttatatgccatctccaagctggggccaggggaaaagtatgaattgcacgcagcgactgacaccactcccagcgtggtggtccatgtatgtgagagtgatcaagagaaggaggaagaagaggaaatggaaagaatgaggagacctaagccaaaaattatccagaccaggaggccggagtacacgccgatccacctcagctgaactggcacgcgacgaggacgcattccaaatcatactcacgggaggaatcttttactgtggaggtggctggtcacgacttcttcggaggtggcagccgagatcggggtggcagaaatcccagttcatgttgctcagaagagaatcaaggccgtgtccccttgttctaatgctgcacaccagttactgttcatggcacccgggaatgacttgggccaatcactgagtttgtggtgatcgcacaaggacatttgggactgtcttgagaaaacagataatgatagtgttttgtacttgttcttttctggtaggttctgtctgtgccaagggcaggttgatcagtgagctcaggagagagcttcctgtttctaagtggcctgcaggggccactctctactggtaggaagaggtaccacaggaagccgcctagtgcagagaggttgtgaaaacagcagcaatgcaatgtggaaattgtagcgtttcctttcttccctcatgttctcatgtttgtgcatgtatattactgatttacaagactaacctttgttcgtatataaagttacaccgttgttgttttacatcttttgggaagccaggaaagcgtttggaaaacgtatcacctttcccagattctcggattctcgactctttgcaacagcacttgcttgcggaactcttcctggaatgcattcactcagcatccccaaccgtgcaacgtgtaacttgtgcttttgcaaaagaagttgatctgaaattcctctgtagaatttagcttatacaattcagagaatagcagtttcactgccaacttttagtgggtgagaaattttagtttaggtgtttgggatcggacctcagtttctgttgtttcttttatgtggtggtttctatacatgaatcatagccaaaaacttttttggaaactgttggttgagatagttggttcttttaccccacgaagacatcaagatacacttgtaaataaagctgatagcatatattcatacctgttgtacacttgggtgaaaagtatggcagtgggagactaagatgtattaacctacctgtgaatcatatgttgtaggaaaagctgttcccatgtctaacaggacttgaattcaaagcatgtcaagtggatagtagatctgtggcgatatgagagggatgcagtgcctttccccattcattcctgatggaattgttatactaggttaacatttgtaatttttttctagttgtaatgtgtatgtctggtaaataggtattatattttggccttacaataccgtaacaatgtttgtcattttgaaatacttaatgccaagtaacaatgcatgctttggaaatttggaagatggttttattctttgagaagcaaatatgtttgcattaaatgctttgattgttcatatcaagaaattgattgaacgttctcaaaccctgtttacggtacttggtaagagggagccggtttgggagagaccattgcatcgctgtccaagtgtttcttgttaagtgcttttaaactggagaggctaacctcaaaatattttttttaactgcattctataataaatgggcacagtatgctccttacagaaaa

SEQ ID NO: 174723 - DNA, 2315 bp, Homo sapiens
  Payload ID: 14308
  Gene Symbol: RCAN1
  Gene Name: regulator of calcineurin 1
  Uniprot ID: P53805
  ENST ID: ENST00000443408
  CDS Start-End: 323-676
ccccctgcgctctcgccatcgccccgcatttactcgctggaggagggggtcacctcattcctagggaggaggaaacagacattgagcggcgacgtgactcagtgttcataaataggacgacgtccctgcattcccaatctgcactattggaagaaaagccaatgtttgggccaaatttgagtccctctttaggacgtatgacaaggacatcacctttcagtattttaagagcttcaaacgagtcagaataaacttcagcaaccccttctccgcagcagatgccaggctccagctgcataagactgagtttctgggaaaggaaatgaagttatattttgctcagaccttacacataggaagctcacacctggctccgccaaatccagacaagcagtttctgatctcccctcccgcctctccgccagtgggatggaaacaagtggaagatgcgaccccagtcataaactatgatctcttatatgccatctccaagctggggccaggggaaaagtatgaattgcacgcagcgactgacaccactcccagcgtggtggtccatgtatgtgagagtgatcaagagaaggaggaagaagaggaaatggaaagaatgaggagacctaagccaaaaattatccagaccaggaggccggagtacacgccgatccacctcagctgaactggcacgcgacgaggacgcattccaaatcatactcacgggaggaatcttttactgtggaggtggctggtcacgacttcttcggaggtggcagccgagatcggggtggcagaaatcccagttcatgttgctcagaagagaatcaaggccgtgtccccttgttctaatgctgcacaccagttactgttcatggcacccgggaatgacttgggccaatcactgagtttgtggtgatcgcacaaggacatttgggactgtcttgagaaaacagataatgatagtgttttgtacttgttcttttctggtaggttctgtctgtgccaagggcaggttgatcagtgagctcaggagagagcttcctgtttctaagtggcctgcaggggccactctctactggtaggaagaggtaccacaggaagccgcctagtgcagagaggttgtgaaaacagcagcaatgcaatgtggaaattgtagcgtttcctttcttccctcatgttctcatgtttgtgcatgtatattactgatttacaagactaacctttgttcgtatataaagttacaccgttgttgttttacatcttttgggaagccaggaaagcgtttggaaaacgtatcacctttcccagattctcggattctcgactctttgcaacagcacttgcttgcggaactcttcctggaatgcattcactcagcatccccaaccgtgcaacgtgtaacttgtgcttttgcaaaagaagttgatctgaaattcctctgtagaatttagcttatacaattcagagaatagcagtttcactgccaacttttagtgggtgagaaattttagtttaggtgtttgggatcggacctcagtttctgttgtttcttttatgtggtggtttctatacatgaatcatagccaaaaacttttttggaaactgttggttgagatagttggttcttttaccccacgaagacatcaagatacacttgtaaataaagctgatagcatatattcatacctgttgtacacttgggtgaaaagtatggcagtgggagactaagatgtattaacctacctgtgaatcatatgttgtaggaaaagctgttcccatgtctaacaggacttgaattcaaagcatgtcaagtggatagtagatctgtggcgatatgagagggatgcagtgcctttccccattcattcctgatggaattgttatactaggttaacatttgtaatttttttctagttgtaatgtgtatgtctggtaaataggtattatattttggccttacaataccgtaacaatgtttgtcattttgaaatacttaatgccaagtaacaatgcatgctttggaaatttggaagatggttttattctttgagaagcaaatatgtttgcattaaatgctttgattgttcatatcaagaaattgattgaacgttctcaaaccctgtttacggtacttggtaagagggagccggtttgggagagaccattgcatcgctgtccaagtgtttcttgttaagtgcttttaaactggagaggctaacctcaaaatattttttttaactgcattctataataaatgggcacagtatgctccttacagaaaagttgtcattttatttctagaataaatctgtgaaccttct

SEQ ID NO: 174724 - DNA, 2816 bp, Homo sapiens
  Payload ID: 14308
  Gene Symbol: RCAN1
  Gene Name: regulator of calcineurin 1
  ENST ID: ENST00000481448
  CDS Start-End: 488-1216
ataagcaccagctcaagaaggaacctacagcctcttggaaaggaatctcactaggggcttgactgcgtgggtctgtagcgctttcactgtaagaaagcaagatgcattttagaaactttaactacagttttagctccctgattgcctgtgtggcaaacagtgatatcttcagcgaaagtgaaaccaggccctgaacctgtattctaaaaatattcttcaaagtcatctctcccaaattctgaatcataacttcaaaactaaacagtgggtcacagtgcctattgatgaggtcatacaaaattccaaatgtacgaagacacacttttgccagaaacttgcccgtgctcaagagaggtggggaaaaagagtgagaggcggccagatgaactctaccgtccgccagctccgcgttccttcgcacgtgcctctgcgggatccctcgtgggaaagtctcagaaatgtccctaaactgaagaaaagccggggaatgcaaggagagcaaggtcgtaggttgttccgactgctccttaacgacctgcctggcagggaccgactaccctgctcctacccgcagccccatgtggagcaggcatccaccagtgcctccccgcgcttgctagcagtgaacattcctgaagacactctcctctcttatcctgaatcctcgctcccactgcagagacactgcgccttccataggttctccaaggccaaatttgagtccctctttaggacgtatgacaaggacatcacctttcagtattttaagagcttcaaacgagtcagaataaacttcagcaaccccttctccgcagcagatgccaggctccagctgcataagactgagtttctgggaaaggaaatgaagttatattttgctcagaccttacacataggaagctcacacctggctccgccaaatccagacaagcagtttctgatctcccctcccgcctctccgccagtgggatggaaacaagtggaagatgcgaccccagtcataaactatgatctcttatatgccatctccaagctggggccaggggaaaagtatgaattgcacgcagcgactgacaccactcccagcgtggtggtccatgtatgtgagagtgatcaagagaaggaggaagaagaggaaatggaaagaatgaggagacctaagccaaaaattatccagaccaggaggccggagtacacgccgatccacctcagctgaactggcacgcgacgaggacgcattccaaatcatactcacgggaggaatcttttactgtggaggtggctggtcacgacttcttcggaggtggcagccgagatcggggtggcagaaatcccagttcatgttgctcagaagagaatcaaggccgtgtccccttgttctaatgctgcacaccagttactgttcatggcacccgggaatgacttgggccaatcactgagtttgtggtgatcgcacaaggacatttgggactgtcttgagaaaacagataatgatagtgttttgtacttgttcttttctggtaggttctgtctgtgccaagggcaggttgatcagtgagctcaggagagagcttcctgtttctaagtggcctgcaggggccactctctactggtaggaagaggtaccacaggaagccgcctagtgcagagaggttgtgaaaacagcagcaatgcaatgtggaaattgtagcgtttcctttcttccctcatgttctcatgtttgtgcatgtatattactgatttacaagactaacctttgttcgtatataaagttacaccgttgttgttttacatcttttgggaagccaggaaagcgtttggaaaacgtatcacctttcccagattctcggattctcgactctttgcaacagcacttgcttgcggaactcttcctggaatgcattcactcagcatccccaaccgtgcaacgtgtaacttgtgcttttgcaaaagaagttgatctgaaattcctctgtagaatttagcttatacaattcagagaatagcagtttcactgccaacttttagtgggtgagaaattttagtttaggtgtttgggatcggacctcagtttctgttgtttcttttatgtggtggtttctatacatgaatcatagccaaaaacttttttggaaactgttggttgagatagttggttcttttaccccacgaagacatcaagatacacttgtaaataaagctgatagcatatattcatacctgttgtacacttgggtgaaaagtatggcagtgggagactaagatgtattaacctacctgtgaatcatatgttgtaggaaaagctgttcccatgtctaacaggacttgaattcaaagcatgtcaagtggatagtagatctgtggcgatatgagagggatgcagtgcctttccccattcattcctgatggaattgttatactaggttaacatttgtaatttttttctagttgtaatgtgtatgtctggtaaataggtattatattttggccttacaataccgtaacaatgtttgtcattttgaaatacttaatgccaagtaacaatgcatgctttggaaatttggaagatggttttattctttgagaagcaaatatgtttgcattaaatgctttgattgttcatatcaagaaattgattgaacgttctcaaaccctgtttacggtacttggtaagagggagccggtttgggagagaccattgcatcgctgtccaagtgtttcttgttaagtgcttttaaactggagaggctaacctcaaaatattttttttaactgcattctataataaatgggcacagtatgctccttacagaaaa

SEQ ID NO: 174725 - DNA, 2520 bp, Homo sapiens
  Payload ID: 14308
  Gene Symbol: RCAN1
  Gene Name: regulator of calcineurin 1
  Uniprot ID: P53805
  ENST ID: ENST00000487990
  CDS Start-End: 567-920
atgatttgtgcatcctcttttgctcgcttaggcaaattctggatttgtgttagagtggtcagaaatgccaagaacctgacttcttagattaaaagacaaaattgttggggggagaaaggttttttaatggtctgaacattttctcagttcagagcctgagatctgcatgagctcaccattgctctcgttaagtaatgttcactggctcaccgtggaaacttgaaggcatgtcagtgtacctgaaccgtgcctttttcaggactaactcaaagaccttcaggaagaaatatttgggtacagccatccgggaccacagaatcacagggcaggaatgtgaatgttgatgctggcgattgtgagctgcctgaccttaggcaagtagtctcaattcaccaagcctcctttcttcaaaggccaaatttgagtccctctttaggacgtatgacaaggacatcacctttcagtattttaagagcttcaaacgagtcagaataaacttcagcaaccccttctccgcagcagatgccaggctccagctgcataagactgagtttctgggaaaggaaatgaagttatattttgctcagaccttacacataggaagctcacacctggctccgccaaatccagacaagcagtttctgatctcccctcccgcctctccgccagtgggatggaaacaagtggaagatgcgaccccagtcataaactatgatctcttatatgccatctccaagctggggccaggggaaaagtatgaattgcacgcagcgactgacaccactcccagcgtggtggtccatgtatgtgagagtgatcaagagaaggaggaagaagaggaaatggaaagaatgaggagacctaagccaaaaattatccagaccaggaggccggagtacacgccgatccacctcagctgaactggcacgcgacgaggacgcattccaaatcatactcacgggaggaatcttttactgtggaggtggctggtcacgacttcttcggaggtggcagccgagatcggggtggcagaaatcccagttcatgttgctcagaagagaatcaaggccgtgtccccttgttctaatgctgcacaccagttactgttcatggcacccgggaatgacttgggccaatcactgagtttgtggtgatcgcacaaggacatttgggactgtcttgagaaaacagataatgatagtgttttgtacttgttcttttctggtaggttctgtctgtgccaagggcaggttgatcagtgagctcaggagagagcttcctgtttctaagtggcctgcaggggccactctctactggtaggaagaggtaccacaggaagccgcctagtgcagagaggttgtgaaaacagcagcaatgcaatgtggaaattgtagcgtttcctttcttccctcatgttctcatgtttgtgcatgtatattactgatttacaagactaacctttgttcgtatataaagttacaccgttgttgttttacatcttttgggaagccaggaaagcgtttggaaaacgtatcacctttcccagattctcggattctcgactctttgcaacagcacttgcttgcggaactcttcctggaatgcattcactcagcatccccaaccgtgcaacgtgtaacttgtgcttttgcaaaagaagttgatctgaaattcctctgtagaatttagcttatacaattcagagaatagcagtttcactgccaacttttagtgggtgagaaattttagtttaggtgtttgggatcggacctcagtttctgttgtttcttttatgtggtggtttctatacatgaatcatagccaaaaacttttttggaaactgttggttgagatagttggttcttttaccccacgaagacatcaagatacacttgtaaataaagctgatagcatatattcatacctgttgtacacttgggtgaaaagtatggcagtgggagactaagatgtattaacctacctgtgaatcatatgttgtaggaaaagctgttcccatgtctaacaggacttgaattcaaagcatgtcaagtggatagtagatctgtggcgatatgagagggatgcagtgcctttccccattcattcctgatggaattgttatactaggttaacatttgtaatttttttctagttgtaatgtgtatgtctggtaaataggtattatattttggccttacaataccgtaacaatgtttgtcattttgaaatacttaatgccaagtaacaatgcatgctttggaaatttggaagatggttttattctttgagaagcaaatatgtttgcattaaatgctttgattgttcatatcaagaaattgattgaacgttctcaaaccctgtttacggtacttggtaagagggagccggtttgggagagaccattgcatcgctgtccaagtgtttcttgttaagtgcttttaaactggagaggctaacctcaaaatattttttttaactgcattctataataaatgggcacagtatgctccttacagaaaa

SEQ ID NO: 174726 - DNA, 2686 bp, Homo sapiens
  Payload ID: 14308
  Gene Symbol: RCAN1
  Gene Name: regulator of calcineurin 1
  Uniprot ID: P53805
  ENST ID: ENST00000482533
  CDS Start-End: 733-1086
tttgttaccgtaagtagtgtctatgtattggcaactgttctgctgattcgatgaatgtaataaatcataccttcttaccttcttgtaaaatcacctgcattgggactaaaggccatagtcccctaagaggggaaaggcttttctctaagaaagaagttaggagttcttgaaaggattgatgatccacttcctcagtaaaaaatgtattgaggaggccaggcacggtggctcatgcctgtaatcccagcactttgggaggccgagggatcacctgaggacaggagcttgagaccagccttgccaacatggcaaagccccgtctctactaaaaatacaaaaattagccaggtgtgctggcaggcacctgtaaccccagctactcgggaggctgaggcaggagaatcacttgaacctgggaggtggaggttgcagtgagccaaaactgcaccactgcactccagcctgggtgacagagcaagactctgtctcgaagaaaaaaaaaaaagtaatgacatcatctagtcaagggtcatatgcaggtaaatttcaactccttttatttttattgttatttttcaggccaaatttgagtccctctttaggacgtatgacaaggacatcacctttcagtattttaagagcttcaaacgagtcagaataaacttcagcaaccccttctccgcagcagatgccaggctccagctgcataagactgagtttctgggaaaggaaatgaagttatattttgctcagaccttacacataggaagctcacacctggctccgccaaatccagacaagcagtttctgatctcccctcccgcctctccgccagtgggatggaaacaagtggaagatgcgaccccagtcataaactatgatctcttatatgccatctccaagctggggccaggggaaaagtatgaattgcacgcagcgactgacaccactcccagcgtggtggtccatgtatgtgagagtgatcaagagaaggaggaagaagaggaaatggaaagaatgaggagacctaagccaaaaattatccagaccaggaggccggagtacacgccgatccacctcagctgaactggcacgcgacgaggacgcattccaaatcatactcacgggaggaatcttttactgtggaggtggctggtcacgacttcttcggaggtggcagccgagatcggggtggcagaaatcccagttcatgttgctcagaagagaatcaaggccgtgtccccttgttctaatgctgcacaccagttactgttcatggcacccgggaatgacttgggccaatcactgagtttgtggtgatcgcacaaggacatttgggactgtcttgagaaaacagataatgatagtgttttgtacttgttcttttctggtaggttctgtctgtgccaagggcaggttgatcagtgagctcaggagagagcttcctgtttctaagtggcctgcaggggccactctctactggtaggaagaggtaccacaggaagccgcctagtgcagagaggttgtgaaaacagcagcaatgcaatgtggaaattgtagcgtttcctttcttccctcatgttctcatgtttgtgcatgtatattactgatttacaagactaacctttgttcgtatataaagttacaccgttgttgttttacatcttttgggaagccaggaaagcgtttggaaaacgtatcacctttcccagattctcggattctcgactctttgcaacagcacttgcttgcggaactcttcctggaatgcattcactcagcatccccaaccgtgcaacgtgtaacttgtgcttttgcaaaagaagttgatctgaaattcctctgtagaatttagcttatacaattcagagaatagcagtttcactgccaacttttagtgggtgagaaattttagtttaggtgtttgggatcggacctcagtttctgttgtttcttttatgtggtggtttctatacatgaatcatagccaaaaacttttttggaaactgttggttgagatagttggttcttttaccccacgaagacatcaagatacacttgtaaataaagctgatagcatatattcatacctgttgtacacttgggtgaaaagtatggcagtgggagactaagatgtattaacctacctgtgaatcatatgttgtaggaaaagctgttcccatgtctaacaggacttgaattcaaagcatgtcaagtggatagtagatctgtggcgatatgagagggatgcagtgcctttccccattcattcctgatggaattgttatactaggttaacatttgtaatttttttctagttgtaatgtgtatgtctggtaaataggtattatattttggccttacaataccgtaacaatgtttgtcattttgaaatacttaatgccaagtaacaatgcatgctttggaaatttggaagatggttttattctttgagaagcaaatatgtttgcattaaatgctttgattgttcatatcaagaaattgattgaacgttctcaaaccctgtttacggtacttggtaagagggagccggtttgggagagaccattgcatcgctgtccaagtgtttcttgttaagtgcttttaaactggagaggctaacctcaaaatattttttttaactgcattctataataaatgggcacagtatgctccttacagaaaa

SEQ ID NO: 174727 - DNA, 935 bp, Homo sapiens
  Payload ID: 14308
  Gene Symbol: RCAN1
  Gene Name: regulator of calcineurin 1
  ENST ID: ENST00000492600
  CDS Start-End: 76-693
acagcctcttggaaaggaatctcactaggggcttgactgcgtgggtctgtagcgctttcactgtaagaaagcaagatgcattttagaaactttaactacagttttagctccctgattgcctgtgtggcaaacagtgatatcttcagcgaaagtgaaaccagggccaaatttgagtccctctttaggacgtatgacaaggacatcacctttcagtattttaagagcttcaaacgagtcagaataaacttcagcaaccccttctccgcagcagatgccaggctccagctgcataagactgagtttctgggaaaggaaatgaagttatattttgctcagaccttacacataggaagctcacacctggctccgccaaatccagacaagcagtttctgatctcccctcccgcctctccgccagtgggatggaaacaagtggaagatgcgaccccagtcataaactatgatctcttatatgccatctccaagctggggccaggtgagcagggccctcgggtgggagggaggcagggggagacacagctgctgccctgcaccagggagcagtaccaccactacccccgtagctctcctgagcccatgccggcatgttttgtgagcttctctgtattcttctgcgccaccgtcccttgtgctgggagcatgcctgcctcttggcaccacctgcagtgttagagagactgcggctgatcgtggggaccctgcatcacgcccctccaccccccgcagtgtcccaggaatccattcctgtgtccactgagcacagcctgcgtgggaggcctgagccccggccccaggttctgtcgctccggatagggatgagtgattggactttggaaagggaaaatcgatgccccctttaagaaatgttatttttaatcaaaataaattctccctttcctgtgattctcacctgg

SEQ ID NO: 174728 - DNA, 2257 bp, Homo sapiens
  Payload ID: 14308
  Gene Symbol: RCAN1
  Gene Name: regulator of calcineurin 1
  Uniprot ID: P53805
  ENST ID: ENST00000620920
  CDS Start-End: 265-618
attttagagagttaaaaagtaacagactgagataaaagcgatcgtggaaatttttaaaaactacttattttaagaaatgcaaaactttctaccaactttgttatttttcaagccaaatttgagtccctctttaggacgtatgacaaggacatcacctttcagtattttaagagcttcaaacgagtcagaataaacttcagcaaccccttctccgcagcagatgccaggctccagctgcataagactgagtttctgggaaaggaaatgaagttatattttgctcagaccttacacataggaagctcacacctggctccgccaaatccagacaagcagtttctgatctcccctcccgcctctccgccagtgggatggaaacaagtggaagatgcgaccccagtcataaactatgatctcttatatgccatctccaagctggggccaggggaaaagtatgaattgcacgcagcgactgacaccactcccagcgtggtggtccatgtatgtgagagtgatcaagagaaggaggaagaagaggaaatggaaagaatgaggagacctaagccaaaaattatccagaccaggaggccggagtacacgccgatccacctcagctgaactggcacgcgacgaggacgcattccaaatcatactcacgggaggaatcttttactgtggaggtggctggtcacgacttcttcggaggtggcagccgagatcggggtggcagaaatcccagttcatgttgctcagaagagaatcaaggccgtgtccccttgttctaatgctgcacaccagttactgttcatggcacccgggaatgacttgggccaatcactgagtttgtggtgatcgcacaaggacatttgggactgtcttgagaaaacagataatgatagtgttttgtacttgttcttttctggtaggttctgtctgtgccaagggcaggttgatcagtgagctcaggagagagcttcctgtttctaagtggcctgcaggggccactctctactggtaggaagaggtaccacaggaagccgcctagtgcagagaggttgtgaaaacagcagcaatgcaatgtggaaattgtagcgtttcctttcttccctcatgttctcatgtttgtgcatgtatattactgatttacaagactaacctttgttcgtatataaagttacaccgttgttgttttacatcttttgggaagccaggaaagcgtttggaaaacgtatcacctttcccagattctcggattctcgactctttgcaacagcacttgcttgcggaactcttcctggaatgcattcactcagcatccccaaccgtgcaacgtgtaacttgtgcttttgcaaaagaagttgatctgaaattcctctgtagaatttagcttatacaattcagagaatagcagtttcactgccaacttttagtgggtgagaaattttagtttaggtgtttgggatcggacctcagtttctgttgtttcttttatgtggtggtttctatacatgaatcatagccaaaaacttttttggaaactgttggttgagatagttggttcttttaccccacgaagacatcaagatacacttgtaaataaagctgatagcatatattcatacctgttgtacacttgggtgaaaagtatggcagtgggagactaagatgtattaacctacctgtgaatcatatgttgtaggaaaagctgttcccatgtctaacaggacttgaattcaaagcatgtcaagtggatagtagatctgtggcgatatgagagggatgcagtgcctttccccattcattcctgatggaattgttatactaggttaacatttgtaatttttttctagttgtaatgtgtatgtctggtaaataggtattatattttggccttacaataccgtaacaatgtttgtcattttgaaatacttaatgccaagtaacaatgcatgctttggaaatttggaagatggttttattctttgagaagcaaatatgtttgcattaaatgctttgattgttcatatcaagaaattgattgaacgttctcaaaccctgtttacggtacttggtaagagggagccggtttgggagagaccattgcatcgctgtccaagtgtttcttgttaagtgcttttaaactggagaggctaacctcaaaatattttttttaactgcattctataataaatgggcacagtatgctccttacagaaaagttgtcattttatttctagaataaatctgtgaaccttct

SEQ ID NO: 174729 - DNA, 3240 bp, Homo sapiens
  Payload ID: 14309
  Gene Symbol: RCAN2
  Gene Name: regulator of calcineurin 2
  Uniprot ID: Q14206
  ENST ID: ENST00000306764
  CDS Start-End: 106-837
ccagagggcgccagcgcccaccaagcgcagaagcccgggaggaccatccaggggctccccgacatttcctcagttagccagagtcggggggctcagacatctggaatgaggggagaatcatacttcatcggaatgaggagcccagggcagcagggacacgtccctgaagatggaggacttttcttactgtgctgcatagacagggactgggctgtcactcgttgttttgcagaagaagcctttcaagcaatcactgacttcaatgacctccccaactcgttgtttgcgtgcaatgttcaccagtcagtgtttgaaggagaagagagcaaggaaaaatttgagggactgtttcggacttatgatgactgtgtgacgttccagctatttaagagtttcagacgtgtccgtataaacttcagcaatcctaaatctgcagcccgagctaggatagagcttcatgaaacccaattcagagggaaaaaattaaagctctactttgcacaggttcagactccagagacagatggagacaaactgcacttggctccaccccagcctgccaaacagtttctcatctcgcccccttcctccccacctgttggctggcagcccatcaacgatgccacgccagtcctcaactatgacctcctctatgctgtggccaaactaggaccaggagagaagtatgagctccatgcagggactgagtccaccccaagtgtcgtcgtgcacgtgtgcgacagtgacatagaggaagaagaggacccaaagacttccccaaagccaaaaatcatccaaactcggcgtcctggcctgccaccctccgtgtccaactgagctgcctgctccttctcgataatagccgtctcctctttatcatgctttttccccctgttgtttgtcaaaaaaaattgcctttaaattcctgggtgtttggttgtttgagattccttccttgttatcaagcctctcggacaaaagggctaggaaaaggtgatatgtctcctgatcatatcatacccattaagtataacccattatttagaaggttctagggaaaaaagtagtattttcttattaaacaatcagcacagcctatatctttgttctctcatgttgatccaagccagagacatcagtaacaaatagcacctgtgttgtttgtgagctgtttcagtcccagtcctgatgtgtgtgcgttgttctctcctggccacttaaataggaccatatgtaaacttgactttgactgcatgagatatccctatctggtctcactcagtcctctgcatcccaacattcccaggacatgcatgatcaccagcatttattttcattatttgaggatatcttataactcacagattgtcagcatccagccatgtcctatctagattaggaaaatgatcagaatattccagctcaacaagtctgggtatattcactattgtgagtcaatacaccatagctctgttgaaattcctggaggcaaaattgaccttggccccaaagatattcctcaatagatttcaaacaccactcccctgtagaactctcccagcctcgttggggaggcttgtccagggtgatagagactgatttcagacaaacctatttattacaaaagtttcatggtgtctgaatgattgttttctctctttgtatatttgtacaaatgtttcagctgtgcttttaaaaaatctggatgttttttatttagtgattgttcgacaattagctgcttcaaaacataatgtgcattgcttatgaatgccttcatatactaatacagatactctgataatattacactctaataaggataatgctgaattttgaaaggacacaaaacatctaatgccaatatatacatgattagccaacatctttgctatcaagaccacttgtttttaaataaagatgcaagtgtcagttgtagattattgggatgaagctaaatccccagaatgcagcagcagctgagcatgttaaaatggggaaggatgatagctacatgtatgccggtcctactcacgcgacacccgtgtgctcaaaaaagttatttgtttttgttacgtgtgatttttctatttctctagcccaaagtgcattacagaagatacacctatagaaccattaccttctgctatgtgtgccaggcctcatctactcctgtacattaatgaattactttagatgcaaacgcagattacaatggagtggggaagtactttcattacccaagcctcagaaaaacacacaagaacaataacacagcaaacagattgagggattgttgtggtttttgactaaggtgtatgttagtttcatcagaaacttaaaacatagactgatcactcagaaattaaagtccgttttactgtgaatatagcaatatagtactggacacagtactggtgaaactgaggagagcattgcttgtaaaatcctgagtttccataaggaaaatgaaaactccttttaaaaataaaatctgaggagtgtacaataagcatatgctttgactttcctttgctgtggaggtttttggtttttcattgatgataaacgactacagacttagtagtggagaaatggtgtcctctagtggaagaaatagtaggctccgctattcagatgcagagcactgcagcatccagcctttcaaagctgactcttctcaatcatctgtgggtcatttgacttgattttttaagctaccctgaatttccagaatgcaggttctaaagaaatctagatgagagaaagtatttgaaaatgatttttaaatgttttttaaaagacacatctgacatttttaacaacttagtaaaagttgaaatgaccattctgtgtagtcataaaagaaacacaatgaagtgtatggcctctggagttagtcttagtaaaacttattgctctgtgtcaatgttaacctgtctcagatcaagtaattctttcactaggttgggtttggggaggggggaaaagaggggcttttcctaggagaacgataagaaatggaaagactccttgaagtgttgcaagggaacctcctagcactgtgaaagtcagaatcgcctcagcatttccatgacgcacattatgcaaatctctttagcactattttaagtttgaaaactttaacaatgaaggggaaggggaagatttccaccaactgaatcatttgtgcacgtgtatagctcaaagagcttagacttcaaatatatctggtgaatg

SEQ ID NO: 174730 - DNA, 3188 bp, Homo sapiens
  Payload ID: 14309
  Gene Symbol: RCAN2
  Gene Name: regulator of calcineurin 2
  Uniprot ID: Q14206
  ENST ID: ENST00000330430
  CDS Start-End: 190-783
ctctgctgtgctgcctcagacgcggagggctgcgtgcagtgggagcgggctccaggagcccgagcctccagccgtccccagagcaaggcagcaccgaggcctggccacagcaatatccatctggaagctcttcccttcactcccaactctgaggttgcctaactctttattaaaaattcagaagggggaatgccagcccctagcatggactgtgatgtttccactctggttgcctgtgtggtggatgtcgaggtctttaccaatcaggaggttaaggaaaaatttgagggactgtttcggacttatgatgactgtgtgacgttccagctatttaagagtttcagacgtgtccgtataaacttcagcaatcctaaatctgcagcccgagctaggatagagcttcatgaaacccaattcagagggaaaaaattaaagctctactttgcacaggttcagactccagagacagatggagacaaactgcacttggctccaccccagcctgccaaacagtttctcatctcgcccccttcctccccacctgttggctggcagcccatcaacgatgccacgccagtcctcaactatgacctcctctatgctgtggccaaactaggaccaggagagaagtatgagctccatgcagggactgagtccaccccaagtgtcgtcgtgcacgtgtgcgacagtgacatagaggaagaagaggacccaaagacttccccaaagccaaaaatcatccaaactcggcgtcctggcctgccaccctccgtgtccaactgagctgcctgctccttctcgataatagccgtctcctctttatcatgctttttccccctgttgtttgtcaaaaaaaattgcctttaaattcctgggtgtttggttgtttgagattccttccttgttatcaagcctctcggacaaaagggctaggaaaaggtgatatgtctcctgatcatatcatacccattaagtataacccattatttagaaggttctagggaaaaaagtagtattttcttattaaacaatcagcacagcctatatctttgttctctcatgttgatccaagccagagacatcagtaacaaatagcacctgtgttgtttgtgagctgtttcagtcccagtcctgatgtgtgtgcgttgttctctcctggccacttaaataggaccatatgtaaacttgactttgactgcatgagatatccctatctggtctcactcagtcctctgcatcccaacattcccaggacatgcatgatcaccagcatttattttcattatttgaggatatcttataactcacagattgtcagcatccagccatgtcctatctagattaggaaaatgatcagaatattccagctcaacaagtctgggtatattcactattgtgagtcaatacaccatagctctgttgaaattcctggaggcaaaattgaccttggccccaaagatattcctcaatagatttcaaacaccactcccctgtagaactctcccagcctcgttggggaggcttgtccagggtgatagagactgatttcagacaaacctatttattacaaaagtttcatggtgtctgaatgattgttttctctctttgtatatttgtacaaatgtttcagctgtgcttttaaaaaatctggatgttttttatttagtgattgttcgacaattagctgcttcaaaacataatgtgcattgcttatgaatgccttcatatactaatacagatactctgataatattacactctaataaggataatgctgaattttgaaaggacacaaaacatctaatgccaatatatacatgattagccaacatctttgctatcaagaccacttgtttttaaataaagatgcaagtgtcagttgtagattattgggatgaagctaaatccccagaatgcagcagcagctgagcatgttaaaatggggaaggatgatagctacatgtatgccggtcctactcacgcgacacccgtgtgctcaaaaaagttatttgtttttgttacgtgtgatttttctatttctctagcccaaagtgcattacagaagatacacctatagaaccattaccttctgctatgtgtgccaggcctcatctactcctgtacattaatgaattactttagatgcaaacgcagattacaatggagtggggaagtactttcattacccaagcctcagaaaaacacacaagaacaataacacagcaaacagattgagggattgttgtggtttttgactaaggtgtatgttagtttcatcagaaacttaaaacatagactgatcactcagaaattaaagtccgttttactgtgaatatagcaatatagtactggacacagtactggtgaaactgaggagagcattgcttgtaaaatcctgagtttccataaggaaaatgaaaactccttttaaaaataaaatctgaggagtgtacaataagcatatgctttgactttcctttgctgtggaggtttttggtttttcattgatgataaacgactacagacttagtagtggagaaatggtgtcctctagtggaagaaatagtaggctccgctattcagatgcagagcactgcagcatccagcctttcaaagctgactcttctcaatcatctgtgggtcatttgacttgattttttaagctaccctgaatttccagaatgcaggttctaaagaaatctagatgagagaaagtatttgaaaatgatttttaaatgttttttaaaagacacatctgacatttttaacaacttagtaaaagttgaaatgaccattctgtgtagtcataaaagaaacacaatgaagtgtatggcctctggagttagtcttagtaaaacttattgctctgtgtcaatgttaacctgtctcagatcaagtaattctttcactaggttgggtttggggaggggggaaaagaggggcttttcctaggagaacgataagaaatggaaagactccttgaagtgttgcaagggaacctcctagcactgtgaaagtcagaatcgcctcagcatttccatgacgcacattatgcaaatctctttagcactattttaagtttgaaaactttaacaatgaaggggaaggggaagatttccaccaactgaatcatttgtgcacgtgtatagctcaaagagcttagacttcaaatatatctggtgaatgac

SEQ ID NO: 174731 - DNA, 3327 bp, Homo sapiens
  Payload ID: 14309
  Gene Symbol: RCAN2
  Gene Name: regulator of calcineurin 2
  Uniprot ID: Q14206
  ENST ID: ENST00000371374
  CDS Start-End: 193-924
agagggaggcggggcgcgccgcgccgcgtacggccccacgcaaaggcccgcgggcaccgcgccgcccccacgcgctcgcaccggcgggcaggtgagcaggcagcgccgcgcgctagcagctggcccccgtagacgccccagccgccgcctccgcctccgcctccgccggcgcatcgcggacgcccagcaggaatgaggggagaatcatacttcatcggaatgaggagcccagggcagcagggacacgtccctgaagatggaggacttttcttactgtgctgcatagacagggactgggctgtcactcgttgttttgcagaagaagcctttcaagcaatcactgacttcaatgacctccccaactcgttgtttgcgtgcaatgttcaccagtcagtgtttgaaggagaagagagcaaggaaaaatttgagggactgtttcggacttatgatgactgtgtgacgttccagctatttaagagtttcagacgtgtccgtataaacttcagcaatcctaaatctgcagcccgagctaggatagagcttcatgaaacccaattcagagggaaaaaattaaagctctactttgcacaggttcagactccagagacagatggagacaaactgcacttggctccaccccagcctgccaaacagtttctcatctcgcccccttcctccccacctgttggctggcagcccatcaacgatgccacgccagtcctcaactatgacctcctctatgctgtggccaaactaggaccaggagagaagtatgagctccatgcagggactgagtccaccccaagtgtcgtcgtgcacgtgtgcgacagtgacatagaggaagaagaggacccaaagacttccccaaagccaaaaatcatccaaactcggcgtcctggcctgccaccctccgtgtccaactgagctgcctgctccttctcgataatagccgtctcctctttatcatgctttttccccctgttgtttgtcaaaaaaaattgcctttaaattcctgggtgtttggttgtttgagattccttccttgttatcaagcctctcggacaaaagggctaggaaaaggtgatatgtctcctgatcatatcatacccattaagtataacccattatttagaaggttctagggaaaaaagtagtattttcttattaaacaatcagcacagcctatatctttgttctctcatgttgatccaagccagagacatcagtaacaaatagcacctgtgttgtttgtgagctgtttcagtcccagtcctgatgtgtgtgcgttgttctctcctggccacttaaataggaccatatgtaaacttgactttgactgcatgagatatccctatctggtctcactcagtcctctgcatcccaacattcccaggacatgcatgatcaccagcatttattttcattatttgaggatatcttataactcacagattgtcagcatccagccatgtcctatctagattaggaaaatgatcagaatattccagctcaacaagtctgggtatattcactattgtgagtcaatacaccatagctctgttgaaattcctggaggcaaaattgaccttggccccaaagatattcctcaatagatttcaaacaccactcccctgtagaactctcccagcctcgttggggaggcttgtccagggtgatagagactgatttcagacaaacctatttattacaaaagtttcatggtgtctgaatgattgttttctctctttgtatatttgtacaaatgtttcagctgtgcttttaaaaaatctggatgttttttatttagtgattgttcgacaattagctgcttcaaaacataatgtgcattgcttatgaatgccttcatatactaatacagatactctgataatattacactctaataaggataatgctgaattttgaaaggacacaaaacatctaatgccaatatatacatgattagccaacatctttgctatcaagaccacttgtttttaaataaagatgcaagtgtcagttgtagattattgggatgaagctaaatccccagaatgcagcagcagctgagcatgttaaaatggggaaggatgatagctacatgtatgccggtcctactcacgcgacacccgtgtgctcaaaaaagttatttgtttttgttacgtgtgatttttctatttctctagcccaaagtgcattacagaagatacacctatagaaccattaccttctgctatgtgtgccaggcctcatctactcctgtacattaatgaattactttagatgcaaacgcagattacaatggagtggggaagtactttcattacccaagcctcagaaaaacacacaagaacaataacacagcaaacagattgagggattgttgtggtttttgactaaggtgtatgttagtttcatcagaaacttaaaacatagactgatcactcagaaattaaagtccgttttactgtgaatatagcaatatagtactggacacagtactggtgaaactgaggagagcattgcttgtaaaatcctgagtttccataaggaaaatgaaaactccttttaaaaataaaatctgaggagtgtacaataagcatatgctttgactttcctttgctgtggaggtttttggtttttcattgatgataaacgactacagacttagtagtggagaaatggtgtcctctagtggaagaaatagtaggctccgctattcagatgcagagcactgcagcatccagcctttcaaagctgactcttctcaatcatctgtgggtcatttgacttgattttttaagctaccctgaatttccagaatgcaggttctaaagaaatctagatgagagaaagtatttgaaaatgatttttaaatgttttttaaaagacacatctgacatttttaacaacttagtaaaagttgaaatgaccattctgtgtagtcataaaagaaacacaatgaagtgtatggcctctggagttagtcttagtaaaacttattgctctgtgtcaatgttaacctgtctcagatcaagtaattctttcactaggttgggtttggggaggggggaaaagaggggcttttcctaggagaacgataagaaatggaaagactccttgaagtgttgcaagggaacctcctagcactgtgaaagtcagaatcgcctcagcatttccatgacgcacattatgcaaatctctttagcactattttaagtttgaaaactttaacaatgaaggggaaggggaagatttccaccaactgaatcatttgtgcacgtgtatagctcaaagagcttagacttcaaatatatctggtgaatg

SEQ ID NO: 174732 - DNA, 2457 bp, Homo sapiens
  Payload ID: 14309
  Gene Symbol: RCAN2
  Gene Name: regulator of calcineurin 2
  ENST ID: ENST00000405162
  CDS Start-End: 194-868
gttactctgctgtgctgcctcagacgcggagggctgcgtgcagtgggagcgggctccaggagcccgagcctccagccgtccccagagcaaggcagcaccgaggcctggccacagcaatatccatctggaagctcttcccttcactcccaactctgaggttgcctaactctttattaaaaattcagaagggggaatgccagcccctagcatggactgtgatgtttccactctggttgcctgtgtggtggatgtcgaggtctttaccaatcaggaggttaaggaaaaatttgagggactgtttcggacttatgatgactgtgtgacgttccagctatttaagagtttcagacgtgtccgtataaacttcagcaatcctaaatctgcagcccgagctaggatagagcttcatgaaacccaattcagagggaaaaaattaaagctctactttgcacaggttcagactccagagacagatggagacaaactgcacttggctccaccccagcctgccaaacagtttctcatctcgcccccttcctccccacctgttggctggcagcccatcaacgatgccacgccagtcctcaactatgacctcctctatgctgtggccaaactaggaccaggagagaagtatgagctccatgcagggactgagtccaccccaagtgtcgtcgtgcacgtgtgcgacagtgacatagaggaagaagaggacccaaagacttccccaaagccaaaaatcatccaaactcggcgtcctggcctgccaccctccgtgtccaacgctgcctgctccttctcgataatagccgtctcctctttatcatgctttttccccctgttgtttgtcaaaaaaaattgcctttaaattcctgggtgtttggttgtttgagattccttccttgttatcaagcctctcggacaaaagggctaggaaaaggtgatatgtctcctgatcatatcatacccattaagtataacccattatttagaaggttctagggaaaaaagtagtattttcttattaaacaatcagcacagcctatatctttgttctctcatgttgatccaagccagagacatcagtaacaaatagcacctgtgttgtttgtgagctgtttcagtcccagtcctgatgtgtgtgcgttgttctctcctggccacttaaataggaccatatgtaaacttgactttgactgcatgagatatccctatctggtctcactcagtcctctgcatcccaacattcccaggacatgcatgatcaccagcatttattttcattatttgaggatatcttataactcacagattgtcagcatccagccatgtcctatctagattaggaaaatgatcagaatattccagctcaacaagtctgggtatattcactattgtgagtcaatacaccatagctctgttgaaattcctggaggcaaaattgaccttggccccaaagatattcctcaatagatttcaaacaccactcccctgtagaactctcccagcctcgttggggaggcttgtccagggtgatagagactgatttcagacaaacctatttattacaaaagtttcatggtgtctgaatgattgttttctctctttgtatatttgtacaaatgtttcagctgtgcttttaaaaaatctggatgttttttatttagtgattgttcgacaattagctgcttcaaaacataatgtgcattgcttatgaatgccttcatatactaatacagatactctgataatattacactctaataaggataatgctgaattttgaaaggacacaaaacatctaatgccaatatatacatgattagccaacatctttgctatcaagaccacttgtttttaaataaagatgcaagtgtcagttgtagattattgggatgaagctaaatccccagaatgcagcagcagctgagcatgttaaaatggggaaggatgatagctacatgtatgccggtcctactcacgcgacacccgtgtgctcaaaaaagttatttgtttttgttacgtgtgatttttctatttctctagcccaaagtgcattacagaagatacacctatagaaccattaccttctgctatgtgtgccaggcctcatctactcctgtacattaatgaattactttagatgcaaacgcagattacaatggagtggggaagtactttcattacccaagcctcagaaaaacacacaagaacaataacacagcaaacagattgagggattgttgtggtttttgactaaggtgtatgttagtttcatcagaaacttaaaacatagactgatcactcagaaattaaagtccgttttactgtgaatatagcaatatagtactggacacagtactggtgaaactgaggagagcattgcttgtaaaatcctgagtttccataaggaaaatgaaaactccttttaaaaataaaatctgaggagtgtacaat

SEQ ID NO: 174733 - DNA, 960 bp, Homo sapiens
  Payload ID: 14310
  Gene Symbol: RGCC
  Gene Name: regulator of cell cycle
  Uniprot ID: Q9H4X1
  ENST ID: ENST00000379359
  CDS Start-End: 150-563
gcggaccgtgctgggagcggcgcggctggagcgcagcgccgaagggactggcagggctgaagtgtgcgggacagcaagcccccgaatagccccggctgccacctcgcaggacccaaggccacgcgcgccgggcccagctgagccgcctcatgaagccgcccgcggcgcagggcagccccgcggccgccgcggccgcagccccggccctggactcggcggccgcggaggacctgtcggacgcgctgtgcgagtttgacgcggtgctggccgacttcgcgtcgcccttccacgagcgccacttccactacgaggagcacctggagcgcatgaagcggcgcagcagcgccagtgtcagcgacagcagcggcttcagcgactcggagagtgcagattcactttataggaacagcttcagcttcagtgatgaaaaactgaattctccaacagactctaccccagctcttctctctgccactgtcactcctcagaaagctaaattaggagacacaaaagagctagaagccttcattgctgatcttgacaaaactttagcaagtatgtgaaacaagaagttctgggtcctttcatcataagggagaagcttcagaaagttccgaggacctgctaaaatcagctactagaatctgctgccagaggggacaaagacgtgcactcaaccttctaccaggccactctcaggctcaccttaaaatcagcccttgatcccatttctgggcaatttagacagtgaaactgactttgtttacctgcttgcagcatattagaacagacgatccatgctaatattgtattttctcttaaaacatagctttcctgtaatttaaagtgcttttatgaaaatatttgtaattaattatatatagttggaaatagcagtaagctttcccattataatatatttttgtatacaaataaaatttgaactgaagtctgcttcct

SEQ ID NO: 174734 - DNA, 3816 bp, Homo sapiens
  Payload ID: 14311
  Gene Symbol: RCBTB1
  Gene Name: regulator of chromosome condensation (RCC1) and BTB (POZ) domain containing protein 1
  Uniprot ID: Q8NDN9
  ENST ID: ENST00000258646
  CDS Start-End: 45-1640
cagagatgtcggcttatttataggaattgcttgaagccagagtcatggtggatgtcggaaagtggcccatcttcactctactctcccctcaagagatcgcgtctattcggaaggcgtgtgtcttcggcacctcagccagtgaagcactgtacgttactgacaatgatgaggtctttgtatttggactgaactatagtaactgtctaggaactggagataaccagagtacacttgtacccaaaaagctagaaggcttatgtggaaagaagattaaaagcctcagttacgggagtggaccacatgttcttctcagcaccgaagatggagtggtttatgcctggggccacaatggatatagccagcttgggaatgggacgaccaaccaaggcattgctcccgtccaggtctgtaccaatctcttgatcaagcaagtggtggaagtagcttgtggctcacatcattcaatggctctggcagctgatggagaggtgtttgcttggggttataacaactgtggccaagtgggatcaggttctacagcaaatcaaccaactcctcgaaaagttacaaactgtttacatattaagagggtagttggcattgcctgtggtcagacttcatccatggctgttctggacaatggcgaggtatatggctggggttacaatggcaacggtcagctgggcctgggaaacaatggcaaccagctgacccctgtgagagtggcagctttgcacagcgtgtgtgtgaaccagattgtctgcggttacgcacatactctagcactaacagatgagggcttgctgtatgcctggggagctaacacatatgggcagctgggaactggcaataaaaataacctgctaagcccagcacacatcatggtggagaaagaaagggtggtagagattgcagcctgtcactctgcccacacgtctgcagccaagacgcagggtgggcacgtgtacatgtggggccagtgccggggtcagtccgtgatcctcccgcacctcacccacttctcctgcaccgacgacgtgtttgcctgctttgccactcccgccgtctcgtggcgcctcctgtctgtggagcatgaagactttttaacagttgcagagtcactgaagaaagaatttgatagtccagaaactgctgatctgaagtttcgaattgatggaaaatatattcatgtccataaagctgttttgaaaatcaggtgtgagcattttcgatccatgttccagtcgtattggaatgaagacatgaaggaagtgatagaaatcgatcagttttcttacccagtgtatcgtgcctttctccagtacctctacacagacacagtcgacctgccgccagaagatgctataggtcttctggatttggcgacatcttactgtgaaaacagactgaaaaaactttgtcagcacattatcaagagaggaattactgtggagaatgccttttcgctattctctgctgcagtcagatatgatgcagaggatttagaagaattctgctttaagttttgcatcaatcatttgacagaagttacacagactgcagcattttggcaaatggatggccctctgctaaaggaattcattgctaaagccagtaaatgtggagcctttaagaactgaagcgcaaggctgctgggttctgtgtgagtgctctggggcactgttgaggatgtgtccagtttgtgctctacgggtgatgtgattctgcaggtaaaagaccatcaggttgtttttttccacatctgggacacagttgtttgtgtaggaacataacaagggtgtacggcttttcttgagcccattttaaacaacccttgtttccagataagtgtattttaaatgtgacctttcgtaaatttgggctggaacatgtaaaagggtgaaagttagtcgtttttggtcttcttttcatttttgattagaggaacttctgaacttggaaaggggaagttggcagcaactctcctgggccacgtatcaacaatcttctgacagcaggagcagtgatagttggggaattgtgagatgaatggagaggccccatcgtgaattaaagatgctgacctggggattgttaagtgctgccttagttgctagtttagtagccttactgtgaaggaataattaagattgtttcagacttttgtttgtgtgcttgcgttgatgacttttttaacttcaagataaatcaaagtaataagtttaacgtatattaaacctgttgaaatgataattatgtaaagataaatattctaggttagtcaagatttctcttaagatttaagtgcataaagaatagtaatttagaagtatccgtgaaaagttgataatgaaagaaatttgatgaaggtgaatattttataaattagaatctccactacttatccaatggtgttttatttcattaaggtagaacttgagaactcaagtttaaattgtcccccaccaccttcttctataaatgcaaacttaagaggaaaataatgacatgtatagtatactcttgccttcctaaattatgactgctgaatcatcatatctactatatatgactggaagaagtggttcttcaagtcaaccctcttacaagacttagtggaatttgctttatctactttaggccaaatccatcacacattggcttatgtgaaactttatcatctttcacttttggttttcctctgtttttaaacatcttaggtataacagcacaatttcaccttgaaaaagcaccaaaattatggtgttcctgaaaagatcctattaaaagacagtagtttatttgaactggttatggaaggtgactttgggatgtaagagtgttcaactgtgagtttcatcatgtgtgtccgttgagcttgcttttaagagcaatgttttgctttgctctctggtccatgaactcatttccatttgagtgagttcccttagtgaattttgtctcctgcttggaaagtctctcttctgaacctggagcctgaatacattttcagagccaaattacaagtgggtgaagacatgctacaactactatttttagcaatgtttttaaatttgtgtctattggggtgggaaggggagtgaggccctaaagataggaattcactgatagctgaaatagatacaagcctaggagccccagcccccttttcttgaccatatcacaagtgattgaagcccagtgaattagtcggttagaattcgttctacaacatgatagaacttttcttactagcttcagaaatgcacattgatttgtgctatgatgggtggtgtttgtaacaatcactgttctataggcttatgatctgagcaaaatgtgaacttcagtatgtttactattgctcttacttgaaaactttttttcaaaaaaagcacaaattaaagtagtaaattcatatccatagatagttcattcattcaacaaatatttaccaagttcctaatataagtgaaggaccacttctcatattagattactaagtcatttgtatgaatatgtgtggcagtgaagagaacaggtctttcaaaaagcatttgattattttttttaaatacactctcttatttttctacttgtttttttgttaatcatagcaggatatgacaactcttatttgaattgattttttcatctaatgtaataatggaagccaaagtattcatatttcttaagatagccctaaatgtactcttgaacttcttactggaacaatgtttgatactctagtatgtaagctgtatttatgtaatatttagaacgacatgttaataaacaaagtaacattaaaacagg

SEQ ID NO: 174735 - DNA, 4033 bp, Homo sapiens
  Payload ID: 14311
  Gene Symbol: RCBTB1
  Gene Name: regulator of chromosome condensation (RCC1) and BTB (POZ) domain containing protein 1
  Uniprot ID: Q8NDN9
  ENST ID: ENST00000378302
  CDS Start-End: 262-1857
gacccggcgggcccggcgccctggcgctcctcctcttcgctgccggtgggcaccgccgctcgctcgcacttctgcgcccattggagcttcggagatccctgcggtcccgcgggacggcgcggcagcagctgacctcgcagacaggatcttgctctcttgcccagactggaatacagtggtgtgaacacggctcactgcagcctcaacctcctggactcagagatgtcggcttatttataggaattgcttgaagccagagtcatggtggatgtcggaaagtggcccatcttcactctactctcccctcaagagatcgcgtctattcggaaggcgtgtgtcttcggcacctcagccagtgaagcactgtacgttactgacaatgatgaggtctttgtatttggactgaactatagtaactgtctaggaactggagataaccagagtacacttgtacccaaaaagctagaaggcttatgtggaaagaagattaaaagcctcagttacgggagtggaccacatgttcttctcagcaccgaagatggagtggtttatgcctggggccacaatggatatagccagcttgggaatgggacgaccaaccaaggcattgctcccgtccaggtctgtaccaatctcttgatcaagcaagtggtggaagtagcttgtggctcacatcattcaatggctctggcagctgatggagaggtgtttgcttggggttataacaactgtggccaagtgggatcaggttctacagcaaatcaaccaactcctcgaaaagttacaaactgtttacatattaagagggtagttggcattgcctgtggtcagacttcatccatggctgttctggacaatggcgaggtatatggctggggttacaatggcaacggtcagctgggcctgggaaacaatggcaaccagctgacccctgtgagagtggcagctttgcacagcgtgtgtgtgaaccagattgtctgcggttacgcacatactctagcactaacagatgagggcttgctgtatgcctggggagctaacacatatgggcagctgggaactggcaataaaaataacctgctaagcccagcacacatcatggtggagaaagaaagggtggtagagattgcagcctgtcactctgcccacacgtctgcagccaagacgcagggtgggcacgtgtacatgtggggccagtgccggggtcagtccgtgatcctcccgcacctcacccacttctcctgcaccgacgacgtgtttgcctgctttgccactcccgccgtctcgtggcgcctcctgtctgtggagcatgaagactttttaacagttgcagagtcactgaagaaagaatttgatagtccagaaactgctgatctgaagtttcgaattgatggaaaatatattcatgtccataaagctgttttgaaaatcaggtgtgagcattttcgatccatgttccagtcgtattggaatgaagacatgaaggaagtgatagaaatcgatcagttttcttacccagtgtatcgtgcctttctccagtacctctacacagacacagtcgacctgccgccagaagatgctataggtcttctggatttggcgacatcttactgtgaaaacagactgaaaaaactttgtcagcacattatcaagagaggaattactgtggagaatgccttttcgctattctctgctgcagtcagatatgatgcagaggatttagaagaattctgctttaagttttgcatcaatcatttgacagaagttacacagactgcagcattttggcaaatggatggccctctgctaaaggaattcattgctaaagccagtaaatgtggagcctttaagaactgaagcgcaaggctgctgggttctgtgtgagtgctctggggcactgttgaggatgtgtccagtttgtgctctacgggtgatgtgattctgcaggtaaaagaccatcaggttgtttttttccacatctgggacacagttgtttgtgtaggaacataacaagggtgtacggcttttcttgagcccattttaaacaacccttgtttccagataagtgtattttaaatgtgacctttcgtaaatttgggctggaacatgtaaaagggtgaaagttagtcgtttttggtcttcttttcatttttgattagaggaacttctgaacttggaaaggggaagttggcagcaactctcctgggccacgtatcaacaatcttctgacagcaggagcagtgatagttggggaattgtgagatgaatggagaggccccatcgtgaattaaagatgctgacctggggattgttaagtgctgccttagttgctagtttagtagccttactgtgaaggaataattaagattgtttcagacttttgtttgtgtgcttgcgttgatgacttttttaacttcaagataaatcaaagtaataagtttaacgtatattaaacctgttgaaatgataattatgtaaagataaatattctaggttagtcaagatttctcttaagatttaagtgcataaagaatagtaatttagaagtatccgtgaaaagttgataatgaaagaaatttgatgaaggtgaatattttataaattagaatctccactacttatccaatggtgttttatttcattaaggtagaacttgagaactcaagtttaaattgtcccccaccaccttcttctataaatgcaaacttaagaggaaaataatgacatgtatagtatactcttgccttcctaaattatgactgctgaatcatcatatctactatatatgactggaagaagtggttcttcaagtcaaccctcttacaagacttagtggaatttgctttatctactttaggccaaatccatcacacattggcttatgtgaaactttatcatctttcacttttggttttcctctgtttttaaacatcttaggtataacagcacaatttcaccttgaaaaagcaccaaaattatggtgttcctgaaaagatcctattaaaagacagtagtttatttgaactggttatggaaggtgactttgggatgtaagagtgttcaactgtgagtttcatcatgtgtgtccgttgagcttgcttttaagagcaatgttttgctttgctctctggtccatgaactcatttccatttgagtgagttcccttagtgaattttgtctcctgcttggaaagtctctcttctgaacctggagcctgaatacattttcagagccaaattacaagtgggtgaagacatgctacaactactatttttagcaatgtttttaaatttgtgtctattggggtgggaaggggagtgaggccctaaagataggaattcactgatagctgaaatagatacaagcctaggagccccagcccccttttcttgaccatatcacaagtgattgaagcccagtgaattagtcggttagaattcgttctacaacatgatagaacttttcttactagcttcagaaatgcacattgatttgtgctatgatgggtggtgtttgtaacaatcactgttctataggcttatgatctgagcaaaatgtgaacttcagtatgtttactattgctcttacttgaaaactttttttcaaaaaaagcacaaattaaagtagtaaattcatatccatagatagttcattcattcaacaaatatttaccaagttcctaatataagtgaaggaccacttctcatattagattactaagtcatttgtatgaatatgtgtggcagtgaagagaacaggtctttcaaaaagcatttgattattttttttaaatacactctcttatttttctacttgtttttttgttaatcatagcaggatatgacaactcttatttgaattgattttttcatctaatgtaataatggaagccaaagtattcatatttcttaagatagccctaaatgtactcttgaacttcttactggaacaatgtttgatactctagtatgtaagctgtatttatgtaatatttagaacgacatgttaataaacaaagtaacattaaaacagg

SEQ ID NO: 174736 - DNA, 3232 bp, Homo sapiens
  Payload ID: 14312
  Gene Symbol: RCBTB2
  Gene Name: regulator of chromosome condensation (RCC1) and BTB (POZ) domain containing protein 2
  Uniprot ID: O95199
  ENST ID: ENST00000344532
  CDS Start-End: 425-2080
aggagaggaggggcgagacgccgtcgccagccccctcctcttgtctgcgctcccttcgtttccgtctcggccgggcacccgagcgcatcccgccgaggccgggccgtttcagggggaggcgccaactcatcgcggcgccgggcccctgaccgtgcagtaaccgctacccaggaggcggagcggacaaggctccggcctgcgaggagtcacattaactttgctctagaagacaactttacaaggatctaaaaggaacaggattaaagatgactgaatactgggttccagaaatttaaaacaatcagcttagcaaatcatatattcttctgtggagctgagaattgatgtccgctcttccccgtgatttggaactttccaatcccagagaaaagttgacaaagggactgcccaggactgagtccatatggaagaagaacttcctcttttctctggagacagtggcaagccagtacaggctactctgtcatctttgaagatgttagatgtgggaaagtggccaattttttccctttgttctgaagaagaactacagttaattcgtcaggcttgtgtctttggcagtgctggcaatgaagttttatacactacagtaaatgatgagatttttgtgcttggcacaaactgctgtggctgtttggggttaggtgacgtccagagcaccattgaacctcggagactggattctttaaatggcaaaaaaatagcctgcctcagctatgggagtggtccacatattgtccttgcaacaacagaaggagaagtctttacctggggtcataatgcttatagccagctgggcaatgggacaactaatcatggtttagtgccctgtcatatctctactaatctgtcaaacaaacaagtcattgaagttgcctgtgggtcttaccattctttggtgctaacatctgatggagaggtatttgcctggggttataataactctgggcaggtaggatctggatcaacagttaatcagccaatccctcgaagagtcactggctgcctacaaaataaagtagttgtgaccatagcatgtgggcagatgtgctgcatggcagtagtagacacgggggaggtctatgtctggggttacaacggaaacgggcagcttggactcggcaacagtggcaaccagccaaccccttgcagagtggcagctttgcaaggcatccgtgtccagagggtcgcctgtggctacgcacacacattagtattaacagatgaaggccaagtgtatgcttggggcgccaattcttatgggcagttgggcactggcaataaaagcaaccagtcctatcctactcctgtcactgtggaaaaggacaggattatcgagattgcagcctgtcactccacacacacgtctgcggccaagacgcagggtgggcacgtgtacatgtggggccagtgccggggtcagtccgtgatcctcccgcacctcacccacttctcctgcactgacgacgtgtttgcctgctttgccacgcccgccgtcacgtggcgcctcctctccgtggaacctgatgaccacctcacagtggctgagtcactgaagagggaatttgacaacccggacactgcagacctgaagtttctagttgatggaaagtacatttatgcacataaagtccttctcaagattcgatgtgagcattttcgttcgtcattggaagataacgaggatgatattgtagaaatgagtgaattttcatatcctgtttaccgggccttcctggaatacctatacacagacagcatcagcctttctcctgaggaggcagtaggactgctagacttggctacattttatagagaaaatcgtttgaaaaagctctgccaacaaactatcaagcaaggcatctgcgaggagaatgccatcgctctgctctcggctgcggtgaagtatgatgcacaggatttagaagaattctgcttcaggttttgcataaaccatctgactgtagtaacacaaacatcaggttttgcagaaatggaccatgatctcctgaagaactttatcagcaaagcaagcagagttggagcctttaaaaattgatcccatctgcaggaaagtttttgagcctttccatttcccctgcaaaagccagagatgaatcacttctctttaattaatagtatgtatgatgagctatgtttggctgagtacttgtaactgtcagaagaaggatggtggtgagtggtctttgtctgcctaaacccagagtttatgtagaaagcattgaatgttctgatcagatgtgactaaggtcaaggaaaaaaaattgaaatatcttatttaccatttcctctttttgagtcacttaaattggacacctttggtaccctggtctcagtatatgctattctggcccaaatgttccattattcagctggctgataccacatagatagcttgacaaggagtgctgtctgtccttaccacattttcagcactcagcacagtgccttgtgtataataggcactcaatttattataaatcttcagtatgtcctgagaacagctttagtcatggaatactgggagaaggaataactttcacaaaataaacttaaaacagcctgtaattattgaggttcatattcttctggtatatcattctgagaaattgtggctaatttagaacattgtttagaattgacaaaaggccctggcaattaaattgtcaaggcccaagggctaattttaattttctttttacttggagtcattcattaatttctcacatgggattatggagtatgaagtattatctttgaatgaaattcctgggctgatctgccttacataatcacataaggtcctttgcttttctttgtgttaagagggacttgcctctgtaaatgaaaatgacaatgtgcttttcttgtagttgactttcatgtcactcactataaaataggtctcttaacctggcaccagtataactataaagcactagctgagaaggaactgatacttacatttcatggacagcattaacaagaatgagataaatttgtactttttagatcaaaacaaattacctaattgcaaaagagaaactgaaatggaacatagtctcagattcttctaatgtgtatctcacaatgtcatgtaatgtaaaggaaacccttttggaattagaattcttgttctgatgctgaactatttggtaataaagtgcttatttgcagataacagaacaaa

SEQ ID NO: 174737 - DNA, 3179 bp, Homo sapiens
  Payload ID: 14312
  Gene Symbol: RCBTB2
  Gene Name: regulator of chromosome condensation (RCC1) and BTB (POZ) domain containing protein 2
  ENST ID: ENST00000430805
  CDS Start-End: 368-2038
gggcggcggtgggcagcctagggaggagaggaggggcgagacgccgtcgccagccccctcctcttgtctgcgctcccttcgtttccgtctcggccgggcacccgagcgcatcccgccgaggccgggccgtttcagggggaggcgccaactcatcgcggcgccgggcccctgaccgtgcagtaaccgctacccaggaggcggagcggacaaggctccggcctgcgaggagtcacattaactttgctctagaagacaactttacaaggatctaaaaggaacaggattaaagatgactgaatactgggttccagaaatttaaaacaatcagcttagcaaatcatatattcttctgtggagctgagaattgatgtccgctcttccccgtgatttggaactttccaatcccagagaaaagttgacaaagccagtacaggctactctgtcatctttgaagatgttagatgtgggaaagtggccaattttttccctttgttctgaagaagaactacagttaattcgtcaggcttgtgtctttggcagtgctggcaatgaagttttatacactacagtaaatgatgagatttttgtgcttggcacaaactgctgtggctgtttggggttaggtgacgtccagagcaccattgaacctcggagactggattctttaaatggcaaaaaaatagcctgcctcagctatgggagtggtccacatattgtccttgcaacaacagaaggagaagtctttacctggggtcataatgcttatagccagctgggcaatgggacaactaatcatggtttagtgccctgtcatatctctactaatctgtcaaacaaacaagtcattgaagttgcctgtgggtcttaccattctttggtgctaacatctgatggagaggtatttgcctggggttataataactctgggcaggtaggatctggatcaacagttaatcagccaatccctcgaagagtcactggctgcctacaaaataaagtagttgtgaccatagcatgtgggcagatgtgctgcatggcagtagtagacacgggggaggtctatgtctggggttacaacggaaacgggcagcttggactcggcaacagtggcaaccagccaaccccttgcagagtggcagctttgcaaggcatccgtgtccagagggtcgcctgtggctacgcacacacattagtattaacagatgaaggccaagtgtatgcttggggcgccaattcttatgggcagttgggcactggcaataaaagcaaccagtcctatcctactcctgtcactgtggaaaaggacaggattatcgagattgcagcctgtcactccacacacacgtctgcggccaagacgcagggtgggcacgtgtacatgtggggccagtgccggggtcagtccgtgatcctcccgcacctcacccacttctcctgcactgacgacgtgtttgcctgctttgccacgcccgccgtcacgtggcgcctcctctccgtggaacctgatgaccacctcacagtggctgagtcactgaagagggaatttgacaacccggacactgcagacctgaagtttctagttgatggaaagtacatttatgcacataaagtccttctcaagattcgatgtgagcattttcgttcgtcattggaagataacgaggatgatattgtagaaatgagtgaattttcatatcctgtttaccgggccttcctggaatacctatacacagacagcatcagcctttctcctgaggaggcagtaggactgctagacttggctacattttatagagaaaatcgtttgaaaaagctctgccaacaaactatcaagcaaggcatctgcgaggagaatgccatcgctctgctctcggctgcggtgaagtatgatgcacaggatttagaagaattctgcttcaggttttgcataaaccatctgactgtagtaacacaaacatcaggttttgcagaaatggaccatgatctcctgaagaactttatcagcaaagcaagcagagttggagcctttaaaaattgatcccatctgcaggaaagtttttgagcctttccatttcccctgcaaaagccagagatgaatcacttctctttaattaatagtatgtatgatgagctatgtttggctgagtacttgtaactgtcagaagaaggatggtggtgagtggtctttgtctgcctaaacccagagtttatgtagaaagcattgaatgttctgatcagatgtgactaaggtcaaggaaaaaaaattgaaatatcttatttaccatttcctctttttgagtcacttaaattggacacctttggtaccctggtctcagtatatgctattctggcccaaatgttccattattcagctggctgataccacatagatagcttgacaaggagtgctgtctgtccttaccacattttcagcactcagcacagtgccttgtgtataataggcactcaatttattataaatcttcagtatgtcctgagaacagctttagtcatggaatactgggagaaggaataactttcacaaaataaacttaaaacagcctgtaattattgaggttcatattcttctggtatatcattctgagaaattgtggctaatttagaacattgtttagaattgacaaaaggccctggcaattaaattgtcaaggcccaagggctaattttaattttctttttacttggagtcattcattaatttctcacatgggattatggagtatgaagtattatctttgaatgaaattcctgggctgatctgccttacataatcacataaggtcctttgcttttctttgtgttaagagggacttgcctctgtaaatgaaaatgacaatgtgcttttcttgtagttgactttcatgtcactcactataaaataggtctcttaacctggcaccagtataactataaagcactagctgagaaggaactgatacttacatttcatggacagcattaacaagaatgagataaatttgtactttttagatcaaaacaaattacctaattgcaaaagagaaactgaaatggaacatagtctcagattcttctaatgtgtatctcacaatgtcatgtaatgtaaaggaaacccttttggaattagaattcttgttctgatgctgaactatttggtaataaagtgcttatttgcagat

SEQ ID NO: 174738 - DNA, 2622 bp, Homo sapiens
  Payload ID: 14312
  Gene Symbol: RCBTB2
  Gene Name: regulator of chromosome condensation (RCC1) and BTB (POZ) domain containing protein 2
  ENST ID: ENST00000544492
  CDS Start-End: 648-1481
gggcggcggtgggcagcctagggaggagaggaggggcgagacgccgtcgccagccccctcctcttgtctgcgctcccttcgtttccgtctcggccgggcacccgagcgcatcccgccgaggccgggccgtttcagggggaggcgccaactcatcgcggcgccgggcccctgaccgtgcagtaaccgctacccaggaggcggagcggacaaggctccggcctgcgaggagccagtacaggctactctgtcatctttgaagatgttagatgtgggaaagtggccaattttttccctttgttctgaagaagaactacagttaattcgtcaggcttgtgtctttggcagtgctggcaatgaagttttatacactacagtaaatgatgagatttttgtgcttggcacaaactgctgtggctgtttggggttaggtgacgtccagagcaccattgaacctcggagactggattctttaaatggcaaaaaaatagcctgcctcagctatgggagtggtccacatattgtccttgcaacaacagttaatcagccaatccctcgaagagtcactggctgcctacaaaataaagtagttgtgaccatagcatgtgggcagatgtgctgcatggcagtagtagacacgggggaggtctatgtctggggttacaacggaaacgggcagcttggactcggcaacagtggcaaccagccaaccccttgcagagtggcagctttgcaaggcatccgtgtccagagggattatcgagattgcagcctgtcactccacacacacgtctgcggccaagacgcagggtgggcacgtgtacatgtggggccagtgccggggtcagtccgtgatcctcccgcacctcacccacttctcctgcactgacgacgtgtttgcctgctttgccacgcccgccgtcacgtggcgcctcctctccgtggaacctgatgaccacctcacagtggctgagtcactgaagagggaatttgacaacccggacactgcagacctgaagtttctagttgatggaaagtacatttatgcacataaagtccttctcaagattcgatgtgagcattttcgttcgtcattggaagataacgaggatgatattgtagaaatgagtgaattttcatatcctgtttaccgggccttcctggaatacctatacacagacagcatcagcctttctcctgaggaggcagtaggactgctagacttggctacattttatagagaaaatcgtttgaaaaagctctgccaacaaactatcaagcaaggcatctgcgaggagaatgccatcgctctgctctcggctgcggtgaagtatgatgcacaggatttagaagaattctgcttcaggttttgcataaaccatctgactgtagtaacacaaacatcaggttttgcagaaatggaccatgatctcctgaagaactttatcagcaaagcaagcagagttggagcctttaaaaattgatcccatctgcaggaaagtttttgagcctttccatttcccctgcaaaagccagagatgaatcacttctctttaattaatagtatgtatgatgagctatgtttggctgagtacttgtaactgtcagaagaaggatggtggtgagtggtctttgtctgcctaaacccagagtttatgtagaaagcattgaatgttctgatcagatgtgactaaggtcaaggaaaaaaaattgaaatatcttatttaccatttcctctttttgagtcacttaaattggacacctttggtaccctggtctcagtatatgctattctggcccaaatgttccattattcagctggctgataccacatagatagcttgacaaggagtgctgtctgtccttaccacattttcagcactcagcacagtgccttgtgtataataggcactcaatttattataaatcttcagtatgtcctgagaacagctttagtcatggaatactgggagaaggaataactttcacaaaataaacttaaaacagcctgtaattattgaggttcatattcttctggtatatcattctgagaaattgtggctaatttagaacattgtttagaattgacaaaaggccctggcaattaaattgtcaaggcccaagggctaattttaattttctttttacttggagtcattcattaatttctcacatgggattatggagtatgaagtattatctttgaatgaaattcctgggctgatctgccttacataatcacataaggtcctttgcttttctttgtgttaagagggacttgcctctgtaaatgaaaatgacaatgtgcttttcttgtagttgactttcatgtcactcactataaaataggtctcttaacctggcaccagtataactataaagcactagctgagaaggaactgatacttacatttcatggacagcattaacaagaatgagataaatttgtactttttagatcaaaacaaattacctaattgcaaaagagaaactgaaatggaacatagtctcagattcttctaatgtgtatctcacaatgtcatgtaatgtaaaggaaacccttttggaattagaattcttgttctgatgctgaactatttggtaataaagtgcttatttgcagat

SEQ ID NO: 174739 - DNA, 2984 bp, Homo sapiens
  Payload ID: 14312
  Gene Symbol: RCBTB2
  Gene Name: regulator of chromosome condensation (RCC1) and BTB (POZ) domain containing protein 2
  Uniprot ID: O95199
  ENST ID: ENST00000544904
  CDS Start-End: 260-1843
gggcggcggtgggcagcctagggaggagaggaggggcgagacgccgtcgccagccccctcctcttgtctgcgctcccttcgtttccgtctcggccgggcacccgagcgcatcccgccgaggccgggccgtttcagggggaggcgccaactcatcgcggcgccgggcccctgaccgtgcagtaaccgctacccaggaggcggagcggacaaggctccggcctgcgaggagccagtacaggctactctgtcatctttgaagatgttagatgtgggaaagtggccaattttttccctttgttctgaagaagaactacagttaattcgtcaggcttgtgtctttggcagtgctggcaatgaagttttatacactacagtaaatgatgagatttttgtgcttggcacaaactgctgtggctgtttggggttaggtgacgtccagagcaccattgaacctcggagactggattctttaaatggcaaaaaaatagcctgcctcagctatgggagtggtccacatattgtccttgcaacaacagaaggagaagtctttacctggggtcataatgcttatagccagctgggcaatgggacaactaatcatggtttagtgccctgtcatatctctactaatctgtcaaacaaacaagtcattgaagttgcctgtgggtcttaccattctttggtgctaacatctgatggagaggtatttgcctggggttataataactctgggcaggtaggatctggatcaacagttaatcagccaatccctcgaagagtcactggctgcctacaaaataaagtagttgtgaccatagcatgtgggcagatgtgctgcatggcagtagtagacacgggggaggtctatgtctggggttacaacggaaacgggcagcttggactcggcaacagtggcaaccagccaaccccttgcagagtggcagctttgcaaggcatccgtgtccagagggtcgcctgtggctacgcacacacattagtattaacagatgaaggccaagtgtatgcttggggcgccaattcttatgggcagttgggcactggcaataaaagcaaccagtcctatcctactcctgtcactgtggaaaaggacaggattatcgagattgcagcctgtcactccacacacacgtctgcggccaagacgcagggtgggcacgtgtacatgtggggccagtgccggggtcagtccgtgatcctcccgcacctcacccacttctcctgcactgacgacgtgtttgcctgctttgccacgcccgccgtcacgtggcgcctcctctccgtggaacctgatgaccacctcacagtggctgagtcactgaagagggaatttgacaacccggacactgcagacctgaagtttctagttgatggaaagtacatttatgcacataaagtccttctcaagattcgatgtgagcattttcgttcgtcattggaagataacgaggatgatattgtagaaatgagtgaattttcatatcctgtttaccgggccttcctggaatacctatacacagacagcatcagcctttctcctgaggaggcagtaggactgctagacttggctacattttatagagaaaatcgtttgaaaaagctctgccaacaaactatcaagcaaggcatctgcgaggagaatgccatcgctctgctctcggctgcggtgaagtatgatgcacaggatttagaagaattctgcttcaggttttgcataaaccatctgactgtagtaacacaaacatcaggttttgcagaaatggaccatgatctcctgaagaactttatcagcaaagcaagcagagttggagcctttaaaaattgatcccatctgcaggaaagtttttgagcctttccatttcccctgcaaaagccagagatgaatcacttctctttaattaatagtatgtatgatgagctatgtttggctgagtacttgtaactgtcagaagaaggatggtggtgagtggtctttgtctgcctaaacccagagtttatgtagaaagcattgaatgttctgatcagatgtgactaaggtcaaggaaaaaaaattgaaatatcttatttaccatttcctctttttgagtcacttaaattggacacctttggtaccctggtctcagtatatgctattctggcccaaatgttccattattcagctggctgataccacatagatagcttgacaaggagtgctgtctgtccttaccacattttcagcactcagcacagtgccttgtgtataataggcactcaatttattataaatcttcagtatgtcctgagaacagctttagtcatggaatactgggagaaggaataactttcacaaaataaacttaaaacagcctgtaattattgaggttcatattcttctggtatatcattctgagaaattgtggctaatttagaacattgtttagaattgacaaaaggccctggcaattaaattgtcaaggcccaagggctaattttaattttctttttacttggagtcattcattaatttctcacatgggattatggagtatgaagtattatctttgaatgaaattcctgggctgatctgccttacataatcacataaggtcctttgcttttctttgtgttaagagggacttgcctctgtaaatgaaaatgacaatgtgcttttcttgtagttgactttcatgtcactcactataaaataggtctcttaacctggcaccagtataactataaagcactagctgagaaggaactgatacttacatttcatggacagcattaacaagaatgagataaatttgtactttttagatcaaaacaaattacctaattgcaaaagagaaactgaaatggaacatagtctcagattcttctaatgtgtatctcacaatgtcatgtaatgtaaaggaaacccttttggaattagaattcttgttctgatgctgaactatttggtaataaagtgcttatttgcagat

SEQ ID NO: 174740 - DNA, 1577 bp, Homo sapiens
  Payload ID: 14313
  Gene Symbol: RCC1
  Gene Name: regulator of chromosome condensation 1
  Uniprot ID: P18754
  ENST ID: ENST00000373831
  CDS Start-End: 62-1420
ttcgcggcccggcggggagcgccggagttccttgtggccgacgtgcaccaaggacaggaagatgtcacccaagcgcatagctaaaagaaggtcccccccagcagatgccatccccaaaagcaagaaggtgaaggacacgagggccgctgcctcccgccgcgttcctggcgcccgctcctgccaaggtgcctgcgggccgagccctcctgaccagaaaacccgaccagtctcacacaggtcccacagcacagaacccggcttggtgctgacactaggccagggcgacgtgggccagctggggctgggtgagaatgtgatggagaggaagaagccggccctggtatccattccggaggatgttgtgcaggctgaggctgggggcatgcacaccgtgtgtctaagcaaaagtggccaggtctattccttcggctgcaatgatgagggtgccctgggaagggacacatcagtggagggctcggagatggtccctgggaaagtggagctgcaagagaaggtggtacaggtgtcagcaggagacagtcacacagcagccctcaccgatgatggccgtgtcttcctctggggctccttccgggacaataacggtgtgattggactgttggagcccatgaagaagagcatggtgcctgtgcaggtgcagctggatgtgcctgtggtaaaggtggcctcaggaaacgaccacttggtgatgctgacagctgatggtgacctctacaccttgggctgcggggaacagggccagctaggccgtgtgcctgagttatttgccaaccgtggtggccggcaaggcctcgaacgactcctggtccccaagtgtgtgatgctgaaatccaggggaagccggggccacgtgagattccaggatgccttttgtggtgcctatttcacctttgccatctcccatgagggccacgtgtacggcttcggcctctccaactaccatcagcttggaactccgggcacagaatcttgcttcataccccagaacctaacatccttcaagaattccaccaagtcctgggtgggcttctctggtggccagcaccatacagtctgcatggattcggaaggaaaagcatacagcctgggccgggctgagtatgggcggctgggccttggagagggtgctgaggagaagagcatacccaccctcatctccaggctgcctgctgtctcctcggtggcttgtggggcctctgtggggtatgctgtgaccaaggatggtcgtgttttcgcctggggcatgggcaccaactaccagctgggcacagggcaggatgaggacgcctggagccctgtggagatgatgggcaaacagctggagaaccgtgtggtcttatctgtgtccagcgggggccagcatacagtcttattagtcaaggacaaagaacagagctgatgaagcctctgagggcctggcttctgtcctgcacaacctccctcacagaacagggaagcagtgacagctgcagatggcagcgggcctctccccagccctgagcactgtgtcagttcctgccttttctcatcagcagaacagaatccttttcctcttt

SEQ ID NO: 174741 - DNA, 2424 bp, Homo sapiens
  Payload ID: 14313
  Gene Symbol: RCC1
  Gene Name: regulator of chromosome condensation 1
  Uniprot ID: P18754
  ENST ID: ENST00000373832
  CDS Start-End: 183-1448
ccagcccgggagcgcgccacatgcagatcctgggatggccgccaggggccgccgggctctttgttttcctttctcacccgggtcggggccagaggcctgcagagcgcatgctctggggcagttcgcggcccggcggggagcgccggagttccttgtggccgacgtgcaccaaggacaggaagatgtcacccaagcgcatagctaaaagaaggtcccccccagcagatgccatccccaaaagcaagaaggtgaaggtctcacacaggtcccacagcacagaacccggcttggtgctgacactaggccagggcgacgtgggccagctggggctgggtgagaatgtgatggagaggaagaagccggccctggtatccattccggaggatgttgtgcaggctgaggctgggggcatgcacaccgtgtgtctaagcaaaagtggccaggtctattccttcggctgcaatgatgagggtgccctgggaagggacacatcagtggagggctcggagatggtccctgggaaagtggagctgcaagagaaggtggtacaggtgtcagcaggagacagtcacacagcagccctcaccgatgatggccgtgtcttcctctggggctccttccgggacaataacggtgtgattggactgttggagcccatgaagaagagcatggtgcctgtgcaggtgcagctggatgtgcctgtggtaaaggtggcctcaggaaacgaccacttggtgatgctgacagctgatggtgacctctacaccttgggctgcggggaacagggccagctaggccgtgtgcctgagttatttgccaaccgtggtggccggcaaggcctcgaacgactcctggtccccaagtgtgtgatgctgaaatccaggggaagccggggccacgtgagattccaggatgccttttgtggtgcctatttcacctttgccatctcccatgagggccacgtgtacggcttcggcctctccaactaccatcagcttggaactccgggcacagaatcttgcttcataccccagaacctaacatccttcaagaattccaccaagtcctgggtgggcttctctggtggccagcaccatacagtctgcatggattcggaaggaaaagcatacagcctgggccgggctgagtatgggcggctgggccttggagagggtgctgaggagaagagcatacccaccctcatctccaggctgcctgctgtctcctcggtggcttgtggggcctctgtggggtatgctgtgaccaaggatggtcgtgttttcgcctggggcatgggcaccaactaccagctgggcacagggcaggatgaggacgcctggagccctgtggagatgatgggcaaacagctggagaaccgtgtggtcttatctgtgtccagcgggggccagcatacagtcttattagtcaaggacaaagaacagagctgatgaagcctctgagggcctggcttctgtcctgcacaacctccctcacagaacagggaagcagtgacagctgcagatggcagcgggcctctccccagccctgagcactgtgtcagttcctgccttttctcatcagcagaacagaatccttttcctcttttccttcctcctctttggaattttcctgggacctacagaataaagggggggatggacagggggttttcaaaaggaacatggctcactcagagctatatggttagacgtttctccccttttccctaccttccatggtcctggttggccctggctttgcctactagaaaaccaaaacttcccccctggggttttgtgcccactctctgagaagttggggctccatcaagccccattctagtcatgtgcccctttcctgtccctaacagtccacaggcaaacaaatggtacagtcataagagccatctgtcacggacccacgcccagaggaacgtgcagaaaaaagcagagctacatggctgtgggcaactataagccaaatatttggctcagaacaggtgtccatgggacaaaaaagaacgatcctccacttgaccaagaaaaaagtgattctcccagaagcacaaagcatactcttgcccctcaggtgttgcttgtgtacatcgtacccatccattcggcttcacctgcagccaacggcctggaatcgcaaagagacaccactctgggcagagcagagcagggtatggggtggggagagagggtggagggttttataaacaaacttaacagcaatattgaaaggaggtgggggattgagggagggacagagtgttggagggccagagactagtcctgagatggaaacagcaacttgtacagtggctgagaaaataggatatagttttgatttttttaattgtaaaatattttggagggagaacaaaatcttttaacattttgaataaatttagagttttat

SEQ ID NO: 174742 - DNA, 2844 bp, Homo sapiens
  Payload ID: 14313
  Gene Symbol: RCC1
  Gene Name: regulator of chromosome condensation 1
  Uniprot ID: P18754
  ENST ID: ENST00000373833
  CDS Start-End: 286-1551
gattcgcagtggtcgcttcttctccttggatttgttaaggattccaagtaactcttatttggagagaagacgatctgcacttcgcattttggcattgacatttaattttagggtcctttatatagaagggagactacatgaatgtgtaagatcttggaggaagacagcagagagagagagagagatcagagatcccagggttaaaagttggagaaatttcacagtacatcatccaaaagaggagtccatgatggaggcagaggtaaacttggagaggacaggaagatgtcacccaagcgcatagctaaaagaaggtcccccccagcagatgccatccccaaaagcaagaaggtgaaggtctcacacaggtcccacagcacagaacccggcttggtgctgacactaggccagggcgacgtgggccagctggggctgggtgagaatgtgatggagaggaagaagccggccctggtatccattccggaggatgttgtgcaggctgaggctgggggcatgcacaccgtgtgtctaagcaaaagtggccaggtctattccttcggctgcaatgatgagggtgccctgggaagggacacatcagtggagggctcggagatggtccctgggaaagtggagctgcaagagaaggtggtacaggtgtcagcaggagacagtcacacagcagccctcaccgatgatggccgtgtcttcctctggggctccttccgggacaataacggtgtgattggactgttggagcccatgaagaagagcatggtgcctgtgcaggtgcagctggatgtgcctgtggtaaaggtggcctcaggaaacgaccacttggtgatgctgacagctgatggtgacctctacaccttgggctgcggggaacagggccagctaggccgtgtgcctgagttatttgccaaccgtggtggccggcaaggcctcgaacgactcctggtccccaagtgtgtgatgctgaaatccaggggaagccggggccacgtgagattccaggatgccttttgtggtgcctatttcacctttgccatctcccatgagggccacgtgtacggcttcggcctctccaactaccatcagcttggaactccgggcacagaatcttgcttcataccccagaacctaacatccttcaagaattccaccaagtcctgggtgggcttctctggtggccagcaccatacagtctgcatggattcggaaggaaaagcatacagcctgggccgggctgagtatgggcggctgggccttggagagggtgctgaggagaagagcatacccaccctcatctccaggctgcctgctgtctcctcggtggcttgtggggcctctgtggggtatgctgtgaccaaggatggtcgtgttttcgcctggggcatgggcaccaactaccagctgggcacagggcaggatgaggacgcctggagccctgtggagatgatgggcaaacagctggagaaccgtgtggtcttatctgtgtccagcgggggccagcatacagtcttattagtcaaggacaaagaacagagctgatgaagcctctgagggcctggcttctgtcctgcacaacctccctcacagaacagggaagcagtgacagctgcagatggcagcgggcctctccccagccctgagcactgtgtcagttcctgccttttctcatcagcagaacagaatccttttcctcttttccttcctcctctttggaattttcctgggacctacagaataaagggggggatggacagggggttttcaaaaggaacatggctcactcagagctatatggttagacgtttctccccttttccctaccttccatggtcctggttggccctggctttgcctactagaaaaccaaaacttcccccctggggttttgtgcccactctctgagaagttggggctccatcaagccccattctagtcatgtgcccctttcctgtccctaacagtccacaggcaaacaaatggtacagtcataagagccatctgtcacggacccacgcccagaggaacgtgcagaaaaaagcagagctacatggctgtgggcaactataagccaaatatttggctcagaacaggtgtccatgggacaaaaaagaacgatcctccacttgaccaagaaaaaagtgattctcccagaagcacaaagcatactcttgcccctcaggtgttgcttgtgtacatcgtacccatccattcggcttcacctgcagccaacggcctggaatcgcaaagagacaccactctgggcagagcagagcagggtatggggtggggagagagggtggagggttttataaacaaacttaacagcaatattgaaaggaggtgggggattgagggagggacagagtgttggagggccagagactagtcctgagatggaaacagcaacttgtacagtggctgagaaaataggatatagttttgatttttttaattgtaaaatattttggagggagaacaaaatcttttaacattttgaataaatttagagttttataaaataggccacttgttttctacacattccctgctttttaagggagcacatattatgtgccaggcactgctgggaaagacagaataaactataaacctggtgttgaggctacaacttaagtgatgtcaagatgtcctgaggtgccaaccagctgtcagtgtgactgtaacaaaggcttcaaatctgtcaagaagtaaggaaaagttttgtttgaattttgtttgggtatttctgttttgggagtcactggattatttttaaatgctgcatagtacaatagaggcagggtggatcttttaataccaaaccaaaaaaaa

SEQ ID NO: 174743 - DNA, 2715 bp, Homo sapiens
  Payload ID: 14313
  Gene Symbol: RCC1
  Gene Name: regulator of chromosome condensation 1
  Uniprot ID: P18754
  ENST ID: ENST00000398958
  CDS Start-End: 261-1526
gattctctaactgcgcatgcttctgcgcacgcgcaatagacattccaggacttccgggcacttcgtaaggtttaaaaaggatgcttcgcgttttctctctcctttttggagacagattcgcagtggtcgcttcttctccttggatttgttaaggattccaagtaactcttatttggagagaagacgatctgcacttcgcattttggcattgacatttaattttagggtcctttatatagaagggagagtaggacaggaagatgtcacccaagcgcatagctaaaagaaggtcccccccagcagatgccatccccaaaagcaagaaggtgaaggtctcacacaggtcccacagcacagaacccggcttggtgctgacactaggccagggcgacgtgggccagctggggctgggtgagaatgtgatggagaggaagaagccggccctggtatccattccggaggatgttgtgcaggctgaggctgggggcatgcacaccgtgtgtctaagcaaaagtggccaggtctattccttcggctgcaatgatgagggtgccctgggaagggacacatcagtggagggctcggagatggtccctgggaaagtggagctgcaagagaaggtggtacaggtgtcagcaggagacagtcacacagcagccctcaccgatgatggccgtgtcttcctctggggctccttccgggacaataacggtgtgattggactgttggagcccatgaagaagagcatggtgcctgtgcaggtgcagctggatgtgcctgtggtaaaggtggcctcaggaaacgaccacttggtgatgctgacagctgatggtgacctctacaccttgggctgcggggaacagggccagctaggccgtgtgcctgagttatttgccaaccgtggtggccggcaaggcctcgaacgactcctggtccccaagtgtgtgatgctgaaatccaggggaagccggggccacgtgagattccaggatgccttttgtggtgcctatttcacctttgccatctcccatgagggccacgtgtacggcttcggcctctccaactaccatcagcttggaactccgggcacagaatcttgcttcataccccagaacctaacatccttcaagaattccaccaagtcctgggtgggcttctctggtggccagcaccatacagtctgcatggattcggaaggaaaagcatacagcctgggccgggctgagtatgggcggctgggccttggagagggtgctgaggagaagagcatacccaccctcatctccaggctgcctgctgtctcctcggtggcttgtggggcctctgtggggtatgctgtgaccaaggatggtcgtgttttcgcctggggcatgggcaccaactaccagctgggcacagggcaggatgaggacgcctggagccctgtggagatgatgggcaaacagctggagaaccgtgtggtcttatctgtgtccagcgggggccagcatacagtcttattagtcaaggacaaagaacagagctgatgaagcctctgagggcctggcttctgtcctgcacaacctccctcacagaacagggaagcagtgacagctgcagatggcagcgggcctctccccagccctgagcactgtgtcagttcctgccttttctcatcagcagaacagaatccttttcctcttttccttcctcctctttggaattttcctgggacctacagaataaagggggggatggacagggggttttcaaaaggaacatggctcactcagagctatatggttagacgtttctccccttttccctaccttccatggtcctggttggccctggctttgcctactagaaaaccaaaacttcccccctggggttttgtgcccactctctgagaagttggggctccatcaagccccattctagtcatgtgcccctttcctgtccctaacagtccacaggcaaacaaatggtacagtcataagagccatctgtcacggacccacgcccagaggaacgtgcagaaaaaagcagagctacatggctgtgggcaactataagccaaatatttggctcagaacaggtgtccatgggacaaaaaagaacgatcctccacttgaccaagaaaaaagtgattctcccagaagcacaaagcatactcttgcccctcaggtgttgcttgtgtacatcgtacccatccattcggcttcacctgcagccaacggcctggaatcgcaaagagacaccactctgggcagagcagagcagggtatggggtggggagagagggtggagggttttataaacaaacttaacagcaatattgaaaggaggtgggggattgagggagggacagagtgttggagggccagagactagtcctgagatggaaacagcaacttgtacagtggctgagaaaataggatatagttttgatttttttaattgtaaaatattttggagggagaacaaaatcttttaacattttgaataaatttagagttttataaaataggccacttgttttctacacattccctgctttttaagggagcacatattatgtgccaggcactgctgggaaagacagaataaactataaacctggtgttgaggctacaacttaagtgatgtcaagatgtcctgaggtgccaaccagctgtcagtgtgactgtaacaaaggcttcaaatctgtcaagaagtaaggaaaagttttgtttg

SEQ ID NO: 174744 - DNA, 1121 bp, Homo sapiens
  Payload ID: 14313
  Gene Symbol: RCC1
  Gene Name: regulator of chromosome condensation 1
  ENST ID: ENST00000430407
  CDS Start-End: 273-1121
ggcatgcgcttggagaaggcggtttgcagatcggggagggagccctgcccgggagagggtgggtcgtaggagctcgagggtctcccgctgtggacctttgggagccgtgtgtcttgaactccgcagcagctcagtctgtcagcagattatttgctggccatttattgcgtccctctcttgcggggctgggggacagtagtgagaagagcaggcccgtgtcattagcgaactatgcccttgaacccaggcgacggacgctactggacaggaagatgtcacccaagcgcatagctaaaagaaggtcccccccagcagatgccatccccaaaagcaagaaggtgaaggtctcacacaggtcccacagcacagaacccggcttggtgctgacactaggccagggcgacgtgggccagctggggctgggtgagaatgtgatggagaggaagaagccggccctggtatccattccggaggatgttgtgcaggctgaggctgggggcatgcacaccgtgtgtctaagcaaaagtggccaggtctattccttcggctgcaatgatgagggtgccctgggaagggacacatcagtggagggctcggagatggtccctgggaaagtggagctgcaagagaaggtggtacaggtgtcagcaggagacagtcacacagcagccctcaccgatgatggccgtgtcttcctctggggctccttccgggacaataacggtgtgattggactgttggagcccatgaagaagagcatggtgcctgtgcaggtgcagctggatgtgcctgtggtaaaggtggcctcaggaaacgaccacttggtgatgctgacagctgatggtgacctctacaccttgggctgcggggaacagggccagctaggccgtgtgcctgagttatttgccaaccgtggtggccggcaaggcctcgaacgactcctggtccccaagtgtgtgatgctgaaatccaggggaagccggggccacgtgagattccaggatgccttttgtggtgcctatttcacctttgccatctcccatgagggccacgtgtacggcttcggcctctccaactaccatcagcttggaactccgggcacagaatcttgcttcataccc

SEQ ID NO: 174745 - DNA, 997 bp, Homo sapiens
  Payload ID: 14313
  Gene Symbol: RCC1
  Gene Name: regulator of chromosome condensation 1
  ENST ID: ENST00000419074
  CDS Start-End: 181-997
atgggactgaagggggatcatctagaagctacatgaatgtgtaagatcttggaggaagacagcagagagagagagagagatcagagatcccagggttaaaagttggagaaatttcacagtacatcatccaaaagaggagtccatgatggaggcagaggtaaacttggagaggacaggaagatgtcacccaagcgcatagctaaaagaaggtcccccccagcagatgccatccccaaaagcaagaaggtgaaggtctcacacaggtcccacagcacagaacccggcttggtgctgacactaggccagggcgacgtgggccagctggggctgggtgagaatgtgatggagaggaagaagccggccctggtatccattccggaggatgttgtgcaggctgaggctgggggcatgcacaccgtgtgtctaagcaaaagtggccaggtctattccttcggctgcaatgatgagggtgccctgggaagggacacatcagtggagggctcggagatggtccctgggaaagtggagctgcaagagaaggtggtacaggtgtcagcaggagacagtcacacagcagccctcaccgatgatggccgtgtcttcctctggggctccttccgggacaataacggtgtgattggactgttggagcccatgaagaagagcatggtgcctgtgcaggtgcagctggatgtgcctgtggtaaaggtggcctcaggaaacgaccacttggtgatgctgacagctgatggtgacctctacaccttgggctgcggggaacagggccagctaggccgtgtgcctgagttatttgccaaccgtggtggccggcaaggcctcgaacgactcctggtccccaagtgtgtgatgctgaaatccaggggaagccggggccacgtgagattccaggatgccttttgtggtgcctatttcacctttgccatctcccatgagggccacgtgtacggcttcggcctctccaactaccatcagcttg

SEQ ID NO: 174746 - DNA, 903 bp, Homo sapiens
  Payload ID: 14313
  Gene Symbol: RCC1
  Gene Name: regulator of chromosome condensation 1
  ENST ID: ENST00000427469
  CDS Start-End: 214-903
ggacttccgggcacttcgtaaggtttaaaaaggatgcttcgcgttttctctctcctttttggagacagattcgcagtggtcgcttcttctccttggatttgttaaggattccaagtaactcttatttggagagaagacgatctgcacttcgcattttggcattgacatttaattttagggtcctttatatagaagggagagtaggacaggaagatgtcacccaagcgcatagctaaaagaaggtcccccccagcagatgccatccccaaaagcaagaaggtgaaggtctcacacaggtcccacagcacagaacccggcttggtgctgacactaggccagggcgacgtgggccagctggggctgggtgagaatgtgatggagaggaagaagccggccctggtatccattccggaggatgttgtgcaggctgaggctgggggcatgcacaccgtgtgtctaagcaaaagtggccaggtctattccttcggctgcaatgatgagggtgccctgggaagggacacatcagtggagggctcggagatggtccctgggaaagtggagctgcaagagaaggtggtacaggtgtcagcaggagacagtcacacagcagccctcaccgatgatggccgtgtcttcctctggggctccttccgggacaataacggtgtgattggactgttggagcccatgaagaagagcatggtgcctgtgcaggtgcagctggatgtgcctgtggtaaaggtggcctcaggaaacgaccacttggtgatgctgacagctgatggtgacctctacaccttgggctgcggggaacagggccagctaggccgtgtgcctgagttatttgccaaccgtggtggccggcaaggcctcgaacgactcctggtccccaagtgtgtgatg

SEQ ID NO: 174747 - DNA, 1070 bp, Homo sapiens
  Payload ID: 14313
  Gene Symbol: RCC1
  Gene Name: regulator of chromosome condensation 1
  ENST ID: ENST00000434290
  CDS Start-End: 253-1070
agattcgcagtggtcgcttcttctccttggatttgttaaggattccaagtaactcttatttggagagaagacgatctgcacttcgcattttggcattgacatttaattttagggtcctttatatagaagggagagtagctacatgaatgtgtaagatcttggaggaagacagcagagagagagagagagatcagagatcccagggttaaaagttggagaaatttcacagtacatcatccaaaagaggagtccatgatggaggcagaggacaggaagatgtcacccaagcgcatagctaaaagaaggtcccccccagcagatgccatccccaaaagcaagaaggtgaaggtctcacacaggtcccacagcacagaacccggcttggtgctgacactaggccagggcgacgtgggccagctggggctgggtgagaatgtgatggagaggaagaagccggccctggtatccattccggaggatgttgtgcaggctgaggctgggggcatgcacaccgtgtgtctaagcaaaagtggccaggtctattccttcggctgcaatgatgagggtgccctgggaagggacacatcagtggagggctcggagatggtccctgggaaagtggagctgcaagagaaggtggtacaggtgtcagcaggagacagtcacacagcagccctcaccgatgatggccgtgtcttcctctggggctccttccggcactgcctcttccacacttcccagaggcttggatggggcaaggaggtgtggaggcagggattgtcgcatctcagagtttccaaggacaataacggtgtgattggactgttggagcccatgaagaagagcatggtgcctgtgcaggtgcagctggatgtgcctgtggtaaaggtggcctcaggaaacgaccacttggtgatgctgacagctgatggtgacctctacaccttgggctgcggggaacagggccagctaggccgtgtgcctgagttatttgccaaccgtggtggccggcaaggcctcgaacgactcctggtccccaagtgtgtgatgctgaaatccaggggaagccg

SEQ ID NO: 174748 - DNA, 1169 bp, Homo sapiens
  Payload ID: 14313
  Gene Symbol: RCC1
  Gene Name: regulator of chromosome condensation 1
  ENST ID: ENST00000411533
  CDS Start-End: 53-1169
cggcggggagcgccggagttccttgtggccgacgtgcaccaaggacaggaagatgtcacccaagcgcatagctaaaagaaggtcccccccagcagatgccatccccaaaagcaagaaggtgaaggacacgagggccgctgcctcccgccgcgttcctggcgcccgctcctgccaagtctcacacaggtcccacagcacagaacccggcttggtgctgacactaggccagggcgacgtgggccagctggggctgggtgagaatgtgatggagaggaagaagccggccctggtatccattccggaggatgttgtgcaggctgaggctgggggcatgcacaccgtgtgtctaagcaaaagtggccaggtctattccttcggctgcaatgatgagggtgccctgggaagggacacatcagtggagggctcggagatggtccctgggaaagtggagctgcaagagaaggtggtacaggtgtcagcaggagacagtcacacagcagccctcaccgatgatggccgtgtcttcctctggggctccttccgggacaataacggtgtgattggactgttggagcccatgaagaagagcatggtgcctgtgcaggtgcagctggatgtgcctgtggtaaaggtggcctcaggaaacgaccacttggtgatgctgacagctgatggtgacctctacaccttgggctgcggggaacagggccagctaggccgtgtgcctgagttatttgccaaccgtggtggccggcaaggcctcgaacgactcctggtccccaagtgtgtgatgctgaaatccaggggaagccggggccacgtgagattccaggatgccttttgtggtgcctatttcacctttgccatctcccatgagggccacgtgtacggcttcggcctctccaactaccatcagcttggaactccgggcacagaatcttgcttcataccccagaacctaacatccttcaagaattccaccaagtcctgggtgggcttctctggtggccagcaccatacagtctgcatggattcggaaggaaaagcatacagcctgggccgggctgagtatgggcggctgggccttggagagggtgctgaggagaagagcatacccaccctcatctccaggctgcctgctgtctcctcggtggcttgtggggcctctg

SEQ ID NO: 174749 - DNA, 481 bp, Homo sapiens
  Payload ID: 14313
  Gene Symbol: RCC1
  Gene Name: regulator of chromosome condensation 1
  ENST ID: ENST00000486790
  CDS Start-End: 36-481
ggcgggccgggtgcgcgcggccgcccgggcgggggatgggtctctgccgcgaggaggatggttttgtccggcatgcgcttggagaaggcggtttgcagatcggggagggagccctgcccgggagagggtgggtcgtaggagctcgagggtctcccgctgtggacctttgggagccgtgtgtcttgaactccgcagcagctcagtctgtcagcagattatttgctggccatttattgcgtccctctcttgcggggctgggggacagtagtgagaagagcaggcccgtgtcattagcgaactatgcccttgaacccaggcgacggacgctactggacaggaagatgtcacccaagcgcatagctaaaagaaggtcccccccagcagatgccatccccaaaagcaagaaggtgaaggacacgagggccgctgcctcccgccgcgttcctggcgcccgctcctgccaagtctcacacaggtccca

SEQ ID NO: 174750 - DNA, 2030 bp, Homo sapiens; identical to SEQ ID NO: 171465
  Payload ID: 14314
  Gene Symbol: RCC2
  Gene Name: regulator of chromosome condensation 2
  Uniprot ID: Q9P258
  ENST ID: ENST00000375433
  CDS Start-End: 48-1616

SEQ ID NO: 174751 - DNA, 4087 bp, Homo sapiens; identical to SEQ ID NO: 171466
  Payload ID: 14314
  Gene Symbol: RCC2
  Gene Name: regulator of chromosome condensation 2
  Uniprot ID: Q9P258
  ENST ID: ENST00000375436
  CDS Start-End: 189-1757

SEQ ID NO: 174752 - DNA, 2894 bp, Homo sapiens
  Payload ID: 14315
  Gene Symbol: RGS9BP
  Gene Name: regulator of G protein signaling 9 binding protein
  Uniprot ID: Q6ZS82
  ENST ID: ENST00000334176
  CDS Start-End: 858-1565
actagaggtggggttagcgcttggaagcaccgaccaacgtgagcgcaacgcggcagggacacctgaccccggcggcgcccagcccctcggattgccagtcactgctcgctttggggcacggaggtgcccagtcctgcggggcacccgacgtcctgtcgccgacagggtccgggagtcagtatagctgggttctagtcccatcacaggcaaaaactccgcgggagcctggcccgctttttacctgggcctcagtttccccatccgtaaaatagaacgggttggatctcccgagcgctaacattccagaactcggatggggcgaaggggagggagggatgggccacccacacgtgacctccccgcgtggagccccgcctaccactgatccagggggtggcagctccggccgggacgagcggggtgggcgggtcctaggaaaccctacccggccgcccttggcagcgcctaaggcggagcgcgcggctctgcagcctgcttgccccggagttggcacccacggaggatggggaccgcaccctcagcttcgcagggagccaccgtggaggccagggcggtgcagagacacgacgtgtgactcggagtgcgcctggggaggatggacgagggagcgggggaccgctaacggggctccctctgcgcgccccgtccgcagaggcgcacgtcgagggtcccgggcgggctccgtggacgttggcggtagcgccgagcgagtcacggaccatgaagagcgttcgtgccgcgcggcccaaggccgggatgggggttagccacatcctgccgcgctgagggggaggctaacgggcgcgggcggccgggcccagccggagcccaccgcgatggcgagggaggagtgcaaggcgctgctggacgggctcaacaagacgactgcgtgctaccaccacctggtgctgaccgtcggtggctcggcggactcgcagaacctgcggcaggagctgcaaaagacgcgccagaaggcgcaggagctggcggtgtccacctgcgcccggctgactgctgtgctgcgcgaccggggcctggccgccgacgagcgcgccgagttcgagcggctctgggtggccttctcgggctgcctggacctgctggaagcggacatgcgacgcgcgctggagctgggcgccgcgttcccgctgcacgcgccgcggcggccgctggtgcgcacaggtgtggctggcgcctcctccggcgtggcggcgcgcgcgctgagcacccgcagcctgcggctcgaggcggagggcgacttcgacgtcgcggacctgcgggagctggagcgcgaggtccttcaggtgggcgagatgatcgacaacatggagatgaaggtcaacgtgccccgctggaccgtgcaagcccggcaggcggcgggcgccgagctcctgtccacggtcagcgccggcccctcctcggtcgtgtccttgcaggagcgcggggggggttgcgaccccaggaaggccctggccgccatccttttcggcgccgtgctgctggcggctgtggccctagccgtgtgcgtggcgaagctgagctgacggacacccgacggccgcctgctgctgccgctccctcccctgagaaaagactcgggatgggtgtggggtctggcctgtgcaaggggagtggtcctaaaaccccgtgtgtgcatgggtacacgcgcgtttccagtgcacatctgcctgggcaggacacggtttcctcttgctggcccgggaggagttaactttgcgccggccgtcagggcattaccgctaacgtctgcaggagctttattccctattaatagaaaaccgtcacagtgaccctagatccctccgagttaatgagttaacacatgtgctgttggggcgtctttacagggagtccgagttcggtgcccacccctgccagcgtcgccccctttctgcgtgggacagtttgaaaaggtgggtggggtggagtgaagtttggagagggacgctgtttggttctatgtggttggtctgtttcccggacaagaaaaattgcaatcaaatgtcagcagcttttattaccttaatctttcagggcctaaatttaggagagtgtcccgagagcagttcatacaaagggctttctctaagacgcgctacagcccttcctagcagagtttatccattcgtccccaagagcagctagaagagatttgaggtcatgacctcccactgccgctcaggggctgaccctatttaggaaaccaaagagggtgggttgaacctactctcacggacttggatccagtgcgcacacttgcctgcggaaaagggctctccccagccacccggagatgggggtaagaggaagagcagaggcttggggtagggccacctggtgtttaaacaggcactttctccttctctggggcttatttttgttcagaactagaccagagtgtttgaacctcctttgcaggagggctgggaatcctctttagagcacttaatcctatttatcccctggaatgtgcgtgctggccagtaggagggctggctttggcagctccctgacccccgcgctgcccgcccctccggggtaatgtggcattactggcccacagaggttttgagccaatcagctctgagactgggttagaatgtaacagctttaacttgggatttaagaagcttttaaaaggtaataatactctgaaagaaaaatgacgtaaccacagcgtgtactatgaaagctgttattttaataaagaacgctgggccatgaactcatacctgccaatgagtcaaacatagtatctttatgtagatacttagattactaaatatatatttcatctacttctgaagttgatagtcttcccccccccccacttttttcttttttgagacagg

SEQ ID NO: 174753 - DNA, 1405 bp, Homo sapiens
  Payload ID: 14316
  Gene Symbol: RGS1
  Gene Name: regulator of G-protein signaling 1
  Uniprot ID: Q08116
  ENST ID: ENST00000367459
  CDS Start-End: 67-696
gcctgtctgcattctactatataaagcagcagagacgttgactagcgcatatttgctaagagcaccatgcgcgcagcagccatctccactccaaagttagacaaaatgccaggaatgttcttctctgctaacccaaaggaattgaaaggaaccactcattcacttctagacgacaaaatgcaaaaaaggaggccaaagacttttggaatggatatgaaagcatacctgagatctatgatcccacatctggaatctggaatgaaatcttccaagtccaaggatgtactttctgctgctgaagtaatgcaatggtctcaatctctggaaaaacttcttgccaaccaaactggtcaaaatgtctttggaagtttcctaaagtctgaattcagtgaggagaatattgagttctggctggcttgtgaagactataagaaaacagagtctgatcttttgccctgtaaagcagaagagatatataaagcatttgtgcattcagatgctgctaaacaaatcaatattgacttccgcactcgagaatctacagccaagaagattaaagcaccaacccccacgtgttttgatgaagcacaaaaagtcatatatactcttatggaaaaggactcttatcccaggttcctcaaatcagatatttacttaaatcttctaaatgacctgcaggctaatagcctaaagtgactggtccctggctgaagggaattaacagatagtatcaagcgcagaaggaatgtgccagtatggctccctgggtgaacagcttggccttttttgggtgtcttgacaggccaagaagaacaaatgactcagaatggattaacatgaaagttatccaggcgcagagttgaagaagcataagcaagacaaaaacagagagaccgcagaaggaggaagatactgtggtactgtcataaaaaacagtggagctctgtattagaaagcccctcagaactgggaaggccaggtaactctagttacacagaaactgtgactaaagtctatgaaactgattacaacagactgtaagaatcaaagtcaactgacatctatgctacatattattatatagtttgtactgagctattgaagtcccattaacttaaagtatatgttttcaaattgccattgctactattgcttgtcggtgttattttattttattgtttttgactttggaagagatgaactgtgtatttaacttaagctattgctcttaaaaccagggagtcagaatatatttgtaagttaaatcattggtgctaataataaatgtggattttgtattaaaatatatagaagcaatttctgtttacatgtccttgctacttttaaaaacttgcatttattcctcagattttaaaaataaataaataattcatttaagattctt

SEQ ID NO: 174754 - DNA, 1034 bp, Homo sapiens
  Payload ID: 14316
  Gene Symbol: RGS1
  Gene Name: regulator of G-protein signaling 1
  Uniprot ID: Q08116
  ENST ID: ENST00000469578
  CDS Start-End: 21-530
gcatatttgctaagagcaccatgcgcgcagcagccatctccactccaaagttagacaaaatgccaggaatgttcttctctgctaacccaaaggaattgaaaggaaccactcattcacttctagacgacaaaatgcaaaaaaggaggccaaagacttttggaatggatatgaaagcatacctgagatctatgatcccacatctggaatctggaatgaaatcttccaagtccaaggatgtactttctgctgctgaagtaatgcaatggtctcaatctctggaaaaacttcttgccaaccaaactggtcaaaatgtctttggaagtttcctaaagtctgaattcagtgaggagaatattgagttctggctggcttgtgaagactataagaaaacagagtctgatcttttgccctgtaaagcagaagagatatataaagcatttgtgcattcagatgctgctaaacaagtgagtattaagcttatcatcatcagtttctccataaaagaccctatatgcagaaataacatttaatatatacaacaagataaaatccttttggggtatataattttacttctacatacttaggcatataaatatagttcagtgcaatgagaatctaattttctatattggtgagggtttcagcacagtagaataaagagactgattttacaaaaccagctgccatgatgagggtgagggaagggttaagggtattgttactgaccagaactgcatgtcagggagtccttaatgagtgctcttgttttggataagaaaatgcagattagcataatgtatacaattgcagcagcaaaagtatttccaattaacagtattaccagataaatattcttggtccaagcagaaaatatcaacaaaaagagccttcttctcctgtaaatcttaaatgcctacatcactctttatgatacatggatcatcttatgtggatacttaaatttttcatgtctgcttcttttgcctctcctaactatactatgaggaaatttggaacaaagacatttttgt

SEQ ID NO: 174755 - DNA, 738 bp, Homo sapiens
  Payload ID: 14317
  Gene Symbol: RGS10
  Gene Name: regulator of G-protein signaling 10
  Uniprot ID: O43665
  ENST ID: ENST00000369101
  CDS Start-End: 29-550
ttaaaatgacagtgtctgttggccacatatgcagtctgaactttgctttgcagacatccacgacagcgatggcagttccagcagcagccaccagagcctcaagagcacagccaaatgggcggcatccctggagaatctgctggaagacccagaaggcgtgaaaagatttagggaatttttaaaaaaggaattcagtgaagaaaatgttttgttttggctagcatgtgaagattttaagaaaatgcaagataagacgcagatgcaggaaaaggcaaaggagatctacatgacctttctgtccagcaaggcctcatcacaggtcaacgtggaggggcagtctcggctcaacgagaagatcctggaagaaccgcaccctctgatgttccagaaactccaggaccagatctttaatctcatgaagtacgacagctacagccgcttcttaaagtctgacttgtttttaaaacacaagcgaaccgaggaagaggaagaagatttgcctgatgctcaaactgcagctaaaagagcttccagaatttataacacatgagcccccaaaaagccgggactggcagctttaagaagcaaaggaatttcctctcaggaccgtgccgggtttatcattgctttgttatttgtaaggactgaaatgtacaaaacccttcaatgggatgtgtgttttattaactgcttcaccagtaaattttgcatgatggctaagctaacataaaaaaagaa

SEQ ID NO: 174756 - DNA, 804 bp, Homo sapiens
  Payload ID: 14317
  Gene Symbol: RGS10
  Gene Name: regulator of G-protein signaling 10
  Uniprot ID: O43665
  ENST ID: ENST00000369103
  CDS Start-End: 71-616
cctcgccttcctccggctcagccgccgcgccgccgggctgctccttcttcctcctcgggcgcccgcggcgatgttcaaccgcgccgtgagccggctgagcaggaagcggccgccgtcagacatccacgacagcgatggcagttccagcagcagccaccagagcctcaagagcacagccaaatgggcggcatccctggagaatctgctggaagacccagaaggcgtgaaaagatttagggaatttttaaaaaaggaattcagtgaagaaaatgttttgttttggctagcatgtgaagattttaagaaaatgcaagataagacgcagatgcaggaaaaggcaaaggagatctacatgacctttctgtccagcaaggcctcatcacaggtcaacgtggaggggcagtctcggctcaacgagaagatcctggaagaaccgcaccctctgatgttccagaaactccaggaccagatctttaatctcatgaagtacgacagctacagccgcttcttaaagtctgacttgtttttaaaacacaagcgaaccgaggaagaggaagaagatttgcctgatgctcaaactgcagctaaaagagcttccagaatttataacacatgagcccccaaaaagccgggactggcagctttaagaagcaaaggaatttcctctcaggaccgtgccgggtttatcattgctttgttatttgtaaggactgaaatgtacaaaacccttcaatgggatgtgtgttttattaactgcttcaccagtaaattttgcatgatggctaagctaacataaaaaaagaa

SEQ ID NO: 174757 - DNA, 852 bp, Homo sapiens
  Payload ID: 14317
  Gene Symbol: RGS10
  Gene Name: regulator of G-protein signaling 10
  Uniprot ID: O43665
  ENST ID: ENST00000392865
  CDS Start-End: 64-567
ggcgtctctgggaaggcagtggattgttggtctgcgtggaacttctcaggtggacaccagagcatggaacacatccacgacagcgatggcagttccagcagcagccaccagagcctcaagagcacagccaaatgggcggcatccctggagaatctgctggaagacccagaaggcgtgaaaagatttagggaatttttaaaaaaggaattcagtgaagaaaatgttttgttttggctagcatgtgaagattttaagaaaatgcaagataagacgcagatgcaggaaaaggcaaaggagatctacatgacctttctgtccagcaaggcctcatcacaggtcaacgtggaggggcagtctcggctcaacgagaagatcctggaagaaccgcaccctctgatgttccagaaactccaggaccagatctttaatctcatgaagtacgacagctacagccgcttcttaaagtctgacttgtttttaaaacacaagcgaaccgaggaagaggaagaagatttgcctgatgctcaaactgcagctaaaagagcttccagaatttataacacatgagcccccaaaaagccgggactggcagctttaagaagcaaaggaatttcctctcaggaccgtgccgggtttatcattgctttgttatttgtaaggactgaaatgtacaaaacccttcaatgggatgtgtgttttattaactgcttcaccagtaaattttgcatgatggctaagctaacataaaaaaagaataataataacttggaagttttagtttacaaaacagagattccttcaacactggacacgtcgagcattttgtagcttaattaaacctcatgtaaggcc

SEQ ID NO: 174758 - DNA, 2236 bp, Homo sapiens
  Payload ID: 14318
  Gene Symbol: RGS11
  Gene Name: regulator of G-protein signaling 11
  ENST ID: ENST00000168869
  CDS Start-End: 104-358
gtcatccccgccggcctcgccccgcagccatggccgccggccccgcgccgccccccggccgcccccgggcgcagatgccgcatctgaggaaggtgcgaggcggatggagcgggtggtcgtgagcatgcaggaccccgaccagggcgtgaagatgcggagccagcgcctgctggtcaccgtcattccccacgcggtgacaggcagcgacgtcgtgcagtggttggcccagaagttctgcgtctcggaggaggaccccgtacttctggacaagtaccctgaggccggctgcagagctggactatgccatctacctggccaagaagaacatccgaaaacgggggaccctggtggattatgagaaggactgctatgaccggctacacaagaagatcaaccacgcatgggacctggtgctgatgcaggcgagggagcagctgagggcagccaagcagcgcagcaagggggacaggctggtcattgcgtgccaggagcagacctactggctggtgaacaggcccccgaccaagagtgcagatttccataagcgggagatcgagtacttcaggaaagcgctgggcaggacccgagtgaagtcctccgtctgccttgaggcgtacctgagtttctgcggccagcgtggaccccacgatcccctcgtgtcggggtgcctgcccagcaatccctggatctcagacaatgacgcctactgggtcatgaatgcccccacggtggctgcccccacgaagctccgtgtggagagatggggcttcagcttccgggagctcctggaggaccccgtggggcgggcccacttcatggactttctgggaaaggagttcagtggagaaaacctcagcttctgggaggcatgtgaggagcttcgatatggagcgcaggcccaggtccccaccctggtggatgccgtgtacgagcagttcctggcccccggagctgcccactgggtcaacatcgacagccggaccatggagcagaccctggaggggctgcgccagccccaccgctatgtcctggatgacgcccagctgcacatatacatgctcatgaagaaggactcctacccaaggttcctgaagtctgacatgtacaaggccctcctggcagaggctgggatcccgctggagatgaagagacgcgtgttcccgtttacgtggaggccacggcactcgagccccagccctgcactccttcccacccctgtggagcccacagcggcttgtggccctgggggtggagatggggtggcctagtggacctggcccatctgccactctagtccctgcagctcaacgtcctgcgtgaatgcagcagccacccccgtcttggcccaggtcctgggggctgctgaacccagcaccagtgtccccttgtgcccagggggcccagtcttctgtggggtgcacagcctccctccctccagcaagccctccctgcccagaaggaatgggtccaggtgtggattcccagggagggggttcattggctcagcttgggtcagggcagagcctgttacctgaagagaggtgagaccaaggccacagggagctccaccttctctggtcttcagtccagcactgggtgcccatccccatctctaaaaccagtaaatcagccagcgaatacccggaagcaagatgcacaggcgggcggcttcccacacacccgtcacaagacgcggacatgcaggtctcggcgcgagctctgccccgtccaagagcctctccgctgtcgcccagtgtgagcctggaagaggacccaagagagtgccgtgctgaggctgcctcgaggtcactgccttccggagctgcgcctattcctccctcgccaaacgcgttccagaatttgtccacaggtgcgccggcacctgctttcccacctcgaggccgcggcctcccccccgatttatagacaactctgacattgtcaccccactgacgaggcccgattccatagggtggatccttgccaggcgtccctgatcctccctgcccaagtcttccttcgtgagctggccttgctccccatcccccaagtgcctcaccagtcccccagactgggtgaaggtacagctggctcctttcgggggtgcagcttcaactctctcggcggtagggcggtgccatccccacccatagggctggctcacatccagtcactcccaacagcgtccagcacacaaataaaagacccttgggccctggctctgagcccatcctgc

SEQ ID NO: 174759 - DNA, 2376 bp, Homo sapiens
  Payload ID: 14318
  Gene Symbol: RGS11
  Gene Name: regulator of G-protein signaling 11
  Uniprot ID: O94810
  ENST ID: ENST00000316163
  CDS Start-End: 78-1418
gccatggccgccggccccgcgccgccccccggccgcccccgggcgcagatgccgcatctgaggaaggtgcgaggcggatggagcgggtggtcgtgagcatgcaggaccccgaccagggcgtgaagatgcggagccagcgcctgctggtcaccgtcattccccacgcggtgacaggcagcgacgtcgtgcagtggttggcccagaagttctgcgtctcggaggaggaggccctgcacctgggcgccgtcctggtgcagcatggctacatctacccgctgcgcgacccccgtagcctcatgctccggccagacgagacgccctacaggttccagaccccgtacttctggacaagtaccctgaggccggctgcagagctggactatgccatctacctggccaagaagaacatccgaaaacgggggaccctggtggattatgagaaggactgctatgaccggctacacaagaagatcaaccacgcatgggacctggtgctgatgcaggcgagggagcagctgagggcagccaagcagcgcagcaagggggacaggctggtcattgcgtgccaggagcagacctactggctggtgaacaggcccccgcccggggcccccgatgtgctggagcagggtccagggcggggatcctgcgctgccagccgtgtgctcatgaccaagagtgcagatttccataagcgggagatcgagtacttcaggaaagcgctgggcaggacccgagtgaagtcctccgtctgccttgaggcgtacctgagtttctgcggccagcgtggaccccacgatcccctcgtgtcggggtgcctgcccagcaatccctggatctcagacaatgacgcctactgggtcatgaatgcccccacggtggctgcccccacgaagctccgtgtggagagatggggcttcagcttccgggagctcctggaggaccccgtggggcgggcccacttcatggactttctgggaaaggagttcagtggagaaaacctcagcttctgggaggcatgtgaggagcttcgatatggagcgcaggcccaggtccccaccctggtggatgccgtgtacgagcagttcctggcccccggagctgcccactgggtcaacatcgacagccggaccatggagcagaccctggaggggctgcgccagccccaccgctatgtcctggatgacgcccagctgcacatatacatgctcatgaagaaggactcctacccaaggttcctgaagtctgacatgtacaaggccctcctggcagaggctgggatcccgctggagatgaagagacgcgtgttcccgtttacgtggaggccacggcactcgagccccagccctgcactccttcccacccctgtggagcccacagcggcttgtggccctgggggtggagatggggtggcctagtggacctggcccatctgccactctagtccctgcagctcaacgtcctgcgtgaatgcagcagccacccccgtcttggcccaggtcctgggggctgctgaacccagcaccagtgtccccttgtgcccagggggcccagtcttctgtggggtgcacagcctccctccctccagcaagccctccctgcccagaaggaatgggtccaggtgtggattcccagggagggggttcattggctcagcttgggtcagggcagagcctgttacctgaagagaggtgagaccaaggccacagggagctccaccttctctggtcttcagtccagcactgggtgcccatccccatctctaaaaccagtaaatcagccagcgaatacccggaagcaagatgcacaggcgggcggcttcccacacacccgtcacaagacgcggacatgcaggtctcggcgcgagctctgccccgtccaagagcctctccgctgtcgcccagtgtgagcctggaagaggacccaagagagtgccgtgctgaggctgcctcgaggtcactgccttccggagctgcgcctattcctccctcgccaaacgcgttccagaatttgtccacaggtgcgccggcacctgctttcccacctcgaggccgcggcctcccccccgatttatagacaactctgacattgtcaccccactgacgaggcccgattccatagggtggatccttgccaggcgtccctgatcctccctgcccaagtcttccttcgtgagctggccttgctccccatcccccaagtgcctcaccagtcccccagactgggtgaaggtacagctggctcctttcgggggtgcagcttcaactctctcggcggtagggcggtgccatccccacccatagggctggctcacatccagtcactcccaacagcgtccagcacacaaataaaagacccttgggccctggctctgag

SEQ ID NO: 174760 - DNA, 1371 bp, Homo sapiens
  Payload ID: 14318
  Gene Symbol: RGS11
  Gene Name: regulator of G-protein signaling 11
  Uniprot ID: O94810
  ENST ID: ENST00000359740
  CDS Start-End: 1-1371
atggccgccggccccgcgccgccccccggccgcccccgggcgcagatgccgcatctgaggaagatggagcgggtggtcgtgagcatgcaggaccccgaccagggcgtgaagatgcggagccagcgcctgctggtcaccgtcattccccacgcggtgacaggcagcgacgtcgtgcagtggttggcccagaagttctgcgtctcggaggaggaggccctgcacctgggcgccgtcctggtgcagcatggctacatctacccgctgcgcgacccccgtagcctcatgctccggccagacgagacgccctacaggttccaggtcaggctcgggggtgcagccatctacctggccaagaagaacatccgaaaacgggggaccctggtggattatgagaaggactgctatgaccggctacacaagaagatcaaccacgcatgggacctggtgctgatgcaggcgagggagcagctgagggcagccaagcagcgcagcaagggggacaggctggtcattgcgtgccaggagcagacctactggctggtgaacaggcccccgcccggggcccccgatgtgctggagcagggtccagggcggggatcctgcgctgccagccgtgtgctcatgaccaagagtgcagatttccataagcgggagatcgagtacttcaggaaagcgctgggcaggacccgagtgaagtcctccgtctgccttgaggcgtacctgagtttctgcggccagcgtggaccccacgatcccctcgtgtcggggtgcctgcccagcaatccctggatctcagacaatgacgcctactgggtcatgaatgcccccacggtggctgcccccacgaagctccgtgtggagagatggggcttcagcttccgggagctcctggaggaccccgtggggcgggcccacttcatggactttctgggaaaggagttcagtggagaaaacctcagcttctgggaggcatgtgaggagcttcgatatggagcgcaggcccaggtccccaccctggtggatgccgtgtacgagcagttcctggcccccggagctgcccactgggtcaacatcgacagccggaccatggagcagaccctggaggggctgcgccagccccaccgctatgtcctggatgacgcccagctgcacatatacatgctcatgaagaaggactcctacccaaggttcctgaagtctgacatgtacaaggccctcctggcagaggctgggatcccgctggagatgaagagacgcgtgttcccgtttacgtggaggccacggcactcgagccccagccctgcactccttcccacccctgtggagcccacagcggcttgtggccctgggggtggagatggggtggcctag

SEQ ID NO: 174761 - DNA, 2390 bp, Homo sapiens
  Payload ID: 14318
  Gene Symbol: RGS11
  Gene Name: regulator of G-protein signaling 11
  Uniprot ID: O94810
  ENST ID: ENST00000397770
  CDS Start-End: 19-1422
cggcctcgccccgcagccatggccgccggccccgcgccgccccccggccgcccccgggcgcagatgccgcatctgaggaagatggagcgggtggtcgtgagcatgcaggaccccgaccagggcgtgaagatgcggagccagcgcctgctggtcaccgtcattccccacgcggtgacaggcagcgacgtcgtgcagtggttggcccagaagttctgcgtctcggaggaggaggccctgcacctgggcgccgtcctggtgcagcatggctacatctacccgctgcgcgacccccgtagcctcatgctccggccagacgagacgccctacaggttccagaccccgtacttctggacaagtaccctgaggccggctgcagagctggactatgccatctacctggccaagaagaacatccgaaaacgggggaccctggtggattatgagaaggactgctatgaccggctacacaagaagatcaaccacgcatgggacctggtgctgatgcaggcgagggagcagctgagggcagccaagcagcgcagcaagggggacaggctggtcattgcgtgccaggagcagacctactggctggtgaacaggcccccgcccggggcccccgatgtgctggagcagggtccagggcggggatcctgcgctgccagccgtgtgctcatgaccaagagtgcagatttccataagcgggagatcgagtacttcaggaaagcgctgggcaggacccgagtgaagtcctccgtctgccttgaggcgtacctgagtttctgcggccagcgtggaccccacgatcccctcgtgtcggggtgcctgcccagcaatccctggatctcagacaatgacgcctactgggtcatgaatgcccccacggtggctgcccccacgaagctccgtgtggagagatggggcttcagcttccgggagctcctggaggaccccgtggggcgggcccacttcatggactttctgggaaaggagttcagtggagaaaacctcagcttctgggaggcatgtgaggagcttcgatatggagcgcaggcccaggtccccaccctggtggatgccgtgtacgagcagttcctggcccccggagctgcccactgggtcaacatcgacagccggaccatggagcagaccctggaggggctgcgccagccccaccgctatgtcctggatgacgcccagctgcacatatacatgctcatgaagaaggactcctacccaaggttcctgaagtctgacatgtacaaggccctcctggcagaggctgggatcccgctggagatgaagagacgcgtgttcccgtttacgtggaggccacggcactcgagccccagccctgcactccttcccacccctgtggagcccacagcggcttgtggccctgggggtggagatggggtggcctagtggacctggcccatctgccactctagtccctgcagctcaacgtcctgcgtgaatgcagcagccacccccgtcttggcccaggtcctgggggctgctgaacccagcaccagtgtccccttgtgcccagggggcccagtcttctgtggggtgcacagcctccctccctccagcaagccctccctgcccagaaggaatgggtccaggtgtggattcccagggagggggttcattggctcagcttgggtcagggcagagcctgttacctgaagagaggtgagaccaaggccacagggagctccaccttctctggtcttcagtccagcactgggtgcccatccccatctctaaaaccagtaaatcagccagcgaatacccggaagcaagatgcacaggcgggcggcttcccacacacccgtcacaagacgcggacatgcaggtctcggcgcgagctctgccccgtccaagagcctctccgctgtcgcccagtgtgagcctggaagaggacccaagagagtgccgtgctgaggctgcctcgaggtcactgccttccggagctgcgcctattcctccctcgccaaacgcgttccagaatttgtccacaggtgcgccggcacctgctttcccacctcgaggccgcggcctcccccccgatttatagacaactctgacattgtcaccccactgacgaggcccgattccatagggtggatccttgccaggcgtccctgatcctccctgcccaagtcttccttcgtgagctggccttgctccccatcccccaagtgcctcaccagtcccccagactgggtgaaggtacagctggctcctttcgggggtgcagcttcaactctctcggcggtagggcggtgccatccccacccatagggctggctcacatccagtcactcccaacagcgtccagcacacaaataaaagacccttgggccctggctctgagcccatcctgc

SEQ ID NO: 174762 - DNA, 4674 bp, Homo sapiens
  Payload ID: 14319
  Gene Symbol: RGS12
  Gene Name: regulator of G-protein signaling 12
  Uniprot ID: O14924
  ENST ID: ENST00000336727
  CDS Start-End: 104-4447
agggcactgtttgaagaagcaaacatggtagcatcaagcattccttgaaatatggctccaagggaacaatgagacgtgctcttggtcttggaagctcatcagaatgtttagagctggggaggcctccaaacgcccattgcctgggccgtcgcccccaagggtgcggagtgtggaggttgcccgggggagggccggctacggattcacgctttcgggacaggcaccctgtgtgctcagctgcgtcatgagagggagccctgcggatttcgtgggcctccgagctggagaccagatacttgctgtcaatgaaatcaacgtgaaaaaagcatctcatgaagatgtagtgaaattaattgggaagtgctctggtgtccttcacatggtgattgctgaaggcgtcggccgcttcgaatcctgttccagtgatgaagaagggggactctatgaaggaaaaggctggctgaagcccaagctggattctaaagcactaggtataaacagagcagagcgagtcgtggaggaaatgcagtctggtggaattttcaatatgatttttgaaaacccgagcctttgtgcgagcaattcagagcccttgaaattgaaacaaagatccctttcagagtcggccgcaactcgatttgatgttggacatgaaagtataaataatccaaatcccaacatgctttctaaggaggaaatatcaaaagttattcatgatgattcggttttcagcattggactagaaagtcatgacgattttgcattggatgcaagtattttaaacgtggcgatgatcgtgggctacttaggctccattgagcttccttccacgagctccaacctggagtccgacagcttgcaagccatccgcggctgcatgcggcgcctgcgggcagagcagaaaatccactcgctggtgaccatgaagatcatgcacgactgtgtgcagctgagcactgacaaggctggagtcgtggccgagtacccggccgagaagctggccttcagcgccgtgtgcccggacgaccggcgatttttcgggttggttaccatgcagacgaatgacgacgggagcctggcccaggaggaggagggcgccctgcggacttcctgccacgtgttcatggtggacccagacttgtttaatcacaagatccaccaaggcattgctcggcggtttgggtttgagtgcacggccgacccagacaccaatggctgtctggaattcccggcgtcctccctccccgtcctgcagttcatctctgtcctgtaccgagacatgggtgagctgattgagggcatgcgggcccgcgcctttctggacggggacgccgatgcccaccagaacaacagcaccagcagcaacagtgacagcggcattgggaacttccaccaggaggagaagagcaaccgggtccttgtggtggacctgggtgggagctcgagcagacacggccccggaggcagcgcgtgggacggtgtgggtgggaggggtgcccagccctggggtgctccctggactgggcccttctgtccggaccccgaagggagccccccatttgaggccgctcatcagactgacaggttctgggacctaaacaagcacctagggccagcctctcctgtggaggtgcccccagcttccttgaggagctcagtccccccttccaagaggggcaccgtgggtgctggctgtggtttcaaccagcgctggctcccggtccacgtgctccgggagtggcagtgcggacacaccagcgaccaggactcttacacagattccaccgatggctggtccagcatcaactgcggcacactgccccctcctatgagcaagatccccgcagaccgctacagggtggagggcagcttcgcgcagcccccgctgaatgccccgaagagggagtggtccaggaaggcctttggaatgcaaagcatttttggtccccatcgaaatgttcgaaagactaaggaagataaaaagggctcaaaatttgggcggggaactggactcactcagccttctcaacgcacgtctgctcggagatcatttgggagatccaagagattcagtatcactcgctcccttgatgatcttgagtctgcaactgtgtctgatggcgagttgacgggcgccgacctgaaggactgcgtcagcaacaacagcctgagcagcaatgccagcctccccagcgtgcagagctgccggcgcctgcgtgagaggagggtcgccagctgggccgtgtcctttgagcgcctgctgcaggaccccgtcggtgtccgctacttctctgattttctaaggaaagaattcagtgaagaaaacattttattctggcaggcctgtgaatattttaatcatgttcctgcacatgacaaaaaggagctttcctacagggcccgggagattttcagtaagtttctctgcagcaaagccaccaccccggtcaacatcgacagccaggcccagctagcagacgacgtcctccgcgcacctcacccagacatgttcaaggagcagcagctgcagatcttcaatctcatgaagtttgatagctacactcgctttctgaagtccccgctgtaccaggaatgcatcctggcggaagtggagggccgtgcactcccggactcgcagcaggtccccagcagcccggcttccaagcacagcctcggttcagaccactccagtgtgtccacgccaaaaaagttaagtggaaaatcaaaatccggccgatccctgaatgaagagctgggggatgaggacagcgagaagaagcggaaaggcgcgtttttctcgtggtcgcggaccaggagcaccgggaggtcccagaaaaagagggagcacggggaccacgcagacgacgccctgcatgccaatggaggcctgtgtcgccgagagtcgcagggctctgtgtcctctgcggggagcctggacctgtcggaggcctgcaggactttggcacccgagaaggacaaggccaccaagcactgctgcattcatctcccggatgggacatcctgcgtggtggctgtcaaggcgggcttctccatcaaagacatcctgtccggactctgtgagcggcatggcatcaacggggcggccgcggacctcttcctggtgggcggggacaagcctctggtgctgcaccaagacagtagcatcttggagtcaagggacctgcgcctagaaaagcgcaccttgtttcggctggatcttgttccgattaaccggtcagtgggactcaaggccaagcccaccaagcccgtcacggaggtgctgcggcccgtggtggccagatacggcctggacctcagtggcctgctggtgaggctgagtggagagaaggagcccctggaccttggcgcccctatatcgagtctggacggacagcgggttgtcttggaggagaaggatccttccagaggaaaggcatccgcagataaacagaaaggtgtgccagtgaaacagaacacagctgtaaattccagctccagaaaccactcggctacgggagaggaaagaacactaggcaagtctaattctattaaaataaaaggagaaaatggaaaaaatgctagggatccccggctttcaaagagagaagaatctattgcaaagattgggaaaaaaaaatatcagaaaattaatttggacgaagcagaggagttttttgagcttatttccaaagctcagagcaacagagcagatgaccaacgtgggctgctaaggaaggaagacctggtgttgccagagttcctccgtttacctcctggttccacagaactcaccctccccactccagctgctgtggccaagggctttagcaagagaagcgccacaggcaacggccgggagagcgcctcccagcctggcgagcagtgggagccagtccaggagagcagcgacagcccgtccaccagcccgggctcagcctccagcccccctggacctcctgggacgaccccccccgggcagaagtctcccagcgggcccttctgcactccccagtcccccgtctccctcgcgcaggagggcaccgcccagatctggaagaggcagtctcaggaagtggaggccgggggcatccagacggtggaggatgagcacgtggccgagctgaccctgatgggggagggggacatcagcagccccaacagcaccttgctgccgccgccctccaccccccaggaagtgccaggaccttccagaccaggaagtgggacccatggcagccgagacctcccagtcaacagaatcatcgatgtggatcttgtaactggctcggcgcccgggcgggatggtggcatagcgggggcacaggctggccctgggaggtcgcaggccagtggtgggcctcctacatcagacctccctggcttgggccccgtcccgggtgagcctgctaagcccaagaccagcgctcaccacgccaccttcgtctgagctgccctggcctggccaactctcctgtggacatgtcggggtggggcagcccaggtggattctgtgggcctcaggggggccaccctggccaccacaccctcaggagcccagccaggagggcagggggtgacctcgctggaggcactggccccggacattcgccatgctggccatggggctccctggccctggcctcctgctgcccaataaagcatttctgaggaccc

SEQ ID NO: 174763 - DNA, 5469 bp, Homo sapiens
  Payload ID: 14319
  Gene Symbol: RGS12
  Gene Name: regulator of G-protein signaling 12
  Uniprot ID: O14924
  ENST ID: ENST00000344733
  CDS Start-End: 905-5248
atttatattcattttttactcttttccatcaaaacataattttactaagtacgcatgttctgtgtccgtgttttgtcatcactgaagccacttttggagtcacctagtaatagcctttccactctatctagttctgtagcttttatgtgtgtaaattacttcaaatctgtttatgatcctattgctggaaactttatcccaagacacaaaaatcttttctattagaagttattaactttaaaacaattatttattttattttattttattttttgagacagagtctcgctttgtcacccaggctggagtgcagtggcacgatctcggctcactgcaagctccacctcccgagttcatgccattctcctgcctcagcctcccgagtagctgggactacgggcgtccgccaccatgcccagctaattttttttgtatttttggtagagacaaggtttcaccgtgttagccaggatggtcttgatctcctgacctcgtggtccacctgcctcggcctcccaaagcgctgggattataggcgtgagccaccgcacctggcctaaaacaattatttctttaaaaaaacataccctctattctattttgtgtcttcacaacacaatcacttactgtattgctttttaaagtgatctttaaagagtcttgcagaagagactacacagcaggcccgagaccatcctgagaggcctgtgtgcaaggctggccccccgctggtgtcaggacggtgcccaccaccctcaatgaagaggggctccctgtgcttagctgcttgtgtggggaacaagggcactgtttgaagaagcaaacatggtagcatcaagcattccttgaaatatggctccaagggaacaatgagacgtgctcttggtcttggaagctcatcagaatgtttagagctggggaggcctccaaacgcccattgcctgggccgtcgcccccaagggtgcggagtgtggaggttgcccgggggagggccggctacggattcacgctttcgggacaggcaccctgtgtgctcagctgcgtcatgagagggagccctgcggatttcgtgggcctccgagctggagaccagatacttgctgtcaatgaaatcaacgtgaaaaaagcatctcatgaagatgtagtgaaattaattgggaagtgctctggtgtccttcacatggtgattgctgaaggcgtcggccgcttcgaatcctgttccagtgatgaagaagggggactctatgaaggaaaaggctggctgaagcccaagctggattctaaagcactaggtataaacagagcagagcgagtcgtggaggaaatgcagtctggtggaattttcaatatgatttttgaaaacccgagcctttgtgcgagcaattcagagcccttgaaattgaaacaaagatccctttcagagtcggccgcaactcgatttgatgttggacatgaaagtataaataatccaaatcccaacatgctttctaaggaggaaatatcaaaagttattcatgatgattcggttttcagcattggactagaaagtcatgacgattttgcattggatgcaagtattttaaacgtggcgatgatcgtgggctacttaggctccattgagcttccttccacgagctccaacctggagtccgacagcttgcaagccatccgcggctgcatgcggcgcctgcgggcagagcagaaaatccactcgctggtgaccatgaagatcatgcacgactgtgtgcagctgagcactgacaaggctggagtcgtggccgagtacccggccgagaagctggccttcagcgccgtgtgcccggacgaccggcgatttttcgggttggttaccatgcagacgaatgacgacgggagcctggcccaggaggaggagggcgccctgcggacttcctgccacgtgttcatggtggacccagacttgtttaatcacaagatccaccaaggcattgctcggcggtttgggtttgagtgcacggccgacccagacaccaatggctgtctggaattcccggcgtcctccctccccgtcctgcagttcatctctgtcctgtaccgagacatgggtgagctgattgagggcatgcgggcccgcgcctttctggacggggacgccgatgcccaccagaacaacagcaccagcagcaacagtgacagcggcattgggaacttccaccaggaggagaagagcaaccgggtccttgtggtggacctgggtgggagctcgagcagacacggccccggaggcagcgcgtgggacggtgtgggtgggaggggtgcccagccctggggtgctccctggactgggcccttctgtccggaccccgaagggagccccccatttgaggccgctcatcagactgacaggttctgggacctaaacaagcacctagggccagcctctcctgtggaggtgcccccagcttccttgaggagctcagtccccccttccaagaggggcaccgtgggtgctggctgtggtttcaaccagcgctggctcccggtccacgtgctccgggagtggcagtgcggacacaccagcgaccaggactcttacacagattccaccgatggctggtccagcatcaactgcggcacactgccccctcctatgagcaagatccccgcagaccgctacagggtggagggcagcttcgcgcagcccccgctgaatgccccgaagagggagtggtccaggaaggcctttggaatgcaaagcatttttggtccccatcgaaatgttcgaaagactaaggaagataaaaagggctcaaaatttgggcggggaactggactcactcagccttctcaacgcacgtctgctcggagatcatttgggagatccaagagattcagtatcactcgctcccttgatgatcttgagtctgcaactgtgtctgatggcgagttgacgggcgccgacctgaaggactgcgtcagcaacaacagcctgagcagcaatgccagcctccccagcgtgcagagctgccggcgcctgcgtgagaggagggtcgccagctgggccgtgtcctttgagcgcctgctgcaggaccccgtcggtgtccgctacttctctgattttctaaggaaagaattcagtgaagaaaacattttattctggcaggcctgtgaatattttaatcatgttcctgcacatgacaaaaaggagctttcctacagggcccgggagattttcagtaagtttctctgcagcaaagccaccaccccggtcaacatcgacagccaggcccagctagcagacgacgtcctccgcgcacctcacccagacatgttcaaggagcagcagctgcagatcttcaatctcatgaagtttgatagctacactcgctttctgaagtccccgctgtaccaggaatgcatcctggcggaagtggagggccgtgcactcccggactcgcagcaggtccccagcagcccggcttccaagcacagcctcggttcagaccactccagtgtgtccacgccaaaaaagttaagtggaaaatcaaaatccggccgatccctgaatgaagagctgggggatgaggacagcgagaagaagcggaaaggcgcgtttttctcgtggtcgcggaccaggagcaccgggaggtcccagaaaaagagggagcacggggaccacgcagacgacgccctgcatgccaatggaggcctgtgtcgccgagagtcgcagggctctgtgtcctctgcggggagcctggacctgtcggaggcctgcaggactttggcacccgagaaggacaaggccaccaagcactgctgcattcatctcccggatgggacatcctgcgtggtggctgtcaaggcgggcttctccatcaaagacatcctgtccggactctgtgagcggcatggcatcaacggggcggccgcggacctcttcctggtgggcggggacaagcctctggtgctgcaccaagacagtagcatcttggagtcaagggacctgcgcctagaaaagcgcaccttgtttcggctggatcttgttccgattaaccggtcagtgggactcaaggccaagcccaccaagcccgtcacggaggtgctgcggcccgtggtggccagatacggcctggacctcagtggcctgctggtgaggctgagtggagagaaggagcccctggaccttggcgcccctatatcgagtctggacggacagcgggttgtcttggaggagaaggatccttccagaggaaaggcatccgcagataaacagaaaggtgtgccagtgaaacagaacacagctgtaaattccagctccagaaaccactcggctacgggagaggaaagaacactaggcaagtctaattctattaaaataaaaggagaaaatggaaaaaatgctagggatccccggctttcaaagagagaagaatctattgcaaagattgggaaaaaaaaatatcagaaaattaatttggacgaagcagaggagttttttgagcttatttccaaagctcagagcaacagagcagatgaccaacgtgggctgctaaggaaggaagacctggtgttgccagagttcctccgtttacctcctggttccacagaactcaccctccccactccagctgctgtggccaagggctttagcaagagaagcgccacaggcaacggccgggagagcgcctcccagcctggcgagcagtgggagccagtccaggagagcagcgacagcccgtccaccagcccgggctcagcctccagcccccctggacctcctgggacgaccccccccgggcagaagtctcccagcgggcccttctgcactccccagtcccccgtctccctcgcgcaggagggcaccgcccagatctggaagaggcagtctcaggaagtggaggccgggggcatccagacggtggaggatgagcacgtggccgagctgaccctgatgggggagggggacatcagcagccccaacagcaccttgctgccgccgccctccaccccccaggaagtgccaggaccttccagaccaggaagtgggacccatggcagccgagacctcccagtcaacagaatcatcgatgtggatcttgtaactggctcggcgcccgggcgggatggtggcatagcgggggcacaggctggccctgggaggtcgcaggccagtggtgggcctcctacatcagacctccctggcttgggccccgtcccgggtgagcctgctaagcccaagaccagcgctcaccacgccaccttcgtctgagctgccctggcctggccaactctcctgtggacatgtcggggtggggcagcccaggtggattctgtgggcctcaggggggccaccctggccaccacaccctcaggagcccagccaggagggcagggggtgacctcgctggaggcactggccccggacattcgccatgctggccatggggctccctggccctggcctcctgctgcccaataaagcatttctga

SEQ ID NO: 174764 - DNA, 3010 bp, Homo sapiens
  Payload ID: 14319
  Gene Symbol: RGS12
  Gene Name: regulator of G-protein signaling 12
  Uniprot ID: O14924
  ENST ID: ENST00000338806
  CDS Start-End: 390-2789
agaatagattcattggcagctgtaattaaggttgtgaactgcaccacgatgctaaaaaaaacaaattctctgcagctgttttactgactgagaaattacccctgtcggccgaagttttattcttctgatttggtagaggaaatagtttaaaaatgatctcacagcgtgatttatgtaaacggcgcttctttctttggatgagacaattgagatagagtctgaaaccctggcaagccacagcttcctgcagtgtcctgttgccatgggttacgaagggagcgagagggaacttcatcggaaatgcctttaaacttttctcacacgcacaagctgcggtgttgaatggtgtgtcttagacccgggtgcctagtgtggctcggtgccttacaatgaatttggggaaagagttgtcaaacgaaacccatgtttctaatgaccagcagtctgcaactgtgtctgatggcgagttgacgggcgccgacctgaaggactgcgtcagcaacaacagcctgagcagcaatgccagcctccccagcgtgcagagctgccggcgcctgcgtgagaggagggtcgccagctgggccgtgtcctttgagcgcctgctgcaggaccccgtcggtgtccgctacttctctgattttctaaggaaagaattcagtgaagaaaacattttattctggcaggcctgtgaatattttaatcatgttcctgcacatgacaaaaaggagctttcctacagggcccgggagattttcagtaagtttctctgcagcaaagccaccaccccggtcaacatcgacagccaggcccagctagcagacgacgtcctccgcgcacctcacccagacatgttcaaggagcagcagctgcagatcttcaatctcatgaagtttgatagctacactcgctttctgaagtccccgctgtaccaggaatgcatcctggcggaagtggagggccgtgcactcccggactcgcagcaggtccccagcagcccggcttccaagcacagcctcggttcagaccactccagtgtgtccacgccaaaaaagttaagtggaaaatcaaaatccggccgatccctgaatgaagagctgggggatgaggacagcgagaagaagcggaaaggcgcgtttttctcgtggtcgcggaccaggagcaccgggaggtcccagaaaaagagggagcacggggaccacgcagacgacgccctgcatgccaatggaggcctgtgtcgccgagagtcgcagggctctgtgtcctctgcggggagcctggacctgtcggaggcctgcaggactttggcacccgagaaggacaaggccaccaagcactgctgcattcatctcccggatgggacatcctgcgtggtggctgtcaaggcgggcttctccatcaaagacatcctgtccggactctgtgagcggcatggcatcaacggggcggccgcggacctcttcctggtgggcggggacaagcctctggtgctgcaccaagacagtagcatcttggagtcaagggacctgcgcctagaaaagcgcaccttgtttcggctggatcttgttccgattaaccggtcagtgggactcaaggccaagcccaccaagcccgtcacggaggtgctgcggcccgtggtggccagatacggcctggacctcagtggcctgctggtgaggctgagtggagagaaggagcccctggaccttggcgcccctatatcgagtctggacggacagcgggttgtcttggaggagaaggatccttccagaggaaaggcatccgcagataaacagaaaggtgtgccagtgaaacagaacacagctgtaaattccagctccagaaaccactcggctacgggagaggaaagaacactaggcaagtctaattctattaaaataaaaggagaaaatggaaaaaatgctagggatccccggctttcaaagagagaagaatctattgcaaagattgggaaaaaaaaatatcagaaaattaatttggacgaagcagaggagttttttgagcttatttccaaagctcagagcaacagagcagatgaccaacgtgggctgctaaggaaggaagacctggtgttgccagagttcctccgtttacctcctggttccacagaactcaccctccccactccagctgctgtggccaagggctttagcaagagaagcgccacaggcaacggccgggagagcgcctcccagcctggcgagcagtgggagccagtccaggagagcagcgacagcccgtccaccagcccgggctcagcctccagcccccctggacctcctgggacgaccccccccgggcagaagtctcccagcgggcccttctgcactccccagtcccccgtctccctcgcgcaggagggcaccgcccagatctggaagaggcagtctcaggaagtggaggccgggggcatccagacggtggaggatgagcacgtggccgagctgaccctgatgggggagggggacatcagcagccccaacagcaccttgctgccgccgccctccaccccccaggaagtgccaggaccttccagaccaggaagtgggacccatggcagccgagacctcccagtcaacagaatcatcgatgtggatcttgtaactggctcggcgcccgggcgggatggtggcatagcgggggcacaggctggccctgggaggtcgcaggccagtggtgggcctcctacatcagacctccctggcttgggccccgtcccgggtgagcctgctaagcccaagaccagcgctcaccacgccaccttcgtctgagctgccctggcctggccaactctcctgtggacatgtcggggtggggcagcccaggtggattctgtgggcctcaggggggccaccctggccaccacaccctcaggagcccagccaggagggcagggggtgacctcgctggaggcactggccccggacattcgccatgctggccatggggctccctggccctggcctcctgctgcccaataaagcatttctga

SEQ ID NO: 174765 - DNA, 5512 bp, Homo sapiens
  Payload ID: 14319
  Gene Symbol: RGS12
  Gene Name: regulator of G-protein signaling 12
  Uniprot ID: O14924
  ENST ID: ENST00000382788
  CDS Start-End: 104-4234
agggcactgtttgaagaagcaaacatggtagcatcaagcattccttgaaatatggctccaagggaacaatgagacgtgctcttggtcttggaagctcatcagaatgtttagagctggggaggcctccaaacgcccattgcctgggccgtcgcccccaagggtgcggagtgtggaggttgcccgggggagggccggctacggattcacgctttcgggacaggcaccctgtgtgctcagctgcgtcatgagagggagccctgcggatttcgtgggcctccgagctggagaccagatacttgctgtcaatgaaatcaacgtgaaaaaagcatctcatgaagatgtagtgaaattaattgggaagtgctctggtgtccttcacatggtgattgctgaaggcgtcggccgcttcgaatcctgttccagtgatgaagaagggggactctatgaaggaaaaggctggctgaagcccaagctggattctaaagcactaggtataaacagagcagagcgagtcgtggaggaaatgcagtctggtggaattttcaatatgatttttgaaaacccgagcctttgtgcgagcaattcagagcccttgaaattgaaacaaagatccctttcagagtcggccgcaactcgatttgatgttggacatgaaagtataaataatccaaatcccaacatgctttctaaggaggaaatatcaaaagttattcatgatgattcggttttcagcattggactagaaagtcatgacgattttgcattggatgcaagtattttaaacgtggcgatgatcgtgggctacttaggctccattgagcttccttccacgagctccaacctggagtccgacagcttgcaagccatccgcggctgcatgcggcgcctgcgggcagagcagaaaatccactcgctggtgaccatgaagatcatgcacgactgtgtgcagctgagcactgacaaggctggagtcgtggccgagtacccggccgagaagctggccttcagcgccgtgtgcccggacgaccggcgatttttcgggttggttaccatgcagacgaatgacgacgggagcctggcccaggaggaggagggcgccctgcggacttcctgccacgtgttcatggtggacccagacttgtttaatcacaagatccaccaaggcattgctcggcggtttgggtttgagtgcacggccgacccagacaccaatggctgtctggaattcccggcgtcctccctccccgtcctgcagttcatctctgtcctgtaccgagacatgggtgagctgattgagggcatgcgggcccgcgcctttctggacggggacgccgatgcccaccagaacaacagcaccagcagcaacagtgacagcggcattgggaacttccaccaggaggagaagagcaaccgggtccttgtggtggacctgggtgggagctcgagcagacacggccccggaggcagcgcgtgggacggtgtgggtgggaggggtgcccagccctggggtgctccctggactgggcccttctgtccggaccccgaagggagccccccatttgaggccgctcatcagactgacaggttctgggacctaaacaagcacctagggccagcctctcctgtggaggtgcccccagcttccttgaggagctcagtccccccttccaagaggggcaccgtgggtgctggctgtggtttcaaccagcgctggctcccggtccacgtgctccgggagtggcagtgcggacacaccagcgaccaggactcttacacagattccaccgatggctggtccagcatcaactgcggcacactgccccctcctatgagcaagatccccgcagaccgctacagggtggagggcagcttcgcgcagcccccgctgaatgccccgaagagggagtggtccaggaaggcctttggaatgcaaagcatttttggtccccatcgaaatgttcgaaagactaaggaagataaaaagggctcaaaatttgggcggggaactggactcactcagccttctcaacgcacgtctgctcggagatcatttgggagatccaagagattcagtatcactcgctcccttgatgatcttgagtctgcaactgtgtctgatggcgagttgacgggcgccgacctgaaggactgcgtcagcaacaacagcctgagcagcaatgccagcctccccagcgtgcagagctgccggcgcctgcgtgagaggagggtcgccagctgggccgtgtcctttgagcgcctgctgcaggaccccgtcggtgtccgctacttctctgattttctaaggaaagaattcagtgaagaaaacattttattctggcaggcctgtgaatattttaatcatgttcctgcacatgacaaaaaggagctttcctacagggcccgggagattttcagtaagtttctctgcagcaaagccaccaccccggtcaacatcgacagccaggcccagctagcagacgacgtcctccgcgcacctcacccagacatgttcaaggagcagcagctgcagatcttcaatctcatgaagtttgatagctacactcgctttctgaagtccccgctgtaccaggaatgcatcctggcggaagtggagggccgtgcactcccggactcgcagcaggtccccagcagcccggcttccaagcacagcctcggttcagaccactccagtgtgtccacgccaaaaaagttaagtggaaaatcaaaatccggccgatccctgaatgaagagctgggggatgaggacagcgagaagaagcggaaaggcgcgtttttctcgtggtcgcggaccaggagcaccgggaggtcccagaaaaagagggagcacggggaccacgcagacgacgccctgcatgccaatggaggcctgtgtcgccgagagtcgcagggctctgtgtcctctgcggggagcctggacctgtcggaggcctgcaggactttggcacccgagaaggacaaggccaccaagcactgctgcattcatctcccggatgggacatcctgcgtggtggctgtcaaggcgggcttctccatcaaagacatcctgtccggactctgtgagcggcatggcatcaacggggcggccgcggacctcttcctggtgggcggggacaagcctctggtgctgcaccaagacagtagcatcttggagtcaagggacctgcgcctagaaaagcgcaccttgtttcggctggatcttgttccgattaaccggtcagtgggactcaaggccaagcccaccaagcccgtcacggaggtgctgcggcccgtggtggccagatacggcctggacctcagtggcctgctggtgaggctgagtggagagaaggagcccctggaccttggcgcccctatatcgagtctggacggacagcgggttgtcttggaggagaaggatccttccagaggaaaggcatccgcagataaacagaaaggtgtgccagtgaaacagaacacagctgtaaattccagctccagaaaccactcggctacgggagaggaaagaacactaggcaagtctaattctattaaaataaaaggagaaaatggaaaaaatgctagggatccccggctttcaaagagagaagaatctattgcaaagattgggaaaaaaaaatatcagaaaattaatttggacgaagcagaggagttttttgagcttatttccaaagctcagagcaacagagcagatgaccaacgtgggctgctaaggaaggaagacctggtgttgccagagttcctccgtttacctcctggttccacagaactcaccctccccactccagctgctgtggccaagggctttagcaagagaagcgccacaggcaacggccgggagagcgcctcccagcctggcgagcagtgggagccagtccaggagagcagcgacagcccgtccaccagcccgggctcagcctccagcccccctggacctcctgggacgaccccccccgggcagaagtctcccagcgggcccttctgcactccccagtcccccgtctccctcgcgcaggagggcaccgcccagatctggaagaggcagtctcaggaagtggaggccgggggcatccagacggtggaggatgagcacgtggccgagctgaccctgatgggggagggggacatcagcagccccaacagcaccttgctgccgccgccctccaccccccaggaagtgccaggaccttccagaccaggtacctccaggttctgatccctccaccttggccccgtaagcgtggtctgctcagcttccagtcagaaaggacagtgggcccccggctgccactgtttgctggtggtctccgtgaccccctcctcacctgctggttgggggcttccttggccctcttggaaaggaggggctcgtgtggccccaggccagtgtctgtcaggatggtccccccgaggcgctctgggcaggcatcctggtgtcctgagaggctcttgcaggaatgatacgtggcagtgcctgcagcgaggtctgggaacaccctgggtgaggcctgggggtttccgaaaatggaggcattcctttccaaatctggacagcgatcgtttttagtgtttctgtctcaagactggaaaacaatagcatttgtcttgagtgaggaagtgaagcccgctgtgttcatagcaggagagggctcccagacacaggcccgtcctcggaagagccttgagagtgcagctcggacccaccggcggcccccgtagcaggtggtgtgggtgctcgggagtggaggtgacgtcagcagcgctctctgaccgcgggtgtcacgggcatttctcaaaggaagcaggggattcagtgagtgtgaaggtgaacaggatggcctggcagcagggatgtttccgtgagccacaaataccagaaactgaggcgaggctcccagcagccggtagggaaaggtgtttccaggggtccgagggccgtggcctgcgtggccatcccctggagagaggagccgctcagggtgcgcgtcatggagtgtgctcaggggtgcgtggacacctctgctgtggtttgctgctgggggcgatgggagcgcctctccgtcctgtgccctggtccaggatgctgacagcagtgagaggcctgccgtgaggtttggtcttgtcagacctgtagcctggacctcgccgggggaccagggagtgcacgtctgtagatctgtacatatctgggcctttggaggccacgtgtggcatgggaggggctacctggtccctttcacagccaggacacgcctggatgagaaagcctgaggtgcctggcatgcccaccggtgccactctgcagcctccacccctggcctgagtccccctccatccgtcttggtggacacctgtgtggctctcacctgcgttttgagtctgttcttccaggagtaataaattctggacatcatcactggactggcttacaacttttctttctcatttgaaactttgtttccactttagaaaataataaaagtattttaatcta

SEQ ID NO: 174766 - DNA, 2751 bp, Homo sapiens
  Payload ID: 14319
  Gene Symbol: RGS12
  Gene Name: regulator of G-protein signaling 12
  ENST ID: ENST00000514268
  CDS Start-End: 104-2107
agggcactgtttgaagaagcaaacatggtagcatcaagcattccttgaaatatggctccaagggaacaatgagacgtgctcttggtcttggaagctcatcagaatgtttagagctggggaggcctccaaacgcccattgcctgggccgtcgcccccaagggtgcggagtgtggaggttgcccgggggagggccggctacggattcacgctttcgggacaggcaccctgtgtgctcagctgcgtcatgagagggagccctgcggatttcgtgggcctccgagctggagaccagatacttgctgtcaatgaaatcaacgtgaaaaaagcatctcatgaagatgtagtgaaattaattgggaagtgctctggtgtccttcacatggtgattgctgaaggcgtcggccgcttcgaatcctgttccagtgatgaagaagggggactctatgaaggaaaaggctggctgaagcccaagctggattctaaagcactaggtataaacagagcagagcgagtcgtggaggaaatgcagtctggtggaattttcaatatgatttttgaaaacccgagcctttgtgcgagcaattcagagcccttgaaattgaaacaaagatccctttcagagtcggccgcaactcgatttgatgttggacatgaaagtataaataatccaaatcccaacatgctttctaaggaggaaatatcaaaagttattcatgatgattcggttttcagcattggactagaaagtcatgacgattttgcattggatgcaagtattttaaacgtggcgatgatcgtgggctacttaggctccattgagcttccttccacgagctccaacctggagtccgacagcttgcaagccatccgcggctgcatgcggcgcctgcgggcagagcagaaaatccactcgctggtgaccatgaagatcatgcacgactgtgtgcagctgagcactgacaaggctggagtcgtggccgagtacccggccgagaagctggccttcagcgccgtgtgcccggacgaccggcgatttttcgggttggttaccatgcagacgaatgacgacgggagcctggcccaggaggaggagggcgccctgcggacttcctgccacgtgttcatggtggacccagacttgtttaatcacaagatccaccaaggcattgctcggcggtttgggtttgagtgcacggccgacccagacaccaatggctgtctggaattcccggcgtcctccctccccgtcctgcagttcatctctgtcctgtaccgagacatgggtgagctgattgagggcatgcgggcccgcgcctttctggacggggacgccgatgcccaccagaacaacagcaccagcagcaacagtgacagcggcattgggaacttccaccaggaggagaagagcaaccgggtccttgtggtggacctgggtgggagctcgagcagacacggccccggaggcagcgcgtgggacggtgtgggtgggaggggtgcccagccctggggtgctccctggactgggcccttctgtccggaccccgaagggagccccccatttgaggccgctcatcagactgacaggttctgggacctaaacaagcacctagggccagcctctcctgtggaggtgcccccagcttccttgaggagctcagtccccccttccaagaggggcaccgtgggtgctggctgtggtttcaaccagcgctggctcccggtccacgtgctccgggagtggcagtgcggacacaccagcgaccaggactcttacacagattccaccgatggctggtccagcatcaactgcggcacactgccccctcctatgagcaagatccccgcagaccgctacagggtggagggcagcttcgcgcagcccccgctgaatgccccgaagagggagtggtccaggaaggcctttggaatgcaaagcatttttggtccccatcgaaatgttcgaaagactaaggaagataaaaagggctcaaaatttgggcggggaactggactcactcagccttctcaacgcacgtctgctcggagatcatttgggagatccaagagattcagtatcactcgctcccttgatgatcttgagagttgacgggcgccgacctgaaggactgcgtcagcaacaacagcctgagcagcaatgccagcctccccagcgtgcagagctgccggcgcctgcgtgagaggagggtcgccagctgggccgtgtcctttgagcgcctgctgcaggaccccgtcggtgtccgctacttctctgattttctaaggaaagaattcagtgaagaaaacattttattctggcaggcctgtgaatattttaatcatgttcctgcacatgacaaaaaggagctttcctacagggcccgggagattttcagtaagtttctctgcagcaaagccaccaccccggtcaacatcgacagccaggcccagctagcagacgacgtcctccgcgcacctcacccagacatgttcaaggagcagcagctgcagatcttcaatctcatgaagtttgatagctacactcgctttctgaagtccccgctgtaccaggaatgcatcctggcggaagtggagggccgtgcactcccggactcgcagcaggtccccagcagcccggcttccaagcacagcctcggttcagaccactccagtgtgtccacgccaaaaaagttaagtggaaaatcaaaatccggccgatccctgaatgaagagctgggggatgaggacagcgag

SEQ ID NO: 174767 - DNA, 1505 bp, Homo sapiens
  Payload ID: 14320
  Gene Symbol: RGS13
  Gene Name: regulator of G-protein signaling 13
  Uniprot ID: O14921
  ENST ID: ENST00000391995
  CDS Start-End: 289-768
tcatactgaggccagagtgccatcgaaggtaattatagagacagtaaaatccttttactctgggaaaaataaaatgctgggtgtctcacaaaatttcagaacctgatttcaaacggatcataacaaagaggagatcaaatttagcatggtggactgctcgacaggatatatttgtcaatggaatgtttccacatattataccaccaacatgagaaaaaaatgatcattgtttatttgaagcttgatgatattctaacgctgccttttctcttctcattttagagaaaaatgagcaggcggaattgttggatttgtaagatgtgcagagatgaatctaagaggcccccttcaaaccttactttggaggaagtattacagtgggcccagtcttttgaaaatttaatggctacaaaatatggtccagtagtctatgcagcatatttaaaaatggagcacagtgacgagaatattcaattctggatggcatgtgaaacctataagaaaattgcctcacggtggagcagaatttctagggcaaagaagctttataagatttacatccagccacagtcccctagagagattaacattgacagttcgacaagagagactatcatcaggaacattcaggaacccactgaaacatgttttgaagaagctcagaaaatagtctatatgcatatggaaagggattcctaccccagatttctaaagtcagaaatgtaccaaaaacttttgaaaactatgcagtccaacaacagtttctgactacaactcaaaagtttaaatagaaaacagtatattgaaagtggtgggtttgatctttttatttagaaacccacaaaatcagaaacacagtacaaataaaacagaaatcaaactataagttgacttttagttcctaaaaagaaacatatttcaaaagcaatggaatctagaattcttataacatgaataacaaaatgtacagcaagcctatgtagttcaattaatatataaggaaaaggaaggtctttcttcatgatacaagcattataaagtttttactgtagtagtcaattaatggatatttccttgttaataaaattttgtgtcataatttacaaattagttctttaaaaattgttgttatatgaattgtgtttctagcatgaatgttctatagagtactctaaataacttgaatttatagacaaatgctactcacagtacaatcaattgtattataccatgagaaaatcaaaaaggtgttcttcagagacattttatctataaaattttcctactattatgttcattaacaaacttctttatcacatgtatcttctacatgtaaaacatttctgatgattttttaacaaaaaatatatgaatttcttcatttgctcttgcatctacattgctataaggatataaaatgtggtttctatattttgagatgttttttccttacaatgtgaactcatcgtgatcttggaaatcaataaagtcaaatatcaactaaa

SEQ ID NO: 174768 - DNA, 1518 bp, Homo sapiens
  Payload ID: 14320
  Gene Symbol: RGS13
  Gene Name: regulator of G-protein signaling 13
  Uniprot ID: O14921
  ENST ID: ENST00000543215
  CDS Start-End: 256-735
agaacattcatactgaggccagagtgccatcgaaggtaattatagagacagtaaaatccttttactctgggaaaaataaaatgctgggtgtctcacaaaatttcagaacctgatttcaaacggatcataacaaagaggagatcaaatttagcatggtggactgctcgacaggatatatttgtcaatggaatgtttccacatattataccaccaacatgagaaaaaaatgatcattgtttatttgaagcttgaaaaatgagcaggcggaattgttggatttgtaagatgtgcagagatgaatctaagaggcccccttcaaaccttactttggaggaagtattacagtgggcccagtcttttgaaaatttaatggctacaaaatatggtccagtagtctatgcagcatatttaaaaatggagcacagtgacgagaatattcaattctggatggcatgtgaaacctataagaaaattgcctcacggtggagcagaatttctagggcaaagaagctttataagatttacatccagccacagtcccctagagagattaacattgacagttcgacaagagagactatcatcaggaacattcaggaacccactgaaacatgttttgaagaagctcagaaaatagtctatatgcatatggaaagggattcctaccccagatttctaaagtcagaaatgtaccaaaaacttttgaaaactatgcagtccaacaacagtttctgactacaactcaaaagtttaaatagaaaacagtatattgaaagtggtgggtttgatctttttatttagaaacccacaaaatcagaaacacagtacaaataaaacagaaatcaaactataagttgacttttagttcctaaaaagaaacatatttcaaaagcaatggaatctagaattcttataacatgaataacaaaatgtacagcaagcctatgtagttcaattaatatataaggaaaaggaaggtctttcttcatgatacaagcattataaagtttttactgtagtagtcaattaatggatatttccttgttaataaaattttgtgtcataatttacaaattagttctttaaaaattgttgttatatgaattgtgtttctagcatgaatgttctatagagtactctaaataacttgaatttatagacaaatgctactcacagtacaatcaattgtattataccatgagaaaatcaaaaaggtgttcttcagagacattttatctataaaattttcctactattatgttcattaacaaacttctttatcacatgtatcttctacatgtaaaacatttctgatgattttttaacaaaaaatatatgaatttcttcatttgctcttgcatctacattgctataaggatataaaatgtggtttctatattttgagatgttttttccttacaatgtgaactcatcgtgatcttggaaatcaataaagtcaaatatcaactaaagacttacattatctttctcaaagacaaaataaatatattttccagt

SEQ ID NO: 174769 - DNA, 2415 bp, Homo sapiens
  Payload ID: 14321
  Gene Symbol: RGS14
  Gene Name: regulator of G-protein signaling 14
  Uniprot ID: O43566
  ENST ID: ENST00000408923
  CDS Start-End: 189-1889
tttctatagagacacttcctgtggcagagaaaagaggtagtgagcggtgtttcaggatgtgagggcccgcaggagccgagtcaggctctctccactgcctgcccgccaccgtgcaagctctggccggcgctgcccacagtccccatggtgggcagcccccgcggcggggacccctgatcggcagcggcatgccagggaagcccaagcacctgggcgtccccaacgggcgcatggttctggctgtgtcagatggagagctgagcagcacgacggggccccagggccagggcgagggccgcggcagctctctcagcatccacagcctccccagtggtcccagcagccccttcccaaccgaggagcagcctgtggccagctgggccctgtccttcgagcggctgttgcaggacccgctgggcctggcttacttcactgagttcctgaagaaggagttcagcgcggaaaacgtgactttctggaaggcctgcgagcgcttccagcagatcccggccagcgatacccagcagctagctcaggaggcccgcaacatctaccaggagttcctgtccagccaggcgctgagcccagtgaacatcgaccgtcaggcctggcttggcgaggaggtgctggccgagccccggccggacatgtttcgggcacagcagcttcagatcttcaacttgatgaagttcgacagctatgcgcgcttcgtcaagtccccgctgtaccgcgagtgcctgctagccgaagccgagggacgccctctgcgggaacctggctcctcgcgcctcggcagccctgacgccacgaggaagaagccgaagctgaagcccgggaagtcgctgccgctgggtgtggaggagttggggcagctgccacccgttgagggtcctgggggccgccctctccgcaagtccttccgccgggagctgggcgggactgcaaacgccgccttgcgccgagagtctcagggctccctcaactcctccgccagcctggaccttggcttcctagccttcgtcagcagcaaatctgagagccaccggaagagccttgggagcacggagggtgaaagtgaaagccggccagggaagtactgctgtgtgtacctgcccgatggcacagcctccttggccctggccagacctggcctcaccatccgagacatgctggcagggatctgtgagaaacgaggcctctctctacctgacatcaaggtctacctggtgggcaatgaacaggccctggtcctggatcaggactgcaccgtgctggcggatcaggaagtgcggctggaaaacaggatcaccttcgagctggagctgacggcgctggagcgcgtggtacgaatctcagccaagcccaccaagcggctgcaggaggcgctgcagcccattctggagaagcacggcttgagcccgctagaggtggtgctgcaccggccaggcgagaaacagcctctggatctggggaagctagtgagctcggtggcggcccagagactggttttggacactcttccaggtgtgaagatctccaaagcccgtgacaaatctccctgccgcagccagggctgcccacctagaactcaggataaggccacccatccccctccagcgtcccccagttctctggtgaaggtgcccagtagtgccactggaaagcggcagacctgtgacatcgaaggcctggtggagctgctgaaccgggtgcagagcagcggggcccacgaccagaggggccttctgaggaaagaggacctggtacttccagaatttctgcagctgcccgcccaagggcccagctccgaggagaccccaccacagaccaaatcagcagcccagcccatcgggggatccttgaactccaccaccgactcagccctctgacagctacccaacagtccaggacagctgcatggcacccggcgggccgagcatgccatgggtccgctctgcatgccctgtctgtgccatgagtgtccctggccccttcctgccatgggcaggcccgcaggaagagccggtaggggtggaaaggggactcagatgagacacaccccacagctgccaccgccttgtccctcaacaagctcacccccaatcccttgcagccaggccacaatgggggaggtgagtccagccccttggaacaggcttgcccaacatggagggatggcgttggcagtgccagcctccccagcctgtgccaagcttcaacaggggcaagaggaggggccggcccctcctcaggaagctggtatgagtaaggccttgagggtgcaggcaggcagccctgtaccccacccacatagactatactgtacatacagattttgcagtaggcttggggcagctgggtttgtccttgatgtatgatactgttattataataattattattattctgccatga

SEQ ID NO: 174770 - DNA, 1536 bp, Homo sapiens
  Payload ID: 14321
  Gene Symbol: RGS14
  Gene Name: regulator of G-protein signaling 14
  ENST ID: ENST00000511890
  CDS Start-End: 1-1313
tgagcccagtgaacatcgaccgtcaggcctggcttggcgaggaggtgctggccgagccccggccggacatgtttcgggcacagcagcttcagatcttcaacttgatgaagttcgacagctatgcgcgcttcgtcaagtccccgctgtaccgcgagtgcctgctagccgaagccgagggacgccctctgcgggaacctggctcctcgcgcctcggcagccctgacgccacgaggaagaagccgaagctgaagcccgggaagtcgctgccgctgggtgtggaggagttggggcagctgccacccgttgagggtcctgggggccgccctctccgcaagtccttccgccgggagctgggcgggactgcaaacgccgccttgcgccgagagtctcagggctccctcaactcctccgccagcctggaccttggcttcctagccttcgtcagcagcaaatctgagagccaccggaagagccttgggagcacggagggtgaaagtgaaagccggccagggaagtactgctgtgtgtacctgcccgatggcacagcctccttggccctggccagacctggcctcaccatccgagacatgctggcagggatctgtgagaaacgaggcctctctctacctgacatcaaggtctacctggtgggcaatgaacagaaggccctggtcctggatcaggactgcaccgtgctggcggatcaggaagtgcggctggaaaacaggatcaccttcgagctggagctgacggcgctggagcgcgtggtacgaatctcagccaagcccaccaagcggctgcaggaggcgctgcagcccattctggagaagcacggcttgagcccgctagaggtggtgctgcaccggccaggcgagaaacagcctctggatctggggaagctagtgagctcggtggcggcccagagactggttttggacactcttccaggtgtgaagatctccaaagcccgtgacaaatctccctgccgcagccagggctgcccacctagaactcaggataaggccacccatccccctccagcgtcccccagttctctggtgaaggtgcccagtagtgccactggaaagcggcagacctgtgacatcgaaggcctggtggagctgctgaaccgggtgcagagcagcggggcccacgaccagaggggccttctgaggaaagaggacctggtacttccagaatttctgcagctgcccgcccaagggcccagctccgaggagaccccaccacagaccaaatcagcagcccagcccatcgggggatccttgaactccaccaccgactcagccctctgacagctacccaacagtccaggacagctgcatggcacccggcgggccgagcatgccatgggtccgctctgcatgccctgtctgtgccatgagtgtccctggccccttcctgccatgggcaggcccgcaggaagagccggtaggggtggaaaggggactcagatgagacacaccccacagctgccaccgccttgtccctcaacaagctcacccccaatcccttgca

SEQ ID NO: 174771 - DNA, 2427 bp, Homo sapiens
  Payload ID: 14322
  Gene Symbol: RGS16
  Gene Name: regulator of G-protein signaling 16
  Uniprot ID: O15492
  ENST ID: ENST00000367558
  CDS Start-End: 150-758
gcggccgctcagtctgggcgcttgcaggctgctaaacccaaccgcagttgactagcacctgctaccgcgcctttgcttcctggcgcacgcggagcctcctggagcctgccaccatcctgcctactacgtgctgccctgcgcccgcagccatgtgccgcaccctggccgccttccccaccacctgcctggagagagccaaagagttcaagacacgtctggggatctttcttcacaaatcagagctgggctgcgatactgggagtactggcaagttcgagtggggcagtaaacacagcaaagagaatagaaacttctcagaagatgtgctggggtggagagagtcgttcgacctgctgctgagcagtaaaaatggagtggctgccttccacgctttcctgaagacagagttcagtgaggagaacctggagttctggctggcctgtgaggagttcaagaagatccgatcagctaccaagctggcctccagggcacaccagatctttgaggagttcatttgcagtgaggcccctaaagaggtcaacattgaccatgagacccacgagctgacgaggatgaacctgcagactgccacagccacatgctttgatgcggctcaggggaagacacgtaccctgatggagaaggactcctacccacgcttcctgaagtcgcctgcttaccgggacctggctgcccaagcctcagccgcctctgccactctgtccagctgcagcctggacgagccctcacacacctgagtctccacggcagtgaggaagccagccgggaagagaggttgagtcacccatccccgaggtggctgcccctgtgtgggaggcaggttctgcaaagcaagtgcaagaggacaaaaaaaaaaaaaaaaaaaaaaaaaatgcgctccagcagcctgtttgggaagcagcagtctctccttcagatactgtgggactcatgctggagaggagccgcccacttccaggacctgtgaataagggctaatgatgagggttggtggggctctctgtggggcaaaaaggtggtatgggggttagcactggctctcgttctcaccggagaaggaagtgttctagtgtggtttaggaaacatgtggataaagggaaccatgaaaatgagaggaggaaagacatccagatcagctgttttgcctgttgctcagttgactctgattgcatcctgttttcctaattcccagactgttctgggcacggaagggaccctggatgtggagtcttcccctttggccctcctcactggcctctgggctagcccagagtcccttagcttgtacctcgtaacactcctgtgtgtctgtccagccttgcagtcatgtcaaggccagcaagctgatgtgactcttgccccatgcgagatatttatacctcaaacactggcctgtgagccctttccaagtcagtggagagccctgaaaggaggctcacttgaatccagctcagtgctctgggtggccccctgcaggtggcccctgaccctgcgttgcagcagggtccacctgtgagcaggcccgccctggggcctcttcctggatgtgccctctctgagttctgtgctgtctcttggaggcagggcccaggagaacaaagtgtggaggcctcggggagtggcttttccagctctcatgccccgcagtgtggaacaaggcagaaaaggatcctaggaaataagtctcttggcggtccctgagagtcctgctgaaatccagccagtgttttttgtggtatgagaacaggcaaaaagagatgccccgagatagaaggggagccttgtgtttctttcctgcagacgtgagatgaacactggagtgggcagaggtggcccaggaccatggcacccttagagtgcagaagctggggggagaggctgcttcgaagggcaggactggggataatcagaacctgcctgtcacctcagggcatcactgaacaaacatttcctgatggcaactcctgcggcagagcccaggctggggaagtgaactacccagggcagcccctttgtggcccaggataatcaacactgttctctctgtaccatgagctcctccaggagattatttaagtgtattgtatcattggttttctgtgattgtcataacattgtttttgttattgttggtgctgttgttatttattattgtaatttcagtttgcctctactggagaatctcagcaggggtttcagcctgactgtctccctttctctaccagactctacctctgaatgtgctgggaacctcttggagcctgtcaggaactcctcactgtttaaatatttatttattgtgacaaatggagctggtttcctagatatgaatgatgtttgcaatccccattttcctgtttcagcatgttatattcttataaaataaaagcaaaagtcaaatatga

SEQ ID NO: 174772 - DNA, 1636 bp, Homo sapiens
  Payload ID: 14323
  Gene Symbol: RGS17
  Gene Name: regulator of G-protein signaling 17
  Uniprot ID: Q9UGC6
  ENST ID: ENST00000206262
  CDS Start-End: 152-784
ctctcctcgcccgctgggtgctgaagttgggcggatggcagcaaaccggctccgctagaggaccgagccgcccagccccgctcccccggacccatcggcgcgctgcccacacctccaggcgaccggccaactgggtcctgaagtagctgaaatgcgaaaaaggcagcagtcccaaaatgaaggaacacctgccgtgtctcaagctcctggaaaccagaggcccaacaacacctgttgcttttgttggtgctgttgttgcagctgctcctgcctcactgtgaggaatgaagaaagaggggaaaatgcgggaagacccacacacactacaaaaatggagagtatccaggtcctagaggaatgccaaaaccccactgcagaggaagtcttgtcctggtctcaaaattttgacaagatgatgaaggccccagcaggaagaaaccttttcagagagttcctccgaacagaatacagtgaagagaacctacttttctggcttgcttgtgaagacttaaagaaggagcagaacaaaaaagtaattgaagaaaaggctaggatgatatatgaagattacatttctatactatcaccaaaagaggtcagtcttgattctcgagttagagaggtgatcaatagaaatctgttggatcccaatcctcacatgtatgaagatgcccaacttcagatatatactttaatgcacagagattcttttccaaggtttttgaactctcaaatttataagtcatttgttgaaagtactgctggctcttcttctgaatcttaatgttcatttaaaaacaatcattttggagggctgagatgggaaataaaagtagttaaataacatcagaaactgagttcctggagaactacagtttagcattcctcaggctactgtgaaaacacaaccgttatggtctttgtctccatttttatcaaggttttccatggttaagtttggagaaaataccacacaaaacaatgaattgccaaattgtttgttttattcaagactcattctacttgcaagcaaagtgtatttgtagtcctatgaacagtctcctcgtgtatctccagagactgcatgtgcaaagtaaaatgcttcatttgccacatagttgttgtaatatttaatccagtagcataacttatatctgtatttaaggacttttgtgcaatatggtcttaagaaataattgccaaaaaaatcggccatggtttgcattttttaacataatctaagacagaaaaaaagcaatttttactatgtaacaatggtattcaacattctatatactgtgtttagtacactaattttgaagccaatatttctgtacatgaaaaagagctatttatctctgtttgttggaaaatcctaatggggattcctctggttgttcactgccaaaactgtggcattttcattacaggagagtttactatgctaaaagcaaaaaacaaaaaaaaaaaaaaagggaagaaggaaaaaagcacaaaacaatttgaagatatcctatctcaatgacaaatcaaaagagtgatattgcttttaactgtaatagaagaaaatgaatttatgtatatatcagatgtccaatactgtaattaatttattaaagactggctctccagtttt

SEQ ID NO: 174773 - DNA, 7773 bp, Homo sapiens
  Payload ID: 14323
  Gene Symbol: RGS17
  Gene Name: regulator of G-protein signaling 17
  Uniprot ID: Q9UGC6
  ENST ID: ENST00000367225
  CDS Start-End: 26-658
ccaactgggtcctgaagtagctgaaatgcgaaaaaggcagcagtcccaaaatgaaggaacacctgccgtgtctcaagctcctggaaaccagaggcccaacaacacctgttgcttttgttggtgctgttgttgcagctgctcctgcctcactgtgaggaatgaagaaagaggggaaaatgcgggaagacccacacacactacaaaaatggagagtatccaggtcctagaggaatgccaaaaccccactgcagaggaagtcttgtcctggtctcaaaattttgacaagatgatgaaggccccagcaggaagaaaccttttcagagagttcctccgaacagaatacagtgaagagaacctacttttctggcttgcttgtgaagacttaaagaaggagcagaacaaaaaagtaattgaagaaaaggctaggatgatatatgaagattacatttctatactatcaccaaaagaggtcagtcttgattctcgagttagagaggtgatcaatagaaatctgttggatcccaatcctcacatgtatgaagatgcccaacttcagatatatactttaatgcacagagattcttttccaaggtttttgaactctcaaatttataagtcatttgttgaaagtactgctggctcttcttctgaatcttaatgttcatttaaaaacaatcattttggagggctgagatgggaaataaaagtagttaaataacatcagaaactgagttcctggagaactacagtttagcattcctcaggctactgtgaaaacacaaccgttatggtctttgtctccatttttatcaaggttttccatggttaagtttggagaaaataccacacaaaacaatgaattgccaaattgtttgttttattcaagactcattctacttgcaagcaaagtgtatttgtagtcctatgaacagtctcctcgtgtatctccagagactgcatgtgcaaagtaaaatgcttcatttgccacatagttgttgtaatatttaatccagtagcataacttatatctgtatttaaggacttttgtgcaatatggtcttaagaaataattgccaaaaaaatcggccatggtttgcattttttaacataatctaagacagaaaaaaagcaatttttactatgtaacaatggtattcaacattctatatactgtgtttagtacactaattttgaagccaatatttctgtacatgaaaaagagctatttatctctgtttgttggaaaatcctaatggggattcctctggttgttcactgccaaaactgtggcattttcattacaggagagtttactatgctaaaagcaaaaaacaaaaaaaaaaaaaaagggaagaaggaaaaaagcacaaaacaatttgaagatatcctatctcaatgacaaatcaaaagagtgatattgcttttaactgtaatagaagaaaatgaatttatgtatatatcagatgtccaatactgtaattaatttattaaagactggctctccagttttaaaatggttgtgtaaagttatgtacttcagcaagaaaaaaataataataagcttgataacttagttttggaatataaagaaaaggacttaataaaggaatgcctacatgtagcactgtaaaacattttgatgaatagcatctgtcctgtggcatattttccttgaaagtgaaatccaatgaaaagctaagtttttaccaggaaaagttttataagggttatgaagaaaataatcctctacttcagaccttaactgttttcacataatatcttaaggatgacattttaaagatgtttaaaccaaactattagttttcatccatcattaaaaggcagtacagtgctcaaatcttccagctgccatattattttttataagtacactaaatctttacgacaaaacacttgcctgacattgtcatgtacttctgaccttcaaggaaacaatattctgtcatgcataaaagtgataattaaaataatcagtgtcatatttatatcaaagtgttacatttgaatattaatatcccctgaagactatttttttaatattaaactgaatgaatataatactgagtaacctaaaatgaaagttttaaaaagatttatatccactgagaacactggccttatattaaggatgatattacagttacaggttttctttgtcatttttttaactacctctcattttttaatttattaaacatattttttaaaaaaacaagtttgggggtttctttttaaatttattttacttgaaaggttggcatcacaagtttctttttccataaacttaaaacatttcaaaaatggtttttttaagcaagtatgattttctaatttatatagaattcaggagacatgaataaaagggctattatctattccctatgcaaatattttaactgttgcagtgtttgacaaaatgggattttttaaaaattgcagagtagaaaacaaaatattctgtttacactggcgttgctgactatcctaccatattcagcacttttaaatacgttatttatgaaaatgcagttaaaatgcaagatagaaaatatttataataatcatttcttttaacaaatgcctgtgttttctgaaagtgttagtgtgttaagacatattttattcatgtcatttaaatactatttgaataagttttcagtaatatgttgaaaaaaagatagctatgaagatgtttacaaaaagtcatattttttcctaaagagtaaagaaaaacctaaaagaatcatcacttctattgtgaagttctattgttcctaaattatttaatttttttcttgcttagaattgagtttattatgctactatgatatatacacatgtatggtgtagtatcatatttgtttctgtgtgtgaggctcaacaaattggtgcacatgactagaaaatatgtaatatactgtgatacactgcatgcatccatctttttaaatgtagactttatattctcgttgttactatatatgatggtgacctgctagtcataagttatctttataagatactttggactattagatgaattgtctgtttgacaatatctttaatattttaccaaatgtaaaagataagggccgttataaagagtcctaatctctaacctgggcatttgtagaacacagattttaaagttggtatatccttttgaaacctgatgaggaagttgagttaaaaaagattcgagagcagatttacacatcagatgttgataaccatgctatgtgagcatttctgtgctaaactcgtatttttgggtgaggggagggtttctcatttaagagtatgtctgtatatttgcaactctactaattttctaagtatgatataattccttctgtttaagttacagagctattataaataaacaaaagagccttcaactggtgtctatgctaccattccaagagcacaatatttgttttcttagaatttgagttttcctagtgagtaaattcctccctggggaaaaattagcactttaaaatggacactttgtgttttcaattgccaaggtatctttgtatactattagaatttgctgatgcacacagaaagagattaatgcactttctatagtgcctaactttagatgtatctataaaagaaagtagaggatacagattatgtatatataaataaattggagagccagatttcttcagagattgatcttgtacattaatcacaccagtaatggatggatggcacttctttactcgggctgttatgatgttatccaaaggtagtagagatgctctgacagtgttggagtgtgcacatgaacaacaagagcaaaacacaactttgatactaaagttacgaaatgcagaagtcaagaccataatgtgatgttttttttttttgaaatcttaaaatatgtacatagaatgaccagttctgatatgccgtcttagtgcatggatgtttattagtatcctttaatgctgcctaggttctgacttacagaatgaaatacgtgttgtttatctacctgatagttcagttttgccaaaggactatagggataagtgaataatatttatttattaggagcaaaaatacattttcatcccattaagctaatttaaaataatgcctgatttttacttttgagtttatccatttttctatacctttaacttatttatactttaaaaaatcatattgtaattgtgacaaattatatctcaaaaaataccaattattagatgctttggtgttgaaatgtaaaagagaaggaatttaaaatacaatcaaaaaagtcaaaaataaaacgtatttgaaaaccacctaaaatttcttggccaggcacagtggctcaagcctgtaatcccagcactttgggaagccaaagagggcggatcacttgagctcaggagtttgagaccagactggccaacatggtgaaaccccgactctagtaaaaatacaaaattagccgggcatggtggtgggtgcctttaatcccggctacttgagaggctgaggcaggagaatcgcttgaacccaggaggcagaggtcgcagtgagctgatatcatgccactgcactccagccttggcaacagagtgactccatctcaaaataataataataattataataataatatttttaagtcttagacagaaaatgcctatagatagaagcctatcaaacatgtattttgaatactttgatcttgacacattgcctaattattttgaaagatggtaaagatatttccaaaaaatattttcgcctatctgtttacattgacagtttacaaccataattttctaagtatatttttcaaacatgtatttttgtgttttccatcttcaaatttctgaccaatgggtttgttctcctgcaaaaacaatatccaatctgcaaaaatttttaattcttcacttgctacaactgcaaatatttatcaataaaactgataacccaaaacttgcttcagattttccctgcagtgcttaaaatatccttgcaacacaagatggtgcacaatgacaagtattatttctgaatacccagatttgatttatttataggtatttttgaaattattactcttacaggtgtagtcctctccagccccaagtaacatcttttcagatgaattcaagaggctgttcaagactttgactctactgaaaacactacaaaaggcaaaatgttgccctaggtgatagaaggtcccagtttgggaactgattttcttcctatgacaaaagctataagatgagtaaggttactaatggaaatgtatgtccacagattcacttagggagcatagtgtaaaaacatcaggaacttaaaattacaaatttgatttcaagttatatttctgtctcatgtgactttgggcaaatcatttatcttctctgagttcatttcctcatctgcaaatgacaaataaaatacgtaattatcaggataactatgagcattaaataaaacaaacgtggaaagaataaagtgtggcatacattattattttatcaaagtgcatcacgtcaataattgttattgtatacttgtattaaatgtcactttaatgcactttcccctatttttttccaaaacatacgttaaacatctgatttagctactcatcaaaacatacaatcatgttttaagatggaacactatatcagtgttactgcttttctcaataatgtgatcccaaatcagtactttcagttcaccatcacctcaaatctatagaaatgtttctttcaatgacatagatagatagatgattgatagatagatgatagatagatgataaatggatatacaattataggttaaaattaaagtttaaataagatcaatcatttgaaagttttatttccaaaggaaataaaacaacattcccaaggacagaaataatatcaaattacttgctaaatatataaatgagttatagggctaagactaagttataagagattgacaattagaaaacactctttttaatattaaggtggtatgattttctttaacaattttacaatgaaaataaaaacttaataaaaggtggtaatgggccaggcacggtggctcacgcatacaatcccagcactttgggagactaaggcgtgaggatcacttgagcccaggagttccagacatgtctatgcaacaaagtgagaccctgactctaagaaaaaaataaaatgtataaaatttaaaatagtaatgtgtccattaaaccttttattttagagtagttttagatttacagaaaaactccaaatagagaggtcccatatacatctatgggcattaatgagccaatattgatcattacattcatacttcattcagatttccttagtttataacctaatgtcctttttctgtcccaggatcccattcaggataccacattacatttagttgtcatgtttccttaggcttcccttggctgtgacagtttctgcaactttccttgtttttgatgacagttttgagaaataaactggtattttgtagaatgtccttctatggggattcgtctgatgtttttctcgtgactagacacaggtttttggtttttgaaagaacacaacggtaaagtgccatgctcatcacatggtatcaaaggtatatgccatcaccgggactcgtcttagctgtgacagtttctcaaactttaggctactcttagctgttgatgttaaccttgatcacttagctgaggtagcatctattatatttctccactgtaaagtaatgcgtttttaaagagattatattgaaggtaaattttctggacatttacactgagctaaacaaattctaaacactaatattaggttccactaagtgattactaataaatgctataaagaaaatacagtgaagtggaaaaataaaactccagaagtcttagcctgaatattcacctaatagaggtgaaagtgaatttttcccttgaactgtctgcgcaatttacaataatcctccacatactttggatattaaagatcttatcttactaattgtcataagaggtaatttaaatttaaactaaccattttgcttattgcatttttatattgccctccactaatcaatgaacactgaatattgaaataatgtaaaagacctatttcccgctagctttaaccgatttgtcataaacacctttcttgtatatgatttttaaatgtttgctaaatattaaaaagaattcaatgtgtttggttttgtaaaattacatatcgaatgtgtataattttttactaccatgttcatcacacttaatctatatccatatattgtactccaccaatatttatcagtggacaataaagaagttttgaatgcatgaatgcaacttaagaggcaccacacttggttattttgcaatgccagaataacggtgggtattcacaaattgaatagataatccagattatgtttcctccaatttaagtttttctgggtttttttttcccccttcctagaatcaattttatcattttacctatgtacaataatatacttctggaaaatgctagaattttcaccatgtaacagaatttgagcatgacagtaatgtaaaaatattcagaagtctcgaactataggtttgagttttcaaagtaaatcaaaatacagctgttttcattttactagattgtggaaacctatggatgttattgtaaaatgcatatgcattacactgactttcttaaaatgttttgaattaataaagaattcaacaatgta

SEQ ID NO: 174774 - DNA, 2150 bp, Homo sapiens
  Payload ID: 14324
  Gene Symbol: RGS18
  Gene Name: regulator of G-protein signaling 18
  Uniprot ID: Q9NS28
  ENST ID: ENST00000367460
  CDS Start-End: 182-889
tcctcagttctgcatttctgcagagacagaaagaaacgcagctcttgacttcttttttgtaaacattactgtaagagttgtgataactttttattctactatgtatatgtatggaatagtattaataaatgaactagggaaggatgtaataaattagacatctcttcattttagagagaagatggaaacaacattgcttttcttttctcaaataaatatgtgtgaatcaaaagaaaaaacttttttcaagttaatacatggttcaggaaaagaagaaacaagcaaagaagccaaaatcagagctaaggaaaaaagaaatagactaagtcttcttgtgcagaaacctgagtttcatgaagacacccgctccagtagatctgggcacttggccaaagaaacaagagtctcccctgaagaggcagtgaaatggggtgaatcatttgacaaactgctttcccatagagatggactagaggcttttaccagatttcttaaaactgaattcagtgaagaaaatattgaattttggatagcctgtgaagatttcaagaaaagcaagggacctcaacaaattcaccttaaagcaaaagcaatatatgagaaatttatacagactgatgccccaaaagaggttaaccttgattttcacacaaaagaagtcattacaaacagcatcactcaacctaccctccacagttttgatgctgcacaaagcagagtgtatcagctcatggaacaagacagttatacacgttttctgaaatctgacatctatttagacttgatggaaggaagacctcagagaccaacaaatcttaggagacgatcacgctcatttacctgcaatgaattccaagatgtacaatcagatgttgccatttggttataaagaaaattgattttgctcatttttatgacaaacttatacatctgcttctaacatatcgcatgtttatgttaagatttggtcccatcctttaaactgaaatatgtcatgtgaaattattttaaaaatgtaaaaacaaaactttctgctaacaaaatacatacagtatctgccagtatattctgtaaaaccttctatttgatgtcattccatttataatcagaaaaaaaacttatttcttaatcaaaaggcagtacaaaaaaagtaataatgttttataagattgtagagttaagtaaaagttaagcttttgcaaagttgtcaaaagttcaaacaaaagtctagttgggattttttaccaaagcagcataatatgtgttatataaacataataatactcagatatccaaatgttcagatagcatttttcataatgaatgttctcttttttttggtaatagtgtagaagtgatctggttcttacaatgggagatgaagaacatttattattgggttactactaaccctgtcccaagaatagtaatatcacctctagttataagccagcaacaggaacttttgtgaagacacattcatctctacagaacttcagattaaatataatctagattaatgactgagaataagatccacatttgaactcattcctaagtgaacatggacgtacccagttatacaaagtacttctgttggtcacagaaacatgaccagattttgcatatctccaggtagggaactaagtagactaccttatcaccggctaagaaaacttgctactaaactattaggccatcaatggcttgaataaaaaccagagaaggtttttcccaggacgtctcatgtttggccctttagaattggggtagaaatcagaaatgagatgaggggaagaagcaaggagtctaaggccctagcgatttgggcatctgccacattggttcatattcagaaagtgttatctcattgattatattcttgttaagcaaatctccttaagtaattattattcaaataagattatactcatacatctatatgtcactgttttaaagagatatttaatttttaatgtgtgttacatggtctgtaaatatttgtatttaaaaatgccatgcattaggctttggaaatttaatgttagttgaaatgtaaaatgtgaaaactttagatcatttgtagtaataaatatttttaacttcattcatacagttaagtttatctgacaataaaagctctgactgaa

SEQ ID NO: 174775 - DNA, 1510 bp, Homo sapiens
  Payload ID: 14325
  Gene Symbol: RGS19
  Gene Name: regulator of G-protein signaling 19
  Uniprot ID: P49795
  ENST ID: ENST00000332298
  CDS Start-End: 185-838
gggaagtgccgccgaggcgcctgcgcactgcgcccccgcgccccctccccgactgtcgggccggaccttggagcgcgcgggccggcggcggcgcgagtggctcgggagcgcggctgacccccaggctgtggtgagggtctgagagctggtaccacggagcctgggcaacctcctccgcccacccatgcccaccccgcatgaggctgagaagcagatcacagggccagaggaggcggaccggcccccttcaatgtccagtcatgatacagcctctccagcggcccccagccgcaacccctgctgcctgtgctggtgctgctgctgtagctgctcctggaaccaagagcggcggcgcgcgtggcaggcctcccgggagagcaagctgcagcccctccccagctgtgaagtatgtgccacgccaagtcctgaggaggtgcagagctgggcgcagtcttttgacaagctgatgcacagcccagcgggacgcagcgtgttccgggcgttcctgcggacagagtacagcgaggagaacatgctcttctggttggcctgcgaggagctgaaggccgaggccaaccagcatgtggtagacgagaaggcgaggctcatctacgaggactacgtatccatcctgtcccccaaggaggtgagcctggactcccgtgtgcgggagggcatcaacaagaagatgcaggagccgtccgcacacacgttcgacgacgcgcagctgcagatctacacgctcatgcaccgggactcctacccccgcttcctcagctctcccacctaccgtgccctgctgctgcaggggccatcacagtcctcctccgaggcctaggccgcccccagcagcacagaccccgccgcctcctacggccgactctgggttcccttcaggtgttgttgtcggcagggctgtcagggcacatgcctggccggctggggtccccacccgcggagacggtcctagacccagtggggagtgctgtgtctcctgggtctgcccacccgtggccaagcaggaactccaggtgcagggcgggcctccaggtgcagggcgggccagaagccccctcatcggcccgcagctggctggcccagtgctcctggctgggggctcttgcgtggtgagagtaggggtccccccaggagccatgctggacccatgagcctcgctggggcctcctccccaggcagccaatgggccccagacaagcctttggtggggaacagaacctccgcatcgtgtagttttgtgacataaggagacctcctacttgagctgtctgtaccccagaatcaaacacagaacctcagaaccagatttaggacctcagaatcctgcactcaaggtggcaggacccaatttctgttttatatgttcatgaactttaaacctggaaacatgtccttactaggtgttttatcaaaaaaaagttttcatatttatctctatccctaaccccccaaaaataggatgtcttattattgaagatatttttaaagcaaa

SEQ ID NO: 174776 - DNA, 1593 bp, Homo sapiens
  Payload ID: 14325
  Gene Symbol: RGS19
  Gene Name: regulator of G-protein signaling 19
  Uniprot ID: P49795
  ENST ID: ENST00000395042
  CDS Start-End: 268-921
agctgtaggggaggcgctgcgcccccggccccagccgatcgggggctcctggcgctagcctccctccagagcgccgcaggagtccctcctgccgtctgacttgagtccctgctgctgcagtgcacgccccttcggcagccagggtggggcccagacccaacctggcccctcctgcccccaccccgcctttgggtcgctgacccccaggctgtggtgagggtctgagagctggtaccacggagcctgggcaacctcctccgcccacccatgcccaccccgcatgaggctgagaagcagatcacagggccagaggaggcggaccggcccccttcaatgtccagtcatgatacagcctctccagcggcccccagccgcaacccctgctgcctgtgctggtgctgctgctgtagctgctcctggaaccaagagcggcggcgcgcgtggcaggcctcccgggagagcaagctgcagcccctccccagctgtgaagtatgtgccacgccaagtcctgaggaggtgcagagctgggcgcagtcttttgacaagctgatgcacagcccagcgggacgcagcgtgttccgggcgttcctgcggacagagtacagcgaggagaacatgctcttctggttggcctgcgaggagctgaaggccgaggccaaccagcatgtggtagacgagaaggcgaggctcatctacgaggactacgtatccatcctgtcccccaaggaggtgagcctggactcccgtgtgcgggagggcatcaacaagaagatgcaggagccgtccgcacacacgttcgacgacgcgcagctgcagatctacacgctcatgcaccgggactcctacccccgcttcctcagctctcccacctaccgtgccctgctgctgcaggggccatcacagtcctcctccgaggcctaggccgcccccagcagcacagaccccgccgcctcctacggccgactctgggttcccttcaggtgttgttgtcggcagggctgtcagggcacatgcctggccggctggggtccccacccgcggagacggtcctagacccagtggggagtgctgtgtctcctgggtctgcccacccgtggccaagcaggaactccaggtgcagggcgggcctccaggtgcagggcgggccagaagccccctcatcggcccgcagctggctggcccagtgctcctggctgggggctcttgcgtggtgagagtaggggtccccccaggagccatgctggacccatgagcctcgctggggcctcctccccaggcagccaatgggccccagacaagcctttggtggggaacagaacctccgcatcgtgtagttttgtgacataaggagacctcctacttgagctgtctgtaccccagaatcaaacacagaacctcagaaccagatttaggacctcagaatcctgcactcaaggtggcaggacccaatttctgttttatatgttcatgaactttaaacctggaaacatgtccttactaggtgttttatcaaaaaaaagttttcatatttatctctatccctaaccccccaaaaataggatgtcttattattgaagatatttttaaagcaaa

SEQ ID NO: 174777 - DNA, 1354 bp, Homo sapiens
  Payload ID: 14326
  Gene Symbol: RGS2
  Gene Name: regulator of G-protein signaling 2
  Uniprot ID: P41220
  ENST ID: ENST00000235382
  CDS Start-End: 32-667
aaacagccggggctccagcgggagaacgataatgcaaagtgctatgttcttggctgttcaacacgactgcagacccatggacaagagcgcaggcagtggccacaagagcgaggagaagcgagaaaagatgaaacggacccttttaaaagattggaagacccgtttgagctacttcttacaaaattcctctactcctgggaagcccaaaaccggcaaaaaaagcaaacagcaagctttcatcaagccttctcctgaggaagcacagctgtggtcagaagcatttgacgagctgctagccagcaaatatggtcttgctgcattcagggcttttttaaagtcggaattctgtgaagaaaatattgaattctggctggcctgtgaagacttcaaaaaaaccaaatcaccccaaaagctgtcctcaaaagcaaggaaaatatatactgacttcatagaaaaggaagctccaaaagagataaacatagattttcaaaccaaaactctgattgcccagaatatacaagaagctacaagtggctgctttacaactgcccagaaaagggtatacagcttgatggagaacaactcttatcctcgtttcttggagtcagaattctaccaggacttgtgtaaaaagccacaaatcaccacagagcctcatgctacatgaaatgtaaaagggagcccagaaatggaggacatttcattctttttcctgaggggaaggactgtgacctgccataaagactgaccttgaattcagcctgggtgttcaggaaacatcactcagaactattgattcaaagttgggtagtgaatcaggaagccagtaactgactaggagaagctggtatcagaacagcttccctcactgtgtacagaacgcaagaagggaataggtggtctgaacgtggtgtctcactctgaaaagcaggaatgtaagatgatgaaagagacaatgtaatactgttggtccaaaagcatttaaaatcaatagatctgggattatgtggccttaggtagctggttgtacatctttccctaaatcgatccatgttaccacatagtagttttagtttaggattcagtaacagtgaagtgtttactatgtgcaacggtattgaagttcttatgaccacagatcatcagtactgttgtctcatgtaatgctaaaactgaaatggtccgtgtttgcattgttaaaaatgatgtgtgaaatagaatgagtgctatggtgttgaaaactgcagtgtccgttatgagtgccaaaaatctgtcttgaaggcagctacactttgaagtggtctttgaatacttttaataaatttattttgataaataatattgaacacttgga

SEQ ID NO: 174778 - DNA, 1664 bp, Homo sapiens
  Payload ID: 14327
  Gene Symbol: RGS20
  Gene Name: regulator of G-protein signaling 20
  Uniprot ID: O76081
  ENST ID: ENST00000276500
  CDS Start-End: 123-848
gggagaagagggctagagcaaagaccgagagccggagaaaggcgaaaggcgcggtgagcaatcgccgacgtagagagggcagccctccgcgctgcaatattgagaaggcacccgcgggacgcatgcgcacggcggacggaggcgagccggccggggcttcctccccggccggcagggtggacggtgggctccagatgggatcagagcggatggagatgcggaagcggcagatgcccgccgcccaggacacaccaggcgccgccccaggccagcccggagcggggagtcgcgggtccaacgcatgctgcttctgctggtgctgctgttgtagctgctcgtgtctcactgttagaaaccaggaagatcagaggcccacaatagcttcccacgaactcagagcagatcttccaacctgggaagaaagccctgctcctactctggaagaagtcaacgcctgggctcagtcatttgacaaattaatggtcactccagcaggaaggaatgcattccgtgaattcctccgaacagaattcagtgaggaaaatatgctcttctggatggcctgtgaggaactgaaaaaggaagctaataaaaacattattgaagagaaagcaaggataatctatgaagactacatttctatactttctcctaaggaggtgagcttagactcccgggtgagagaagtgatcaacagaaacatggtggagccatcccaacacatattcgatgatgctcaacttcagatttacaccctgatgcacagagactcatatcctcgattcatgaactctgctgtctataaggacttgcttcagtccttatcggagaaatctattgaagcataggatttttcaaatatatttattattaataaaataataaaagaattcatgggctacaactagcacagggaatttagaggttgtagcatcttctgctggagtaatactcaggctattctaataacagatgattccttcaacagactgctatatattcaccatgtaaactgcagccacctttagtgatacttttgaaaaaaaaaaataaagggatatggctgttgtagaaagatagcgtatttgcatttacaataacagtagcatgttgtcagtggccaaggctacacagaaggctccctgctgcccggagcaggtacatccaccagagcaaagggaaccacttttattttgcatgagtttggtaactgattactctcccctcaaagaaaagacattcaggtgtttctcaacgacatcttctgtccagcaagctcggtttgaatacgtcacttaccagtgccattgcaggacccaaattcacagttcataaaagatgtgaccactacatgtaaaaatagcattctacttgatcttacagtatgtatgtatgtatgtatggagacatatgtgtgcgtgtggatgtctacatggttaatggaaagcactgtgctctgaagtggatcagtctcaagtgtctggtaacagcagcagtgcttagaaaattcttttgttgaaaagagttactgttattatcagaatttgccaacctaaagaatgaatttttaaattcataacttggtcatgttcacaacaaaactgtcaaataagcatatttccatttttattactgaaagaaatatgggcattttcattctttaa

SEQ ID NO: 174779 - DNA, 2104 bp, Homo sapiens
  Payload ID: 14327
  Gene Symbol: RGS20
  Gene Name: regulator of G-protein signaling 20
  Uniprot ID: O76081
  ENST ID: ENST00000297313
  CDS Start-End: 93-1259
cattaaccaaacaaagagaagcagagtggatcctgtgctaatattgggaaaaccaggcaacaggactcatttggggcctttattgtgaaaacatgccccagctttcccaagataaccaagagtgcctccagaaacatttctccaggccgtctatatggacacagtttctgcccctgttcagggctcagagatataatacagacattcaccaaatcacagaaaatgaaggagacctcagggctgttcctgatatcaagtccttcccgcctgcacagctcccagactcgcccgccgccccgaagctgttcggcctcctttctagcccgctttccagcctcgcaaggttcttctctcaccttctccggcgaccccctcccgaggctccccggaggcgcctggacttctcccccctgcttcccgccctgccggccgcccggctctcgagggggcacgaggagctgccgggccgcctctcgctcctgctcggggcggcgctggcactgcccggccgaccctcggggggtcgtccgctgaggcccccccatccggtagccaagcccagggaagaagacgccaccgctgggcagagctcgcctatgccgcagatgggatcagagcggatggagatgcggaagcggcagatgcccgccgcccaggacacaccaggcgccgccccaggccagcccggagcggggagtcgcgggtccaacgcatgctgcttctgctggtgctgctgttgtagctgctcgtgtctcactgttagaaaccaggaagatcagaggcccacaatagcttcccacgaactcagagcagatcttccaacctgggaagaaagccctgctcctactctggaagaagtcaacgcctgggctcagtcatttgacaaattaatggtcactccagcaggaaggaatgcattccgtgaattcctccgaacagaattcagtgaggaaaatatgctcttctggatggcctgtgaggaactgaaaaaggaagctaataaaaacattattgaagagaaagcaaggataatctatgaagactacatttctatactttctcctaaggaggtgagcttagactcccgggtgagagaagtgatcaacagaaacatggtggagccatcccaacacatattcgatgatgctcaacttcagatttacaccctgatgcacagagactcatatcctcgattcatgaactctgctgtctataaggacttgcttcagtccttatcggagaaatctattgaagcataggatttttcaaatatatttattattaataaaataataaaagaattcatgggctacaactagcacagggaatttagaggttgtagcatcttctgctggagtaatactcaggctattctaataacagatgattccttcaacagactgctatatattcaccatgtaaactgcagccacctttagtgatacttttgaaaaaaaaaaataaagggatatggctgttgtagaaagatagcgtatttgcatttacaataacagtagcatgttgtcagtggccaaggctacacagaaggctccctgctgcccggagcaggtacatccaccagagcaaagggaaccacttttattttgcatgagtttggtaactgattactctcccctcaaagaaaagacattcaggtgtttctcaacgacatcttctgtccagcaagctcggtttgaatacgtcacttaccagtgccattgcaggacccaaattcacagttcataaaagatgtgaccactacatgtaaaaatagcattctacttgatcttacagtatgtatgtatgtatgtatggagacatatgtgtgcgtgtggatgtctacatggttaatggaaagcactgtgctctgaagtggatcagtctcaagtgtctggtaacagcagcagtgcttagaaaattcttttgttgaaaagagttactgttattatcagaatttgccaacctaaagaatgaatttttaaattcataacttggtcatgttcacaacaaaactgtcaaataagcatatttccatttttattactgaaagaaatatgggcattttcattctttaaagaaataaagcacaagaattttatctcaa

SEQ ID NO: 174780 - DNA, 1667 bp, Homo sapiens
  Payload ID: 14327
  Gene Symbol: RGS20
  Gene Name: regulator of G-protein signaling 20
  Uniprot ID: O76081
  ENST ID: ENST00000344277
  CDS Start-End: 1-822
atgccccagctttcccaagataaccaagagtgcctccagaaacatttctccaggccgtctatatggacacagtttctgcccctgttcagggctcagagatataatacagacattcaccaaatcacagaaaatgaaggagacctcagggctgttcctgatatcaagcagatgggatcagagcggatggagatgcggaagcggcagatgcccgccgcccaggacacaccaggcgccgccccaggccagcccggagcggggagtcgcgggtccaacgcatgctgcttctgctggtgctgctgttgtagctgctcgtgtctcactgttagaaaccaggaagatcagaggcccacaatagcttcccacgaactcagagcagatcttccaacctgggaagaaagccctgctcctactctggaagaagtcaacgcctgggctcagtcatttgacaaattaatggtcactccagcaggaaggaatgcattccgtgaattcctccgaacagaattcagtgaggaaaatatgctcttctggatggcctgtgaggaactgaaaaaggaagctaataaaaacattattgaagagaaagcaaggataatctatgaagactacatttctatactttctcctaaggaggtgagcttagactcccgggtgagagaagtgatcaacagaaacatggtggagccatcccaacacatattcgatgatgctcaacttcagatttacaccctgatgcacagagactcatatcctcgattcatgaactctgctgtctataaggacttgcttcagtccttatcggagaaatctattgaagcataggatttttcaaatatatttattattaataaaataataaaagaattcatgggctacaactagcacagggaatttagaggttgtagcatcttctgctggagtaatactcaggctattctaataacagatgattccttcaacagactgctatatattcaccatgtaaactgcagccacctttagtgatacttttgaaaaaaaaaaataaagggatatggctgttgtagaaagatagcgtatttgcatttacaataacagtagcatgttgtcagtggccaaggctacacagaaggctccctgctgcccggagcaggtacatccaccagagcaaagggaaccacttttattttgcatgagtttggtaactgattactctcccctcaaagaaaagacattcaggtgtttctcaacgacatcttctgtccagcaagctcggtttgaatacgtcacttaccagtgccattgcaggacccaaattcacagttcataaaagatgtgaccactacatgtaaaaatagcattctacttgatcttacagtatgtatgtatgtatgtatggagacatatgtgtgcgtgtggatgtctacatggttaatggaaagcactgtgctctgaagtggatcagtctcaagtgtctggtaacagcagcagtgcttagaaaattcttttgttgaaaagagttactgttattatcagaatttgccaacctaaagaatgaatttttaaattcataacttggtcatgttcacaacaaaactgtcaaataagcatatttccatttttattactgaaagaaatatgggcattttcattctttaaagaaataaagcacaagaattttatctcaa

SEQ ID NO: 174781 - DNA, 1518 bp, Homo sapiens
  Payload ID: 14327
  Gene Symbol: RGS20
  Gene Name: regulator of G-protein signaling 20
  ENST ID: ENST00000517659
  CDS Start-End: 1-177
atgccccagctttcccaagataaccaagagtgcctccagaaacatttctccaggccgtctatatggacacagtttctgcccctgttcagggctcagagatataatacagacattcaccaaatcacagaaaatgaaggagacctcagggctgttcctgatatcaagtctcactgttagaaaccaggaagatcagaggcccacaatagcttcccacgaactcagagcagatcttccaacctgggaagaaagccctgctcctactctggaagaagtcaacgcctgggctcagtcatttgacaaattaatggtcactccagcaggaaggaatgcattccgtgaattcctccgaacagaattcagtgaggaaaatatgctcttctggatggcctgtgaggaactgaaaaaggaagctaataaaaacattattgaagagaaagcaaggataatctatgaagactacatttctatactttctcctaaggaggtgagcttagactcccgggtgagagaagtgatcaacagaaacatggtggagccatcccaacacatattcgatgatgctcaacttcagatttacaccctgatgcacagagactcatatcctcgattcatgaactctgctgtctataaggacttgcttcagtccttatcggagaaatctattgaagcataggatttttcaaatatatttattattaataaaataataaaagaattcatgggctacaactagcacagggaatttagaggttgtagcatcttctgctggagtaatactcaggctattctaataacagatgattccttcaacagactgctatatattcaccatgtaaactgcagccacctttagtgatacttttgaaaaaaaaaaataaagggatatggctgttgtagaaagatagcgtatttgcatttacaataacagtagcatgttgtcagtggccaaggctacacagaaggctccctgctgcccggagcaggtacatccaccagagcaaagggaaccacttttattttgcatgagtttggtaactgattactctcccctcaaagaaaagacattcaggtgtttctcaacgacatcttctgtccagcaagctcggtttgaatacgtcacttaccagtgccattgcaggacccaaattcacagttcataaaagatgtgaccactacatgtaaaaatagcattctacttgatcttacagtatgtatgtatgtatgtatggagacatatgtgtgcgtgtggatgtctacatggttaatggaaagcactgtgctctgaagtggatcagtctcaagtgtctggtaacagcagcagtgcttagaaaattcttttgttgaaaagagttactgttattatcagaatttgccaacctaaagaatgaatttttaaattcataacttggtcatgttcacaacaaaactgtcaaataagcatatttccatttttattactgaaagaaatatgggcattttcattctttaaagaaataaagcacaagaattttatctcaa

SEQ ID NO: 174782 - DNA, 1434 bp, Homo sapiens
  Payload ID: 14327
  Gene Symbol: RGS20
  Gene Name: regulator of G-protein signaling 20
  ENST ID: ENST00000523280
  CDS Start-End: 1-213
atgccccagctttcccaagataaccaagagtgcctccagaaacatttctccaggccgtctatatggacacagtttctgcccctgttcagggctcagagatataatacagacattcaccaaatcacagaaaatgaaggagacctcagggctgttcctgatatcaagccctgctcctactctggaagaagtcaacgcctgggctcagtcatttgacaaattaatggtcactccagcaggaaggaatgcattccgtgaattcctccgaacagaattcagtgaggaaaatatgctcttctggatggcctgtgaggaactgaaaaaggaagctaataaaaacattattgaagagaaagcaaggataatctatgaagactacatttctatactttctcctaaggaggtgagcttagactcccgggtgagagaagtgatcaacagaaacatggtggagccatcccaacacatattcgatgatgctcaacttcagatttacaccctgatgcacagagactcatatcctcgattcatgaactctgctgtctataaggacttgcttcagtccttatcggagaaatctattgaagcataggatttttcaaatatatttattattaataaaataataaaagaattcatgggctacaactagcacagggaatttagaggttgtagcatcttctgctggagtaatactcaggctattctaataacagatgattccttcaacagactgctatatattcaccatgtaaactgcagccacctttagtgatacttttgaaaaaaaaaaataaagggatatggctgttgtagaaagatagcgtatttgcatttacaataacagtagcatgttgtcagtggccaaggctacacagaaggctccctgctgcccggagcaggtacatccaccagagcaaagggaaccacttttattttgcatgagtttggtaactgattactctcccctcaaagaaaagacattcaggtgtttctcaacgacatcttctgtccagcaagctcggtttgaatacgtcacttaccagtgccattgcaggacccaaattcacagttcataaaagatgtgaccactacatgtaaaaatagcattctacttgatcttacagtatgtatgtatgtatgtatggagacatatgtgtgcgtgtggatgtctacatggttaatggaaagcactgtgctctgaagtggatcagtctcaagtgtctggtaacagcagcagtgcttagaaaattcttttgttgaaaagagttactgttattatcagaatttgccaacctaaagaatgaatttttaaattcataacttggtcatgttcacaacaaaactgtcaaataagcatatttccatttttattactgaaagaaatatgggcattttcattctttaaagaaataaagcacaagaattttatctcaa

SEQ ID NO: 174783 - DNA, 1559 bp, Homo sapiens
  Payload ID: 14327
  Gene Symbol: RGS20
  Gene Name: regulator of G-protein signaling 20
  ENST ID: ENST00000522225
  CDS Start-End: 353-721
agagcaaggggaggaagaggccgggagaagagggctagagcaaagaccgagagccggagaaaggcgaaaggcgcggtgagcaatcgccgacgtagagagggcagccctccgcgctgcaatattgagaaggcacccgcgggacgcatgcgcacggcggacggaggcgagccggccggggcttcctccccggccggcagggtggacggtgggctctctcactgttagaaaccaggaagatcagaggcccacaatagcttcccacgaactcagagcagatcttccaacctgggaagaaagccctgctcctactctggaagaagtcaacgcctgggctcagtcatttgacaaattaatggtcactccagcaggaaggaatgcattccgtgaattcctccgaacagaattcagtgaggaaaatatgctcttctggatggcctgtgaggaactgaaaaaggaagctaataaaaacattattgaagagaaagcaaggataatctatgaagactacatttctatactttctcctaaggaggtgagcttagactcccgggtgagagaagtgatcaacagaaacatggtggagccatcccaacacatattcgatgatgctcaacttcagatttacaccctgatgcacagagactcatatcctcgattcatgaactctgctgtctataaggacttgcttcagtccttatcggagaaatctattgaagcataggatttttcaaatatatttattattaataaaataataaaagaattcatgggctacaactagcacagggaatttagaggttgtagcatcttctgctggagtaatactcaggctattctaataacagatgattccttcaacagactgctatatattcaccatgtaaactgcagccacctttagtgatacttttgaaaaaaaaaaataaagggatatggctgttgtagaaagatagcgtatttgcatttacaataacagtagcatgttgtcagtggccaaggctacacagaaggctccctgctgcccggagcaggtacatccaccagagcaaagggaaccacttttattttgcatgagtttggtaactgattactctcccctcaaagaaaagacattcaggtgtttctcaacgacatcttctgtccagcaagctcggtttgaatacgtcacttaccagtgccattgcaggacccaaattcacagttcataaaagatgtgaccactacatgtaaaaatagcattctacttgatcttacagtatgtatgtatgtatgtatggagacatatgtgtgcgtgtggatgtctacatggttaatggaaagcactgtgctctgaagtggatcagtctcaagtgtctggtaacagcagcagtgcttagaaaattcttttgttgaaaagagttactgttattatcagaatttgccaacctaaagaatgaatttttaaattcataacttggtcatgttcacaacaaaactgtcaaataagcatatttccatttttattactgaaagaaatatgggcattttcattctttaaagaaataaagcacaagaatttt

SEQ ID NO: 174784 - DNA, 1794 bp, Homo sapiens
  Payload ID: 14328
  Gene Symbol: RGS21
  Gene Name: regulator of G-protein signaling 21
  Uniprot ID: Q2M5E4
  ENST ID: ENST00000417209
  CDS Start-End: 175-633
gttaccacttggaaaacaattcatctgaaagaagcacagattttctcatctatcctgtcaacaaagaaggaatcaagagagcaaggacagtgatttcccctgcattgcatttgtcttgaagatcagtcagaaagagaaactcggcatcatctgtgacagacagtggaacgaaaaatgccagtgaaatgctgtttctacaggtcaccaactgcggaaacaatgacatggtctgaaaatatggacacgcttttagccaaccaagctggtctagatgcttttcgaatatttctaaaatcagagtttagtgaagaaaatgttgagttctggcttgcctgtgaagactttaagaaaacgaaaaatgcagacaaaattgcttccaaagccaagatgatttattctgaattcattgaagctgatgcacctaaagagattaacattgacttcggtaccagagacctcatctcaaagaatattgctgaaccaacactcaaatgctttgatgaggctcagaaattaatctattgtctcatggccaaggattctttccctcgatttctgaagtcagagatttataaaaaactggtaaatagccaacaggttccaaatcataaaaaatggctcccttttttgtgaggaaggtaaaagttaactaatcactatacttcagggctacaatattttaaatatacaagcatgatgcattgtcttttgttttgtttttaggatttagaaaacattttttacccaaacagatgaataacgttttatacaacaagcctgaatttctaactcagttgtttagaatgtatttgctttaccagctatttaatctcctactgggggagtacaaagaaagtttatagagatacaatatagtcttaaaccaaaactgaatattcttattatattataatgtaaggaattatacatatcttcacgtggcagaatgaaagacttttgagcatcatatacacaattttaaataccattgctttattcaaaaaaatctcacttttgtaaaaagagaatttctgaaccaaaatacaagctttcatttaatatatttaactgttttttttctgccatttctttccaactatttctaataatgtggttatgaaaactgctacgcctctcaaattatattttttaaatcacaggaatgtatacacatttatatgtatgtcttgaatgcaccatggaccaaagtttttcaaaatatatcacttggctcaattcaatggcatcacatataaaatgtgatgagttatgtatgaaaaggcctcaagggtggggaatactgattttcttatgttaacagaaatataaaagaaagtggaagactaaggagcatagataaatccttataagatgaagtatatagcaagtcataaaatttaagaatttgcaacattatctactcaattgtggggaagtatctattcactccttcagcactgatacttgtttataaaacccaaacaatttttaaatgcatttattttgagatgttcctaaaattgtttcattctatatgtaaatatcctgtgataaatacgaataatttcatttcaatatgagaagctgtaaagattcaacagatctcccacgtttccattttctttgcacagatttatttatctgcattgatatttctgcttttagattgtttgaacattaaaaaatggaggaaaaatagcatggcttattttatgttttcacaaactactcatttgatagacaaaattttgtcttcccttcatcatgagaaataaacatttaaacatattcaaa

SEQ ID NO: 174785 - DNA, 4296 bp, Homo sapiens
  Payload ID: 14329
  Gene Symbol: RGS22
  Gene Name: regulator of G-protein signaling 22
  Uniprot ID: Q8NE09
  ENST ID: ENST00000360863
  CDS Start-End: 196-3990
ccggcctcggcctccctgggcggccgtattgtctaagctccatagcaaccccggcgcggcgccggccacgctagccagcgtagctccggagcccgcgcgccgtcgccgcgtcgctcaggccctgacccgcgctggacccgcgcgctagggccctgacggcccgcgcgggctccaggcgcgggcagcggggacggcatgcccgagaagaggctcaccgcggagccaccaactattacagaagaagaatttgaagattctctggcaacagatgatttccttgtagactactttaatgaattcctaagccttccaaccttttcagaggcaattagatttaatgcagattatggagtttttgaagtagctaatgatgctccacaatttctggaaaaacaactgaaaaaaattctacaaaaccagcaacctcgaaatcccatttatgatgttgtaaggaaaggaaagaatgaggttaaacctgttcaaatgaatgcccccgatgaagatgagaccattaatgtcaactacaatattatgtgtctcagtcgtgaagaaggtattaagtggatcaaaaaagaaagacttccagcatttctggaaagtgattgttactttgaatacaggttagccaaattggtctcacaagtaagatggagcaagtccggcatgaatttcacagtaggatcaaatttttctccctggatcgtgaaaaaaccacccagtctaccacctcctgccactgaagaagataatcttgtaattatgaaaaagttctatgtatcacttggtgaggcttcctatactcaaacaaaagattggtttgcattagcaaaacaaagtcagcaaacagtatcaaccttttcgttaccctgttgtgtaccctacaacaaacttaaatcaccagctatttcatctgtttctgagaattttatctttgatgatggagttcaccctaggacaaaaaaggacccatctaaaaccaacaaattgatttctgaatttgaagaagaagaaggagaagaagaagaggtgtctgtatctctacaagacactccttctcaagctcttctgagagtataccttgaaaagaaacaggatgttgatgaaagcctgacaatgcatttctcaacatgtgaagaatttttaagctcctatatatactttattttgagaggagcaattcagcaaattgttggaaagccagttggagaaaccccagactatataaacttcaacaatataacaaaagtgtcatttgatgattgttttgagtctattcatggcaagaattttttaagtgaattagttcaaactacaaaggagaggtcagaagagatagaacaaacaagtttaagttcaaagaatgagagcgctggaccagagagcagggcggactggtgtatttctcataggacttatgacattggcaatagaaaggagtttgaaagatttaagaaatttataaaaggtacattgggagagagatattggtggctatggatggatattgagaggttaaaagttcttaaggatcctggaagacatcaaagacatcttgagaagatgaaaaaatgctatctagtgagcaatggagattactacctttctgcagaaatcttatcaaaatttaaactgttagatggatcacagtggaatgaagagcatttaagaaatattcagtctgaagttttaaaacctttacttctgtattgggcaccaagattctgtgttactcattcagcctcaacaaaatatgctagtgctgaactgaaattctggcacctccgtcaagcaaaaccaaggaaggatattgacccttttccacaaatggcaaccctcttgccattaagacccaaatcttgcattccacagatacctgagatccagaaagaagaattcagcttatcacaacctcctaaatctcccaataaatcacctgaagtaaaaacagcaactcaaaagccttggaagcgggagcttttgtatccaggttcttctaaggatgatgtgattgagaaagggtcaaagtacatgtcagaaagcagcaaagtcattcatttaacatcttttactgacatttctgaatgtctcaagccccagctggatagaagatacgcttatacagaagaacctagggttaaaaccgtgtcagatgttggtgccttgggaggatctgacatggaaaatttgttgcaatctttgtatgtagaaaatagagctggattcttctttactaaattctgcgagcattcagggaacaagttgtggaagaacagtgtgtacttttggtttgacctgcaggcttatcatcagcttttctaccaagaaacacttcagccttttaaagtatgcaagcaagcgcaatatctttttgccacatacgttgctccttctgccactcttgacattggactccaacaggaaaagaaaaaagaaatttatatgaaaatacagccaccatttgaagacctttttgacacagcagaggaatatatccttctcctccttcttgagccatggacaaagatggtaaaatcggaccaaattgcttataaaaaggtggagctggtggaagaaactcgacagttagactccacatacttcagaaagctacaggctttgcataaagagacattttccaagaaagctgaggacaccacttgtgaaattggaactggcattttatcactctctaacgtctctaaacgaacagaatattgggataatgttcctgcagaatacaagcattttaagtttagtgatctgcttaacaacaaactggagtttgaacatttccgtcagtttcttgagactcattcttcaagcatggatcttatgtgctggacagacattgagcagttccggagaataacttacagagatcgaaatcaaaggaaggcaaaatctatatacattaaaaacaaataccttaataaaaaatatttctttggacccaacagtccagcttctctgtatcagcagaaccaggtaatgcatttaagtggtggctgggggaagattcttcatgagcagcttgatgcacctgttctagttgaaatccagaagcatgtgcaaaataggctagaaaatgtatggctgccattgtttcttgcaagtgaacagtttgcagcacgtcagaagataaaggtacagatgaaagacatagcagaagagctcttactacagaaggctgaaaagaaaatcggggtctggaagcctgtggagagtaagtggatctcttcatcttgtaaaatcattgcttttcgcaaagcattattgaatccagttacttcaagacaatttcaacgttttgtggctctaaaaggagatttattggaaaatggtttactcttttggcaagaagtacaaaaatataaggacttgtgccattctcattgtgatgagtctgtcatccagaagaagattacaactattatcaactgctttattaattccagtattccaccagctttacaaattgacattccagtagagcaagcccagaagattattgaacaccggaaggagttaggaccatatgtatttagagaggcacagatgacaatttttggggttctgtttaaattctggcctcagttctgtgagtttaggaagaatttaacagatgaaaatattatgagtgttttagagagaagacaagaatataataagcagaaaaaaaaattggcagtcctagaagacgaaaaatctggaaaggatggaatcaaacaatatgcaaatacttcagtgcctgctatcaaaactgctttactcagtgattccttcctaggcctccaaccatatggccgacagccaacctggtgctactcaaagtatatagaagccttagaacaggagagaattcttcttaagatccaagaagaactagaaaaaaagttgtttgcaggcttgcaacctctcacaaattttaaggctagctcttcaactatgtctttgaaaaagaatatgtctgcccacagcagccagaagtgacagcattcttgtgaatgtttacatcctgctgctgataggttcaaggaattctttaaaccagattctgctgacatgagaagctccagtgatttgtttttttgaaggtctgtatcagagcaagcctaacatctaaataaagtttgattctggattttccaggtgggaaataaataaagaaaatttggcttgtcttactctcgcagttttaaaattatagctattctgtacacatgacatacaagactataagaactgtttaacttatttagaataaaacaactactatctaggtttgaagaaccaaaa

SEQ ID NO: 174786 - DNA, 809 bp, Homo sapiens
  Payload ID: 14329
  Gene Symbol: RGS22
  Gene Name: regulator of G-protein signaling 22
  ENST ID: ENST00000517828
  CDS Start-End: 1-809
atggactgtggagccagaggagtagaaggagcaatggaaacctggcaggaagattctctggcaacagatgatttccttgtagactactttaatgaattcctaagccttccatatctttttgccacatacgttgctccttctgccactcttgacattggactccaacaggaaaagaaaaaagaaatttatatgaaaatacagccaccatttgaagacctttttgacacagcagaggaatatatccttctcctccttcttgagccatggacaaagatggtaaaatcggaccaaattgcttataaaaaggtggagctggtggaagaaactcgacagttagactccacatacttcagaaagctacaggctttgcataaagagacattttccaagaaagctgaggacaccacttgtgaaattggaactggcattttatcactctctaacgtctctaaacgaacagaatattgggataatgttcctgcagaatacaagcattttaagtttagtgatctgcttaacaacaaactggagtttgaacatttccgtcagtttcttgagactcattcttcaagcatggatcttatgtgctggacagacattgagcagttccggagaataacttacagagatcgaaatcaaaggaaggcaaaatctatatacattaaaaacaaataccttaataaaaaatatttctttggacccaacagtccagcttctctgtatcagcagaaccaggtaatgcatttaagtggtggctgggggaagattcttcatgagcagcttgatgcacctgttctagttgaaatcca

SEQ ID NO: 174787 - DNA, 2408 bp, Homo sapiens
  Payload ID: 14329
  Gene Symbol: RGS22
  Gene Name: regulator of G-protein signaling 22
  Uniprot ID: Q8NE09
  ENST ID: ENST00000519725
  CDS Start-End: 80-1594
aggccctgacccgcgctggacccgcgcgctagggccctgacggcccgcgcgggctccaggcgcgggcagcggggacggcatgcccgagaagaggctcaccgcggagccaccaactattacagaagaagaatttgaagattctctggcaacagatgatttccttgtagactactttaatgaattcctaagccttccaaccttttcagaggcaattagatttaatgcagattatggagtttttgaagtagctaatgatgctccacaatttctggaaaaacaactgaaaaaaattctacaaaaccagcaacctcgaaatcccatttatgatgttgtaaggaaaggaaagaatgaggttaaacctgttcaaatgaatgcccccgatgaagatgagaccattaatgtcaactacaatattatgtgtctcagtcgtgaagaaggtattaagtggatcaaaaaagaaagacttccagcatttctggaaagtgattgttactttgaatacaggttagccaaattggtctcacaagtaagatggagcaagtccggcatgaatttcacagtaggatcaaatttttctccctggatcgtgaaaaaaccacccagtctaccacctcctgccactgaagaagataatcttgtaattatgaaaaagttctatgtatcacttggtgaggcttcctatactcaaacaaaagattggtttgcattagcaaaacaaagtcagcaaacagtatcaaccttttcgttaccctgttgtgtaccctacaacaaacttaaatcaccagctatttcatctgtttctgagaattttatctttgatgatggagttcaccctaggacaaaaaaggacccatctaaaaccaacaaattgatttctgaatttgaagaagaagaaggagaagaagaagaggtgtctgtatctctacaagacactccttctcaagctcttctgagagtataccttgaaaagaaacaggatgttgatgaaagcctgacaatgcatttctcaacatgtgaagaatttttaagctcctatatatactttattttgagaggagcaattcagcaaattgttggaaagccagttggagaaaccccagactatataaacttcaacaatataacaaaagtgtcatttgatgattgttttgagtctattcatggcaagaattttttaagtgaattagttcaaactacaaaggagaggtcagaagagatagaacaaacaagtttaagttcaaagaatgagagcgctggaccagagagcagggcggactggtgtatttctcataggacttatgacattggcaatagaaaggagtttgaaagatttaagaaatttataaaaggtacattgggagagagatattggtggctatggatggatattgagaggttaaaagttcttaaggatcctggaagacatcaaagacatcttgagaagatgaaaaaatgctatctagtgagcaatggagattactacctttctgcagaaatcttatcaaaatttaaactgttagatggatcacagtggaatgaagagcatttaagaaatattcagtctgaagttttaaaacctttacttctgtattgagacaagcttggtatgttgtccaggctggtttgaactcctggcctcaagcaatcctcccaccatggcttcccaaaatactgggattacagggcaccaagattctgtgttactcattcagcctcaacaaaatatgctagtgctgaactgaaattctggcacctccgtcaagcaaaaccaaggaaggatattgacccttttccacaaatggcaaccctcttgccattaagacccaaatcttgcattccacagatacctgagatccagaaagaagaattcagcttatcacaacctcctaaatctcccaataaatcacctgaagtaaaaacagcaactcaaaagccttggaagcgggagcttttgtatccaggttcttctaaggatgatgtgattgagaaagggtcaaagtacatgtcagaaagcagcaaagtcattcatttaacatcttttactgacatttctgaatgtctcaagccccagctggatagaagatacgcttatacagaagaacctagggttaaaaccgtgtcagatgttggtgccttgggaggatctgacatggaaaatttgttgcaatctttgtatgtagaaaatagagctggattcttctttactaaattctgcgagcattcagggaacaagttgtggaagaacagtgtgtacttttggtttgacctgcaggcttatcatcagcttttctaccaagaaacacttcagccttttaaagtatgcaagcaagcgcaatatctttttgccacatacgttgctccttctgccactcttgacattggactccaacaggaaaagaaaaaagaaa

SEQ ID NO: 174788 - DNA, 564 bp, Homo sapiens
  Payload ID: 14329
  Gene Symbol: RGS22
  Gene Name: regulator of G-protein signaling 22
  ENST ID: ENST00000519408
  CDS Start-End: 319-564
ttcgctgccagtggagtctcgagggacacaggcgtctccagggcgccccttccggagccaccaactattacagaagaagaatttgaagattctctggcaacagatgatttccttgtagactactttaatgaattcctaagccttccaaccttttcagaggcaattagatttaatgcagattatggagtttttgaagtagctaatgatgctccacaatttctggaaaaacaactgaaaaaaattctacaaaaccagcaacctcgaaatcccatttatgatgttgtaaggaaaggaaagaatgaggttaaacctgttcaaatgaatgcccccgatgaagatgagaccattaatgtcaactacaatattatgtgtctcagtcgtgaagaaggtattaagtggatcaaaaaagaaagacttccagcatttctggaaagtgattgttactttgaatacaggttagccaaattggtctcacaagtaagatggagcaagtccggcatgaatttcacagtaggatcaaatttttctccctggatcgtgaaaaaaccacccagtctaccacct

SEQ ID NO: 174789 - DNA, 3975 bp, Homo sapiens
  Payload ID: 14329
  Gene Symbol: RGS22
  Gene Name: regulator of G-protein signaling 22
  Uniprot ID: Q8NE09
  ENST ID: ENST00000523437
  CDS Start-End: 42-3800
gacggcccgcgcgggctccaggcgcgggcagcggggacggcatgcccgagaagaggctcaccgcggagccaccaactattacagaagaagaatttgaagattctctggcaacagatgatttccttgtagactactttaatgaattcctaagccttccaaccttttcagaggcaattagatttaatgcagattatggagtttttgaagtagctaatgatgctccacaatttctggaaaaacaactgaaaaaaattctacaaaaccagcaacctcgaaatcccatttatgatgttgtaaggaaaggaaagaatgaggttaaacctgttcaaatgaatgcccccgatgaagatgagaccattaatgtcaactacaatattatgtgtctcagtcgtgaagaaggtattaagtggatcaaaaaagaaagacttccagcatttctggaaagtgattgttactttgaatacaggttagccaaattggtctcacaagtaagatggagcaagtccggcatgaatttcacagtaggatcaaatttttctccctggatcgtgaaaaaaccacccagtctaccacctcctgccactgaagaagataatcttgcttcctatactcaaacaaaagattggtttgcattagcaaaacaaagtcagcaaacagtatcaaccttttcgttaccctgttgtgtaccctacaacaaacttaaatcaccagctatttcatctgtttctgagaattttatctttgatgatggagttcaccctaggacaaaaaaggacccatctaaaaccaacaaattgatttctgaatttgaagaagaagaaggagaagaagaagaggtgtctgtatctctacaagacactccttctcaagctcttctgagagtataccttgaaaagaaacaggatgttgatgaaagcctgacaatgcatttctcaacatgtgaagaatttttaagctcctatatatactttattttgagaggagcaattcagcaaattgttggaaagccagttggagaaaccccagactatataaacttcaacaatataacaaaagtgtcatttgatgattgttttgagtctattcatggcaagaattttttaagtgaattagttcaaactacaaaggagaggtcagaagagatagaacaaacaagtttaagttcaaagaatgagagcgctggaccagagagcagggcggactggtgtatttctcataggacttatgacattggcaatagaaaggagtttgaaagatttaagaaatttataaaaggtacattgggagagagatattggtggctatggatggatattgagaggttaaaagttcttaaggatcctggaagacatcaaagacatcttgagaagatgaaaaaatgctatctagtgagcaatggagattactacctttctgcagaaatcttatcaaaatttaaactgttagatggatcacagtggaatgaagagcatttaagaaatattcagtctgaagttttaaaacctttacttctgtattgggcaccaagattctgtgttactcattcagcctcaacaaaatatgctagtgctgaactgaaattctggcacctccgtcaagcaaaaccaaggaaggatattgacccttttccacaaatggcaaccctcttgccattaagacccaaatcttgcattccacagatacctgagatccagaaagaagaattcagcttatcacaacctcctaaatctcccaataaatcacctgaagtaaaaacagcaactcaaaagccttggaagcgggagcttttgtatccaggttcttctaaggatgatgtgattgagaaagggtcaaagtacatgtcagaaagcagcaaagtcattcatttaacatcttttactgacatttctgaatgtctcaagccccagctggatagaagatacgcttatacagaagaacctagggttaaaaccgtgtcagatgttggtgccttgggaggatctgacatggaaaatttgttgcaatctttgtatgtagaaaatagagctggattcttctttactaaattctgcgagcattcagggaacaagttgtggaagaacagtgtgtacttttggtttgacctgcaggcttatcatcagcttttctaccaagaaacacttcagccttttaaagtatgcaagcaagcgcaatatctttttgccacatacgttgctccttctgccactcttgacattggactccaacaggaaaagaaaaaagaaatttatatgaaaatacagccaccatttgaagacctttttgacacagcagaggaatatatccttctcctccttcttgagccatggacaaagatggtaaaatcggaccaaattgcttataaaaaggtggagctggtggaagaaactcgacagttagactccacatacttcagaaagctacaggctttgcataaagagacattttccaagaaagctgaggacaccacttgtgaaattggaactggcattttatcactctctaacgtctctaaacgaacagaatattgggataatgttcctgcagaatacaagcattttaagtttagtgatctgcttaacaacaaactggagtttgaacatttccgtcagtttcttgagactcattcttcaagcatggatcttatgtgctggacagacattgagcagttccggagaataacttacagagatcgaaatcaaaggaaggcaaaatctatatacattaaaaacaaataccttaataaaaaatatttctttggacccaacagtccagcttctctgtatcagcagaaccaggtaatgcatttaagtggtggctgggggaagattcttcatgagcagcttgatgcacctgttctagttgaaatccagaagcatgtgcaaaataggctagaaaatgtatggctgccattgtttcttgcaagtgaacagtttgcagcacgtcagaagataaaggtacagatgaaagacatagcagaagagctcttactacagaaggctgaaaagaaaatcggggtctggaagcctgtggagagtaagtggatctcttcatcttgtaaaatcattgcttttcgcaaagcattattgaatccagttacttcaagacaatttcaacgttttgtggctctaaaaggagatttattggaaaatggtttactcttttggcaagaagtacaaaaatataaggacttgtgccattctcattgtgatgagtctgtcatccagaagaagattacaactattatcaactgctttattaattccagtattccaccagctttacaaattgacattccagtagagcaagcccagaagattattgaacaccggaaggagttaggaccatatgtatttagagaggcacagatgacaatttttggggttctgtttaaattctggcctcagttctgtgagtttaggaagaatttaacagatgaaaatattatgagtgttttagagagaagacaagaatataataagcagaaaaaaaaattggcagtcctagaagacgaaaaatctggaaaggatggaatcaaacaatatgcaaatacttcagtgcctgctatcaaaactgctttactcagtgattccttcctaggcctccaaccatatggccgacagccaacctggtgctactcaaagtatatagaagccttagaacaggagagaattcttcttaagatccaagaagaactagaaaaaaagttgtttgcaggcttgcaacctctcacaaattttaaggctagctcttcaactatgtctttgaaaaagaatatgtctgcccacagcagccagaagtgacagcattcttgtgaatgtttacatcctgctgctgataggttcaaggaattctttaaaccagattctgctgacatgagaagctccagtgatttgtttttttgaaggtctgtatcagagcaagcctaacatctaaataaagtttgattctggattttccaggtgggaaataaataaa

SEQ ID NO: 174790 - DNA, 513 bp, Homo sapiens
  Payload ID: 14329
  Gene Symbol: RGS22
  Gene Name: regulator of G-protein signaling 22
  ENST ID: ENST00000520117
  CDS Start-End: 105-513
gaataagtctcaggagatctgatgggtttaacaggggtttccgcttttggttcttcctcgttttctctccaccaccatgtaagaagtaccttttgcctcccaccatgattctgaggcctccccagccatgtggaactgaagattctctggcaacagatgatttccttgtagactactttaatgaattcctaagccttccatgtctcagtcgtgaagaaggtattaagtggatcaaaaaagaaagacttccagcatttctggaaagtgattgttactttgaatacaggttagccaaattggtctcacaagtaagatggagcaagtccggcatgaatttcacagtaggatcaaatttttctccctggatcgtgaaaaaaccacccagtctaccacctcctgccactgaagaagataatcttgtaattatgaaaaagttctatgtatcacttggtgaggcttcctatactcaaacaaaagattggtttgcattagcaaaacaaagtcagcaaacag

SEQ ID NO: 174791 - DNA, 4033 bp, Homo sapiens
  Payload ID: 14329
  Gene Symbol: RGS22
  Gene Name: regulator of G-protein signaling 22
  ENST ID: ENST00000523287
  CDS Start-End: 591-3842
attagtgaccaggcaggattccagaggcctttccttcccacttccaccttgaattccaacttaaaatgcaagccatgtacagagaatgaacagagggccagaaatgtgctacgtttgcctgtgtataacgtagggctaggtgctgtctcccatgatttcatttactcaaaggaaatcagatttgagggagataatgtaatattttgtcttgtttcagagccaccaactattacagaagaagaatttgaagattctctggcaacagatgatttccttgtagactactttaatgaattcctaagccttccactaggtctctggacccattatggaaattagattgacacaccaaagctcctgctccctttccaagaacaagcctgagcaacaccacaggatattcaaggagttcttgtttgaccttttcagaggcaattagatttaatgcagattatggagtttttgaagtagctaatgatgctccacaatttctggaaaaacaactgaaaaaaattctacaaaaccagcaacctcgaaatcccatttatgatgttgtaaggaaaggaaagaatgaggttaaacctgttcaaatgaatgcccccgatgaagatgagaccattaatgtcaactacaatattatggcttcctatactcaaacaaaagattggtttgcattagcaaaacaaagtcagcaaacagtatcaaccttttcgttaccctgttgtgtaccctacaacaaacttaaatcaccagctatttcatctgtttctgagaattttatctttgatgatggagttcaccctaggacaaaaaaggacccatctaaaaccaacaaattgatttctgaatttgaagaagaagaaggagaagaagaagaggtgtctgtatctctacaagacactccttctcaagctcttctgagagtataccttgaaaagaaacaggatgttgatgaaagcctgacaatgcatttctcaacatgtgaagaatttttaagctcctatatatactttattttgagaggagcaattcagcaaattgttggaaagccagttggagaaaccccagactatataaacttcaacaatataacaaaagtgtcatttgatgattgttttgagtctattcatggcaagaattttttaagtgaattagttcaaactacaaaggagaggtcagaagagatagaacaaacaagtttaagttcaaagaatgagagcgctggaccagagagcagggcggactggtgtatttctcataggacttatgacattggcaatagaaaggagtttgaaagatttaagaaatttataaaaggtacattgggagagagatattggtggctatggatggatattgagaggttaaaagttcttaaggatcctggaagacatcaaagacatcttgagaagatgaaaaaatgctatctagtgagcaatggagattactacctttctgcagaaatcttatcaaaatttaaactgttagatggatcacagtggaatgaagagcatttaagaaatattcagtctgaagttttaaaacctttacttctgtattgggcaccaagattctgtgttactcattcagcctcaacaaaatatgctagtgctgaactgaaattctggcacctccgtcaagcaaaaccaaggaaggatattgacccttttccacaaatggcaaccctcttgccattaagacccaaatcttgcattccacagatacctgagatccagaaagaagaattcagcttatcacaacctcctaaatctcccaataaatcacctgaagtaaaaacagcaactcaaaagccttggaagcgggagcttttgtatccaggttcttctaaggatgatgtgattgagaaagggtcaaagtacatgtcagaaagcagcaaagtcattcatttaacatcttttactgacatttctgaatgtctcaagccccagctggatagaagatacgcttatacagaagaacctagggttaaaaccgtgtcagatgttggtgccttgggaggatctgacatggaaaatttgttgcaatctttgtatgtagaaaatagagctggattcttctttactaaattctgcgagcattcagggaacaagttgtggaagaacagtgtgtacttttggtttgacctgcaggcttatcatcagcttttctaccaagaaacacttcagccttttaaagtatgcaagcaagcgcaatatctttttgccacatacgttgctccttctgccactcttgacattggactccaacaggaaaagaaaaaagaaatttatatgaaaatacagccaccatttgaagacctttttgacacagcagaggaatatatccttctcctccttcttgagccatggacaaagatggtaaaatcggaccaaattgcttataaaaaggtggagctggtggaagaaactcgacagttagactccacatacttcagaaagctacaggctttgcataaagagacattttccaagaaagctgaggacaccacttgtgaaattggaactggcattttatcactctctaacgtctctaaacgaacagaatattgggataatgttcctgcagaatacaagcattttaagtttagtgatctgcttaacaacaaactggagtttgaacatttccgtcagtttcttgagactcattcttcaagcatggatcttatgtgctggacagacattgagcagttccggagaataacttacagagatcgaaatcaaaggaaggcaaaatctatatacattaaaaacaaataccttaataaaaaatatttctttggacccaacagtccagcttctctgtatcagcagaaccaggtaatgcatttaagtggtggctgggggaagattcttcatgagcagcttgatgcacctgttctagttgaaatccagaagcatgtgcaaaataggctagaaaatgtatggctgccattgtttcttgcaagtgaacagtttgcagcacgtcagaagataaaggtacagatgaaagacatagcagaagagctcttactacagaaggctgaaaagaaaatcggggtctggaagcctgtggagagtaagtggatctcttcatcttgtaaaatcattgcttttcgcaaagcattattgaatccagttacttcaagacaatttcaacgttttgtggctctaaaaggagatttattggaaaatggtttactcttttggcaagaagtacaaaaatataaggacttgtgccattctcattgtgatgagtctgtcatccagaagaagattacaactattatcaactgctttattaattccagtattccaccagctttacaaattgacattccagtagagcaagcccagaagattattgaacaccggaaggagttaggaccatatgtatttagagaggcacagatgacaatttttggggttctgtttaaattctggcctcagttctgtgagtttaggaagaatttaacagatgaaaatattatgagtgttttagagagaagacaagaatataataagcagaaaaaaaaattggcagtcctagaagacgaaaaatctggaaaggatggaatcaaacaatatgcaaatacttcagtgcctgctatcaaaactgctttactcagtgattccttcctaggcctccaaccatatggccgacagccaacctggtgctactcaaagtatatagaagccttagaacaggagagaattcttcttaagatccaagaagaactagaaaaaaagttgtttgcaggcttgcaacctctcacaaattttaaggctagctcttcaactatgtctttgaaaaagaatatgtctgcccacagcagccagaagtgacagcattcttgtgaatgtttacatcctgctgctgataggttcaaggaattctttaaaccagattctgctgacatgagaagctccagtgatttgtttttttgaaggtctgtatcagagcaagcctaacatctaaataaagtttgattctggattttccaggtgggaaataaataaagaaaatttggcttgtc

SEQ ID NO: 174792 - DNA, 456 bp, Homo sapiens
  Payload ID: 14329
  Gene Symbol: RGS22
  Gene Name: regulator of G-protein signaling 22
  ENST ID: ENST00000517843
  CDS Start-End: 1-336
aaattctggcctcagttctgtgagtttaggaagaatttaacagatgaaaatattatgagtgttttagagagaagacaagaatataataagcagaaaaaaaaattggcagtcctagaagacgaaaaatctggaaaggatggaatcaaacaatatgcaaatacttcagtgcctgctatcaaaactgctttactcagtgattccttcctaggcctccaaccatatggccgacagccaacctggtgctactcaaagtatatagaagccttagaacaggagagaattcttcttaagatccaagaagaactagaaaaaaagttgtttgcaggaattctttaaaccagattctgctgacatgagaagctccagtgatttgtttttttgaaggtctgtatcagagcaagcctaacatctaaataaagtttgattctggattttccaggtgggaaataaataaag

SEQ ID NO: 174793 - DNA, 750 bp, Homo sapiens
  Payload ID: 14329
  Gene Symbol: RGS22
  Gene Name: regulator of G-protein signaling 22
  ENST ID: ENST00000519092
  CDS Start-End: 486-750
agtgaattagtgaccaggcaggattccagaggcctttccttcccacttccaccttgaattccaacttaaaatgcaagccatgtacagagaatgaacagagggccagaaatgtgctacgtttgcctgtgtataacgtagggctaggtgctgtctcccatgatttcatttactcaaaggaaatcagatttgagggagataatgtaatattttgtcttgtttcagagccaccaactattacagaagaagaatttgaagattctctggcaacagatgatttccttgtagactactttaatgaattcctaagccttccaaccttttcagaggcaattagatttaatgcagattatggagtttttgaagtagctaatgatgctccacaatttctggaaaaacaactgaaaaaaattctacaaaaccagcaacctcgaaatcccatttatgatgttgtaaggaaaggaaagaatgaggttaaacctgttcaaatgaatgcccccgatgaagatgagaccattaatgtcaactacaatattatgtgtctcagtcgtgaagaaggtattaagtggatcaaaaaagaaagacttccagcatttctggaaagtgattgttactttgaatacaggttagccaaattggtctcacaagtaagatggagcaagtccggcatgaatttcacagtaggatcaaatttttctccctggatcgtgaaaaaaccacccagtctaccacctcctgccactgaagaagata

SEQ ID NO: 174794 - DNA, 4253 bp, Homo sapiens
  Payload ID: 14329
  Gene Symbol: RGS22
  Gene Name: regulator of G-protein signaling 22
  ENST ID: ENST00000617334
  CDS Start-End: 196-3951
ccggcctcggcctccctgggcggccgtattgtctaagctccatagcaaccccggcgcggcgccggccacgctagccagcgtagctccggagcccgcgcgccgtcgccgcgtcgctcaggccctgacccgcgctggacccgcgcgctagggccctgacggcccgcgcgggctccaggcgcgggcagcggggacggcatgcccgagaagaggctcaccgcggagccaccaactattacagaagaagaatttgaagattctctggcaacagatgatttccttgtagactactttaatgaattcctaagccttccaaccttttcagaggcaattagatttaatgcagattatggagtttttgaagtagctaatgatgctccacaatttctggaaaaacaactgaaaaaaattctacaaaaccagcaacctcgaaatcccatttatgatgttgtaaggaaaggaaagaatgaggttaaacctgttcaaatgaatgcccccgatgaagatgagaccattaatgtcaactacaatattatgtgtctcagtcgtgaagaaggtattaagtggatcaaaaaagaaagacttccagcatttctggaaagtgattgttactttgaatacaggttagccaaattggtctcacaagtaagatggagcaagtccggcatgaatttcacagtaggatcaaatttttctccctggatcgtgaaaaaaccacccagtctaccacctcctgccactgaagaagataatcttgcttcctatactcaaacaaaagattggtttgcattagcaaaacaaagtcagcaaacagtatcaaccttttcgttaccctgttgtgtaccctacaacaaacttaaatcaccagctatttcatctgtttctgagaattttatctttgatgatggagttcaccctaggacaaaaaaggacccatctaaaaccaacaaattgatttctgaatttgaagaagaagaaggagaagaagaagaggtgtctgtatctctacaagacactccttctcaagctcttctgagagtataccttgaaaagaaacaggatgttgatgaaagcctgacaatgcatttctcaacatgtgaagaatttttaagctcctatatatactttattttgagaggagcaattcagcaaattgttggaaagccagttggagaaaccccagactatataaacttcaacaatataacaaaagtgtcatttgatgattgttttgagtctattcatggcaagaattttttaagtgaattagttcaaactacaaaggagaggtcagaagagatagaacaaacaagtttaagttcaaagaatgagagcgctggaccagagagcagggcggactggtgtatttctcataggacttatgacattggcaatagaaaggagtttgaaagatttaagaaatttataaaaggtacattgggagagagatattggtggctatggatggatattgagaggttaaaagttcttaaggatcctggaagacatcaaagacatcttgagaagatgaaaaaatgctatctagtgagcaatggagattactacctttctgcagaaatcttatcaaaatttaaactgttagatggatcacagtggaatgaagagcatttaagaaatattcagtctgaagttttaaaacctttacttctgtattgggcaccaagattctgtgttactcattcagcctcaacaaaatatgctagtgctgaactgaaattctggcacctccgtcaagcaaaaccaaggaaggatattgacccttttccacaaatggcaaccctcttgccattaagacccaaatcttgcattccacagatacctgagatccagaaagaagaattcagcttatcacaacctcctaaatctcccaataaatcacctgaagtaaaaacagcaactcaaaagccttggaagcgggagcttttgtatccaggttcttctaaggatgatgtgattgagaaagggtcaaagtacatgtcagaaagcagcaaagtcattcatttaacatcttttactgacatttctgaatgtctcaagccccagctggatagaagatacgcttatacagaagaacctagggttaaaaccgtgtcagatgttggtgccttgggaggatctgacatggaaaatttgttgcaatctttgtatgtagaaaatagagctggattcttctttactaaattctgcgagcattcagggaacaagttgtggaagaacagtgtgtacttttggtttgacctgcaggcttatcatcagcttttctaccaagaaacacttcagccttttaaagtatgcaagcaagcgcaatatctttttgccacatacgttgctccttctgccactcttgacattggactccaacaggaaaagaaaaaagaaatttatatgaaaatacagccaccatttgaagacctttttgacacagcagaggaatatatccttctcctccttcttgagccatggacaaagatggtaaaatcggaccaaattgcttataaaaaggtggagctggtggaagaaactcgacagttagactccacatacttcagaaagctacaggctttgcataaagagacattttccaagaaagctgaggacaccacttgtgaaattggaactggcattttatcactctctaacgtctctaaacgaacagaatattgggataatgttcctgcagaatacaagcattttaagtttagtgatctgcttaacaacaaactggagtttgaacatttccgtcagtttcttgagactcattcttcaagatggatcttatgtgctggacagacattgagcagttccggagaaacttacagagatcgaaatcaaaggaaggcaaaatctatatacattaaaaacaaataccttaataaaaaatatttctttggacccaacagtccagcttctctgtatcagcagaaccaggtaatgcatttaagtggtggctgggggaagattcttcatgagcagcttgatgcacctgttctagttgaaatccagaagcatgtgcaaaataggctagaaaatgtatggctgccattgtttcttgcaagtgaacagtttgcagcacgtcagaagataaaggtacagatgaaagacatagcagaagagctcttactacagaaggctgaaaagaaaatcggggtctggaagcctgtggagagtaagtggatctcttcatcttgtaaaatcattgcttttcgcaaagcattattgaatccagttacttcaagacaatttcaacgttttgtggctctaaaaggagatttattggaaaatggtttactcttttggcaagaagtacaaaaatataaggacttgtgccattctcattgtgatgagtctgtcatccagaagaagattacaactattatcaactgctttattaattccagtattccaccagctttacaaattgacattccagtagagcaagcccagaagattattgaacaccggaaggagttaggaccatatgtatttagagaggcacagatgacaatttttggggttctgtttaaattctggcctcagttctgtgagtttaggaagaatttaacagatgaaaatattatgagtgttttagagagaagacaagaatataataagcagaaaaaaaaattggcagtcctagaagacgaaaaatctggaaaggatggaatcaaacaatatgcaaatacttcagtgcctgctatcaaaactgctttactcagtgattccttcctaggcctccaaccatatggccgacagccaacctggtgctactcaaagtatatagaagccttagaacaggagagaattcttcttaagatccaagaagaactagaaaaaaagttgtttgcaggcttgcaacctctcacaaattttaaggctagctcttcaactatgtctttgaaaaagaatatgtctgcccacagcagccagaagtgacagcattcttgtgaatgtttacatcctgctgctgataggttcaaggaattctttaaaccagattctgctgacatgagaagctccagtgatttgtttttttgaaggtctgtatcagagcaagcctaacatctaaataaagtttgattctggattttccaggtgggaaataaataaagaaaatttggcttgtcttactctcgcagttttaaaattatagctattctgtacacatgacatacaagactataagaactgtttaacttatttagaataaaacaactactatctaggtttgaagaacc

SEQ ID NO: 174795 - DNA, 4387 bp, Homo sapiens
  Payload ID: 14330
  Gene Symbol: RGS3
  Gene Name: regulator of G-protein signaling 3
  Uniprot ID: P49796
  ENST ID: ENST00000350696
  CDS Start-End: 1-3597
atgcctgtaatcccagcactttgggaggttgagatgggcagatcgcaaggtcaggagatcgagaccatcctggctaacaggtcacattcagacagcacacctttgcccaattttctttctggatctcaccgtcctgagtgttgtacctgcaggttgctcacagcctctggagcccaagatagtctcccctttgggaggaggctctacagtggtccctggcgaagttgtgaagaggtctgccacgtctctgtgctcagtgtcctctctacatcctgtggcttgagcctgagcttgcccatattccctggctggatggagtggctaagccctgatatcgctctgcccagaagagatgagtggactcaaacttctccagccaggaagaggatcacgcatgccaaagtccagggtgcaggtcagctgaggctgtccattgatgcccaggaccgggttctgctgcttcacattatagaaggtaaaggcctgatcagcaaacagcctggcacctgtgatccgtatgtgaagatttctttgatccctgaagatagtagactacgccaccagaagacgcagaccgttccagactgcagagacccggctttccacgagcacttcttctttcctgtccaagaggaggatgatcagaagcgtctcttggttactgtgtggaacagggccagccagtccagacagagtggactcattggctgcatgagctttggggtgaagtctctcctgactccagacaaggagatcagtggttggtactacctcctaggggagcacctgggccggaccaagcacttgaaggtggccaggcggcgactgcggccgctgagagacccgctgctgagaatgccaggaggtggggacactgagaatgggaagaaactaaagatcaccatcccgaggggaaaggacggctttggcttcaccatctgctgcgactctccagttcgagtccaggccgtggattccgggggtccggcggaacgggcagggctgcagcagctggacacggtgctgcagctgaatgagaggcctgtggagcactggaaatgtgtggagctggcccacgagatccggagctgccccagtgagatcatcctactcgtgtggcgcatggtcccccaggtcaagccaggaccagatggcggggtcctgcggcgggcctcctgcaagtcgacacatgacctccagtcaccccccaacaaacgggagaagaactgcacccatggggtccaggcacggcctgagcagcgccacagctgccacctggtatgtgacagctctgatgggctgctgctcggcggctgggagcgctacaccgaggtggccaagcgcgggggccagcacaccctgcctgcactgtcccgtgccactgcccccaccgaccccaactacatcatcctggccccgctgaatcctgggagccagctgctccggcctgtgtaccaggaggataccatccccgaagaatcagggagtcccagtaaagggaagtcctacacaggcctggggaagaagtcccggctgatgaagacagtgcagaccatgaagggccacgggaactaccaaaactgcccggttgtgaggccgcatgccacgcactcaagctatggcacctacgtcaccctggcccccaaagtcctggtgttccctgtctttgttcagcctctagatctctgtaatcctgcccggaccctcctgctgtcagaggagctgctgctgtatgaagggaggaacaaggctgccgaggtgacactgtttgcctattcggacctgctgctcttcaccaaggaggacgagcctggccgctgcgacgtcctgaggaaccccctctacctccagagtgtgaagctgcaggaaggttcttcagaagacctgaaattctgcgtgctctatctagcagagaaggcagagtgcttattcactttggaagcgcactcgcaggagcagaagaagagagtgtgctggtgcctgtcggagaacatcgccaagcagcaacagctggcagcatcacccccggacagcaagatgtttgagacggaggcagatgagaagagggagatggccttggaggaagggaaggggcctggtgccgaggattccccacccagcaaggagccctctcctggccaggagcttcctccaggacaagaccttccacccaacaaggactccccttctgggcaggaacccgctcccagccaagaaccactgtccagcaaagactcagctacctctgaaggatcccctccaggcccagatgctccgcccagcaaggatgtgccaccatgccaggaaccccctccagcccaagacctctcaccctgccaggacctacctgctggtcaagaacccctgcctcaccaggaccctctactcaccaaagacctccctgccatccaggaatcccccacccgggaccttccaccctgtcaagatctgcctcctagccaggtctccctgccagccaaggcccttactgaggacaccatgagctccggggacctactagcagctactggggacccacctgcggcccccaggccagccttcgtgatccctgaggtccggctggatagcacctacagccagaaggcaggggcagagcagggctgctcgggagatgaggaggatgcagaagaggccgaggaggtggaggagggggaggaaggggaggaggacgaggatgaggacaccagcgatgacaactacggagagcgcagtgaggccaagcgcagcagcatgatcgagacgggccagggggctgagggtggcctctcactgcgtgtgcagaactcgctgcggcgccggacgcacagcgagggcagcctgctgcaggagccccgagggccctgctttgcctccgacaccaccttgcactgctcagacggtgagggcgccgcctccacctggggcatgccttcgcccagcaccctcaagaaagagctgggccgcaatggtggctccatgcaccacctttccctcttcttcacaggacacaggaagatgagcggggctgacaccgttggggatgatgacgaagcctcccggaagagaaagagcaaaaacctagccaaggacatgaagaacaagctggggatcttcagacggcggaatgagtcccctggagcccctcccgcgggcaaggcagacaaaatgatgaagtcattcaagcccacctcagaggaagccctcaagtggggcgagtccttggagaagctgctggttcacaaatacgggttagcagtgttccaagccttccttcgcactgagttcagtgaggagaatctggagttctggttggcttgtgaggacttcaagaaggtcaagtcacagtccaagatggcatccaaggccaagaagatctttgctgaatacatcgcgatccaggcatgcaaggaggtcaacctggactcctacacgcgggagcacaccaaggacaacctgcagagcgtcacgcggggctgcttcgacctggcacagaagcgcatcttcgggctcatggaaaaggactcgtaccctcgctttctccgttctgacctctacctggaccttattaaccagaagaagatgagtcccccgctttaggggccactggagtcgagctcagcgttcacaccaggcgggctgggtcccctgcccacctgcctccctgccccctgtgacggagggggcaagcaagcccccagaggctgtgtctctggacagacggatagacatacggaagcgaggcctggaccaagagaggcccaggctactggaggagtagaaggatgggccccgtggggtccccactgccccggtacgagggggcccaagaccctggcaggtcaggggccctggccaagccagatctggagctgctgctccctgctgcggagaccgcggaggcttcgcgttgaccaagttccttaaagaactggctgatggggcaggaggtccaggcctgggctctcgggccctcctagagggccattggagcttgcagctcagacccccactttgagttttatttatttaaatagtagttggatgcttggcacgtcgtcctgtaataggaaacccttgcctcatcagttttcctgatttacaagtgcaatattttagccaatgccttgggagaagctgccatgcaaaggtggacaccattctccagcttcaggggatatgctcgtcccgggcaccggtggcaggcagctggccttctggactaaggcagcctggggggacactgcagtctggctacacacagagatctggcaccccctgggtggagtgtccctcgggggctttgggaaagcatggcaccctcagaccacacagtagccaagttctggagcaaataaaaggcctgtgttatttcttgttcttgaccctt

SEQ ID NO: 174796 - DNA, 2542 bp, Homo sapiens
  Payload ID: 14330
  Gene Symbol: RGS3
  Gene Name: regulator of G-protein signaling 3
  Uniprot ID: P49796
  ENST ID: ENST00000317613
  CDS Start-End: 72-1880
ctccggttactggggagcaacacagccgcctcgggttgcagacgctcctgtccgggtcgcagtgggacgccatggagcgctccctgcaccgcgtctccctcgggagccggcgtgcccacccggacttgtccttctacctcaccacctttggtcagctgaggctgtccattgatgcccaggaccgggttctgctgcttcacattatagaaggtaaaggcctgatcagcaaacagcctggcacctgtgatccgtatgtgaagatttctttgatccctgaagatagtagactacgccaccagaagacgcagaccgttccagactgcagagacccggctttccacgagcacttcttctttcctgtccaagaggaggatgatcagaagcgtctcttggttactgtgtggaacagggccagccagtccagacagagtggactcattggctgcatgagctttggggtgaagtctctcctgactccagacaaggagatcagtggttggtactacctcctaggggagcacctgggccggaccaagcacttgaaggtggccaggcggcgactgcggccgctgagagacccgctgctgagaatgccaggaggtggggacactgagaatgggaagaaactaaagatcaccatcccgaggggaaaggacggctttggcttcaccatctgctgcgactctccagttcgagtccaggccgtggattccgggggtccggcggaacgggcagggctgcagcagctggacacggtgctgcagctgaatgagaggcctgtggagcactggaaatgtgtggagctggcccacgagatccggagctgccccagtgagatcatcctactcgtgtggcgcatggtcccccaggtcaagccaggaccagatggcggggtcctgcggcgggcctcctgcaagtcgacacatgacctccagtcaccccccaacaaacgggagaagaactgcacccatggggtccaggcacggcctgagcagcgccacagctgccacctggtatgtgacagctctgatgggctgctgctcggcggctgggagcgctacaccgaggtggccaagcgcgggggccagcacaccctgcctgcactgtcccgtgccactgcccccaccgaccccaactacatcatcctggccccgctgaatcctgggagccagctgctccggcctgtgtaccaggaggataccatccccgaagaatcagggagtcccagtaaagggaagtcctacacaggcctggggaagaagtcccggctgatgaagacagtgcagaccatgaagggccacgggaactaccaaaactgcccggttgtgaggccgcatgccacgcactcaagctatggcacctacgtcaccctggcccccaaagtcctggtgttccctgtctttgttcagcctctagatctctgtaatcctgcccggaccctcctgctgtcagaggagctgctgctgtatgaagggaggaacaaggctgccgaggtgacactgtttgcctattcggacctgctgctcttcaccaaggaggacgagcctggccgctgcgacgtcctgaggaaccccctctacctccagagtgtgaagctgcaggaaggttcttcagaagacctgaaattctgcgtgctctatctagcagagaaggcagagtgcttattcactttggaagcgcactcgcaggagcagaagaagagagtgtgctggtgcctgtcggagaacatcgccaagcagcaacagctggcagcatcacccccggacagcaagaaactccaccctttcggctctctccagcaggagatggggccggtcaactcaaccaatgccacccaggatagaagctttacctcaccaggacagactctgattggctgagcaaacccaagggcgggactctgcttctggcaacttaaccctttcttgggcatcccctaccacacagtaacctcacctcaactggacctgaaacagaggaccaagatggtgggtctagggtcatctgaagggagtggtcccaagggtgcatgtggatgtcaacagaaggaccacaatggtgtgagaggccttgtgggcatgcagagactggcagcagaaagtcccaagaggagaggactcagaggcttcttccttccaaggaggaggaggaggaggacattccacatctgggcttccagtggtggctcccggacctgccttgggggcagcaggagaggttgggagaggtcaccctgatgaagaacaatgccatgatctgctgctgccagaggacatctccgcccatccactcattttccacctgtacacattggctcattcattcgatggatatttcgggtgcatctactttatgccaggctctatgctaggagctggggatactgtggagaaaaagtcggatatggtctcgctctcatcaagatttcagtctagctgggagtgagcgttaaataagtcaataccaacacacacacgtgcacacacgtgatggcaagctgtgatcatctatgaaagaaaaaacacagatttctttaagaggg

SEQ ID NO: 174797 - DNA, 3689 bp, Homo sapiens
  Payload ID: 14330
  Gene Symbol: RGS3
  Gene Name: regulator of G-protein signaling 3
  Uniprot ID: P49796
  ENST ID: ENST00000343817
  CDS Start-End: 151-2904
ttggggaggtgagaggtgatttcctgccattcttctgtggggcgggcttcccagggtgctcatgccaggctgacgggtccagtgcgggctcccgctgctgggggagagctgggttttcatggggcggcagccgaggcaggacccgcagccatgaaccgcttcaatgggctctgcaaggtgtgctcggagcgccgctaccgccagatcaccatcccgaggggaaaggacggctttggcttcaccatctgctgcgactctccagttcgagtccaggccgtggattccgggggtccggcggaacgggcagggctgcagcagctggacacggtgctgcagctgaatgagaggcctgtggagcactggaaatgtgtggagctggcccacgagatccggagctgccccagtgagatcatcctactcgtgtggcgcatggtcccccaggtcaagccaggaccagatggcggggtcctgcggcgggcctcctgcaagtcgacacatgacctccagtcaccccccaacaaacgggagaagaactgcacccatggggtccaggcacggcctgagcagcgccacagctgccacctggtatgtgacagctctgatgggctgctgctcggcggctgggagcgctacaccgaggtggccaagcgcgggggccagcacaccctgcctgcactgtcccgtgccactgcccccaccgaccccaactacatcatcctggccccgctgaatcctgggagccagctgctccggcctgtgtaccaggaggataccatccccgaagaatcagggagtcccagtaaagggaagtcctacacaggcctggggaagaagtcccggctgatgaagacagtgcagaccatgaagggccacgggaactaccaaaactgcccggttgtgaggccgcatgccacgcactcaagctatggcacctacgtcaccctggcccccaaagtcctggtgttccctgtctttgttcagcctctagatctctgtaatcctgcccggaccctcctgctgtcagaggagctgctgctgtatgaagggaggaacaaggctgccgaggtgacactgtttgcctattcggacctgctgctcttcaccaaggaggacgagcctggccgctgcgacgtcctgaggaaccccctctacctccagagtgtgaagctgcaggaaggttcttcagaagacctgaaattctgcgtgctctatctagcagagaaggcagagtgcttattcactttggaagcgcactcgcaggagcagaagaagagagtgtgctggtgcctgtcggagaacatcgccaagcagcaacagctggcagcatcacccccggacagcaagatgtttgagacggaggcagatgagaagagggagatggccttggaggaagggaaggggcctggtgccgaggattccccacccagcaaggagccctctcctggccaggagcttcctccaggacaagaccttccacccaacaaggactccccttctgggcaggaacccgctcccagccaagaaccactgtccagcaaagactcagctacctctgaaggatcccctccaggcccagatgctccgcccagcaaggatgtgccaccatgccaggaaccccctccagcccaagacctctcaccctgccaggacctacctgctggtcaagaacccctgcctcaccaggaccctctactcaccaaagacctccctgccatccaggaatcccccacccgggaccttccaccctgtcaagatctgcctcctagccaggtctccctgccagccaaggcccttactgaggacaccatgagctccggggacctactagcagctactggggacccacctgcggcccccaggccagccttcgtgatccctgaggtccggctggatagcacctacagccagaaggcaggggcagagcagggctgctcgggagatgaggaggatgcagaagaggccgaggaggtggaggagggggaggaaggggaggaggacgaggatgaggacaccagcgatgacaactacggagagcgcagtgaggccaagcgcagcagcatgatcgagacgggccagggggctgagggtggcctctcactgcgtgtgcagaactcgctgcggcgccggacgcacagcgagggcagcctgctgcaggagccccgagggccctgctttgcctccgacaccaccttgcactgctcagacggtgagggcgccgcctccacctggggcatgccttcgcccagcaccctcaagaaagagctgggccgcaatggtggctccatgcaccacctttccctcttcttcacaggacacaggaagatgagcggggctgacaccgttggggatgatgacgaagcctcccggaagagaaagagcaaaaacctagccaaggacatgaagaacaagctggggatcttcagacggcggaatgagtcccctggagcccctcccgcgggcaaggcagacaaaatgatgaagtcattcaagcccacctcagaggaagccctcaagtggggcgagtccttggagaagctgctggttcacaaatacgggttagcagtgttccaagccttccttcgcactgagttcagtgaggagaatctggagttctggttggcttgtgaggacttcaagaaggtcaagtcacagtccaagatggcatccaaggccaagaagatctttgctgaatacatcgcgatccaggcatgcaaggaggtcaacctggactcctacacgcgggagcacaccaaggacaacctgcagagcgtcacgcggggctgcttcgacctggcacagaagcgcatcttcgggctcatggaaaaggactcgtaccctcgctttctccgttctgacctctacctggaccttattaaccagaagaagatgagtcccccgctttaggggccactggagtcgagctcagcgttcacaccaggcgggctgggtcccctgcccacctgcctccctgccccctgtgacggagggggcaagcaagcccccagaggctgtgtctctggacagacggatagacatacggaagcgaggcctggaccaagagaggcccaggctactggaggagtagaaggatgggccccgtggggtccccactgccccggtacgagggggcccaagaccctggcaggtcaggggccctggccaagccagatctggagctgctgctccctgctgcggagaccgcggaggcttcgcgttgaccaagttccttaaagaactggctgatggggcaggaggtccaggcctgggctctcgggccctcctagagggccattggagcttgcagctcagacccccactttgagttttatttatttaaatagtagttggatgcttggcacgtcgtcctgtaataggaaacccttgcctcatcagttttcctgatttacaagtgcaatattttagccaatgccttgggagaagctgccatgcaaaggtggacaccattctccagcttcaggggatatgctcgtcccgggcaccggtggcaggcagctggccttctggactaaggcagcctggggggacactgcagtctggctacacacagagatctggcaccccctgggtggagtgtccctcgggggctttgggaaagcatggcaccctcagaccacacagtagccaagttctggagcaaataaaaggcctgtgttatttcttgttcttga

SEQ ID NO: 174798 - DNA, 1714 bp, Homo sapiens
  Payload ID: 14330
  Gene Symbol: RGS3
  Gene Name: regulator of G-protein signaling 3
  ENST ID: ENST00000342620
  CDS Start-End: 418-924
cttgcagggagcggctgccagcaggccggctggaggcggctttgcgctgccccagcctgggagccctcaggatgtgtgtggggtggagcctgctagggatcccagtgccagggggtgccgttgtgagggatggacgcctctcccccggagcagcactttggggccagcttgggccctggggatgagccacaggggacccacagcctatgcgtgtgagcatgtaacccgggagccagctgggcccctcgcggggtgggcagaaggacgggctggcccaggaccctcttctttgagacatcccggactccatctcggatgaaagtgctttgagaaaccacagagttttctgtttaatggaagaaagaaatccagcctctctccagagtggcggtggccggctagacaggagccaaggacatgaagaacaagctggggatcttcagacggcggaatgagtcccctggagcccctcccgcgggcaaggcagacaaaatgatgaagtcattcaagcccacctcagaggaagccctcaagtggggcgagtccttggagaagctgctggttcacaaatacgggttagcagtgttccaagccttccttcgcactgagttcagtgaggagaatctggagttctggttggcttgtgaggacttcaagaaggtcaagtcacagtccaagatggcatccaaggccaagaagatctttgctgaatacatcgcgatccaggcatgcaaggaggtcaacctggactcctacacgcgggagcacaccaaggacaacctgcagagcgtcacgcggggctgcttcgacctggcacagaagcgcatcttcgggctcatggaaaaggactcgtaccctcgctttctccgttctgacctctacctggaccttattaaccagaagaagatgagtcccccgctttaggggccactggagtcgagctcagcgttcacaccaggcgggctgggtcccctgcccacctgcctccctgccccctgtgacggagggggcaagcaagcccccagaggctgtgtctctggacagacggatagacatacggaagcgaggcctggaccaagagaggcccaggctactggaggagtagaaggatgggccccgtggggtccccactgccccggtacgagggggcccaagaccctggcaggtcaggggccctggccaagccagatctggagctgctgctccctgctgcggagaccgcggaggcttcgcgttgaccaagttccttaaagaactggctgatggggcaggaggtccaggcctgggctctcgggccctcctagagggccattggagcttgcagctcagacccccactttgagttttatttatttaaatagtagttggatgcttggcacgtcgtcctgtaataggaaacccttgcctcatcagttttcctgatttacaagtgcaatattttagccaatgccttgggagaagctgccatgcaaaggtggacaccattctccagcttcaggggatatgctcgtcccgggcaccggtggcaggcagctggccttctggactaaggcagcctggggggacactgcagtctggctacacacagagatctggcaccccctgggtggagtgtccctcgggggctttgggaaagcatggcaccctcagaccacacagtagccaagttctggagcaaataaaaggcctgtgttatttcttgttcttgaccctt

SEQ ID NO: 174799 - DNA, 2862 bp, Homo sapiens
  Payload ID: 14330
  Gene Symbol: RGS3
  Gene Name: regulator of G-protein signaling 3
  Uniprot ID: P49796
  ENST ID: ENST00000374134
  CDS Start-End: 518-2077
ttctcggctgatctctctgggtaggtgccctctgggggcagtacccctgcctgagtggcacttcccctcctggctttgtttggtttggcctcgatttagaacagggttggcagaggcaggctgacttgcatttctggttttgggtttgttgctgcactttccccaaggggtgggcgggctctgactgacagtcaccactgggacaggcctgggccccaccctcaccacccaggaaaggggaaatgcggcccgctccccactcagtgccactctgtgccactccgtgccaggccctgagggcacccggttgctgcttccttccgtctttccccaaggactatcagagatgccagcgtgacccctgacacgtgtgtgcagcagcctgcagctgccccaagccatggctgaacactgactcccagctgtggggcttcaccattacagactccccagggcttcaaagacttctcagcttcgagcatggcttttggctgtcagggcagctgtacaatagtggatgtttgagacggaggcagatgagaagagggagatggccttggaggaagggaaggggcctggtgccgaggattccccacccagcaaggagccctctcctggccaggagcttcctccaggacaagaccttccacccaacaaggactccccttctgggcaggaacccgctcccagccaagaaccactgtccagcaaagactcagctacctctgaaggatcccctccaggcccagatgctccgcccagcaaggatgtgccaccatgccaggaaccccctccagcccaagacctctcaccctgccaggacctacctgctggtcaagaacccctgcctcaccaggaccctctactcaccaaagacctccctgccatccaggaatcccccacccgggaccttccaccctgtcaagatctgcctcctagccaggtctccctgccagccaaggcccttactgaggacaccatgagctccggggacctactagcagctactggggacccacctgcggcccccaggccagccttcgtgatccctgaggtccggctggatagcacctacagccagaaggcaggggcagagcagggctgctcgggagatgaggaggatgcagaagaggccgaggaggtggaggagggggaggaaggggaggaggacgaggatgaggacaccagcgatgacaactacggagagcgcagtgaggccaagcgcagcagcatgatcgagacgggccagggggctgagggtggcctctcactgcgtgtgcagaactcgctgcggcgccggacgcacagcgagggcagcctgctgcaggagccccgagggccctgctttgcctccgacaccaccttgcactgctcagacggtgagggcgccgcctccacctggggcatgccttcgcccagcaccctcaagaaagagctgggccgcaatggtggctccatgcaccacctttccctcttcttcacaggacacaggaagatgagcggggctgacaccgttggggatgatgacgaagcctcccggaagagaaagagcaaaaacctagccaaggacatgaagaacaagctggggatcttcagacggcggaatgagtcccctggagcccctcccgcgggcaaggcagacaaaatgatgaagtcattcaagcccacctcagaggaagccctcaagtggggcgagtccttggagaagctgctggttcacaaatacgggttagcagtgttccaagccttccttcgcactgagttcagtgaggagaatctggagttctggttggcttgtgaggacttcaagaaggtcaagtcacagtccaagatggcatccaaggccaagaagatctttgctgaatacatcgcgatccaggcatgcaaggaggtcaacctggactcctacacgcgggagcacaccaaggacaacctgcagagcgtcacgcggggctgcttcgacctggcacagaagcgcatcttcgggctcatggaaaaggactcgtaccctcgctttctccgttctgacctctacctggaccttattaaccagaagaagatgagtcccccgctttaggggccactggagtcgagctcagcgttcacaccaggcgggctgggtcccctgcccacctgcctccctgccccctgtgacggagggggcaagcaagcccccagaggctgtgtctctggacagacggatagacatacggaagcgaggcctggaccaagagaggcccaggctactggaggagtagaaggatgggccccgtggggtccccactgccccggtacgagggggcccaagaccctggcaggtcaggggccctggccaagccagatctggagctgctgctccctgctgcggagaccgcggaggcttcgcgttgaccaagttccttaaagaactggctgatggggcaggaggtccaggcctgggctctcgggccctcctagagggccattggagcttgcagctcagacccccactttgagttttatttatttaaatagtagttggatgcttggcacgtcgtcctgtaataggaaacccttgcctcatcagttttcctgatttacaagtgcaatattttagccaatgccttgggagaagctgccatgcaaaggtggacaccattctccagcttcaggggatatgctcgtcccgggcaccggtggcaggcagctggccttctggactaaggcagcctggggggacactgcagtctggctacacacagagatctggcaccccctgggtggagtgtccctcgggggctttgggaaagcatggcaccctcagaccacacagtagccaagttctggagcaaataaaaggcctgtgttatttcttgttcttga

SEQ ID NO: 174800 - DNA, 2092 bp, Homo sapiens
  Payload ID: 14330
  Gene Symbol: RGS3
  Gene Name: regulator of G-protein signaling 3
  ENST ID: ENST00000374136
  CDS Start-End: 406-1428
agtgctcaagttgtctgggctgagatagggacactgaggggctggctagctcctttgtgcctccagttcccttggagaggagggtggctcttggcaggggtgggctgtgggcttcctgaccttggggtagaggcaagagcctccagcttctggcagtgaccgggcagggctgtgtcctagatcaccatcccgaggggaaaggacggctttggcttcaccatctgctgcgactctccagttcgagtccaggccgtggattccgggggtccggcggaacgggcagggctgcagcagctggacacggtgctgcagctgaatgagaggcctgtggagcactggaaatgtgtggagctggcccacgagatccggagctgccccagtgagatcatcctactcgtgtggcgcatggtcccccaggtcaagccaggaccagatggcggggtcctgcggcgggcctcctgcaagtcgacacatgacctccagtcaccccccaacaaacgggagaagaactgcacccatggggtccaggcacggcctgagcagcgccacagctgccacctggtatgtgacagctctgatgggctgctgctcggcggctgggagcgctacaccgaggtggccaagcgcgggggccagcacaccctgcctgcactgtcccgtgccactgcccccaccgaccccaactacatcatcctggccccgctgaatcctgggagccagctgctccggcctgtgtaccaggaggataccatccccgaagaatcagggagtcccagtaaagggaagtcctacacaggcctggggaagaagtcccggctgatgaagacagtgcagaccatgaagggccacgggaactaccaaaactgcccggttgtgaggccgcatgccacgcactcaagctatggcacctacgtcaccctggcccccaaagtcctggtgttccctgtctttgttcagcctctagatctctgtaatcctgcccggaccctcctgctgtcagaggagctgctgctgtatgaagggaggaacaaggctgccgaggtgacactgtttgcctattcggacctgctgctcttcaccaaggaggacgagcctggccgctgcgacgtcctgaggaaccccctctacctccagagtgtgaagctgcaggaaggttcttcagaagacctgaaattctgcgtgctctatctagcagagaaggcagagtgcttattcactttggaagcgcactcgcaggagcagaagaagagagtgtgctggtgcctgtcggagaacatcgccaagcagcaacagctggcagcatcacccccggacagcaagaaactccaccctttcggctctctccagcaggagatggggccggtcaactcaaccaatgccacccaggatagaagctttacctcaccaggacagactctgattggctgagcaaacccaagggcgggactctgcttctggcaacttaaccctttcttgggcatcccctaccacacagtaacctcacctcaactggacctgaaacagaggaccaagatggtgggtctagggtcatctgaagggagtggtcccaagggtgcatgtggatgtcaacagaaggaccacaatggtgtgagaggccttgtgggcatgcagagactggcagcagaaagtcccaagaggagaggactcagaggcttcttccttccaaggaggaggaggaggaggacattccacatctgggcttccagtggtggctcccggacctgccttgggggcagcaggagaggttgggagaggtcaccctgatgaagaacaatgccatgatctgctgctgccagaggacatctccgcccatccactcattttccacctgtacacattggctcattcattcgatggatatttcgggtgcatctactttatgccaggctctatgctaggagctggggatactgtggagaaaaagtcggatatggtctcgctctcatcaagatttcagtctagctgggagtgagcgttaaataagtcaataccaacacacacacgtgcacacacgtgatggcaagctgtgatcatctatgaaagaaaaaacacagatttctttaagagggaa

SEQ ID NO: 174801 - DNA, 4591 bp, Homo sapiens
  Payload ID: 14330
  Gene Symbol: RGS3
  Gene Name: regulator of G-protein signaling 3
  Uniprot ID: P49796
  ENST ID: ENST00000374140
  CDS Start-End: 210-3806
aactttggctcagcctgtcttcatccactgtatcctgacacctctcctactccttctctttaatgtacagctgagactgggatacccttagactgaaaggaaggacacggctatgtagaaaagaattgactgaaggggaggagtactcgtgaaccccttgcttcagcctcccaatgttctgagagaggaggagccaggcgcagtggctcatgcctgtaatcccagcactttgggaggttgagatgggcagatcgcaaggtcaggagatcgagaccatcctggctaacaggtcacattcagacagcacacctttgcccaattttctttctggatctcaccgtcctgagtgttgtacctgcaggttgctcacagcctctggagcccaagatagtctcccctttgggaggaggctctacagtggtccctggcgaagttgtgaagaggtctgccacgtctctgtgctcagtgtcctctctacatcctgtggcttgagcctgagcttgcccatattccctggctggatggagtggctaagccctgatatcgctctgcccagaagagatgagtggactcaaacttctccagccaggaagaggatcacgcatgccaaagtccagggtgcaggtcagctgaggctgtccattgatgcccaggaccgggttctgctgcttcacattatagaaggtaaaggcctgatcagcaaacagcctggcacctgtgatccgtatgtgaagatttctttgatccctgaagatagtagactacgccaccagaagacgcagaccgttccagactgcagagacccggctttccacgagcacttcttctttcctgtccaagaggaggatgatcagaagcgtctcttggttactgtgtggaacagggccagccagtccagacagagtggactcattggctgcatgagctttggggtgaagtctctcctgactccagacaaggagatcagtggttggtactacctcctaggggagcacctgggccggaccaagcacttgaaggtggccaggcggcgactgcggccgctgagagacccgctgctgagaatgccaggaggtggggacactgagaatgggaagaaactaaagatcaccatcccgaggggaaaggacggctttggcttcaccatctgctgcgactctccagttcgagtccaggccgtggattccgggggtccggcggaacgggcagggctgcagcagctggacacggtgctgcagctgaatgagaggcctgtggagcactggaaatgtgtggagctggcccacgagatccggagctgccccagtgagatcatcctactcgtgtggcgcatggtcccccaggtcaagccaggaccagatggcggggtcctgcggcgggcctcctgcaagtcgacacatgacctccagtcaccccccaacaaacgggagaagaactgcacccatggggtccaggcacggcctgagcagcgccacagctgccacctggtatgtgacagctctgatgggctgctgctcggcggctgggagcgctacaccgaggtggccaagcgcgggggccagcacaccctgcctgcactgtcccgtgccactgcccccaccgaccccaactacatcatcctggccccgctgaatcctgggagccagctgctccggcctgtgtaccaggaggataccatccccgaagaatcagggagtcccagtaaagggaagtcctacacaggcctggggaagaagtcccggctgatgaagacagtgcagaccatgaagggccacgggaactaccaaaactgcccggttgtgaggccgcatgccacgcactcaagctatggcacctacgtcaccctggcccccaaagtcctggtgttccctgtctttgttcagcctctagatctctgtaatcctgcccggaccctcctgctgtcagaggagctgctgctgtatgaagggaggaacaaggctgccgaggtgacactgtttgcctattcggacctgctgctcttcaccaaggaggacgagcctggccgctgcgacgtcctgaggaaccccctctacctccagagtgtgaagctgcaggaaggttcttcagaagacctgaaattctgcgtgctctatctagcagagaaggcagagtgcttattcactttggaagcgcactcgcaggagcagaagaagagagtgtgctggtgcctgtcggagaacatcgccaagcagcaacagctggcagcatcacccccggacagcaagatgtttgagacggaggcagatgagaagagggagatggccttggaggaagggaaggggcctggtgccgaggattccccacccagcaaggagccctctcctggccaggagcttcctccaggacaagaccttccacccaacaaggactccccttctgggcaggaacccgctcccagccaagaaccactgtccagcaaagactcagctacctctgaaggatcccctccaggcccagatgctccgcccagcaaggatgtgccaccatgccaggaaccccctccagcccaagacctctcaccctgccaggacctacctgctggtcaagaacccctgcctcaccaggaccctctactcaccaaagacctccctgccatccaggaatcccccacccgggaccttccaccctgtcaagatctgcctcctagccaggtctccctgccagccaaggcccttactgaggacaccatgagctccggggacctactagcagctactggggacccacctgcggcccccaggccagccttcgtgatccctgaggtccggctggatagcacctacagccagaaggcaggggcagagcagggctgctcgggagatgaggaggatgcagaagaggccgaggaggtggaggagggggaggaaggggaggaggacgaggatgaggacaccagcgatgacaactacggagagcgcagtgaggccaagcgcagcagcatgatcgagacgggccagggggctgagggtggcctctcactgcgtgtgcagaactcgctgcggcgccggacgcacagcgagggcagcctgctgcaggagccccgagggccctgctttgcctccgacaccaccttgcactgctcagacggtgagggcgccgcctccacctggggcatgccttcgcccagcaccctcaagaaagagctgggccgcaatggtggctccatgcaccacctttccctcttcttcacaggacacaggaagatgagcggggctgacaccgttggggatgatgacgaagcctcccggaagagaaagagcaaaaacctagccaaggacatgaagaacaagctggggatcttcagacggcggaatgagtcccctggagcccctcccgcgggcaaggcagacaaaatgatgaagtcattcaagcccacctcagaggaagccctcaagtggggcgagtccttggagaagctgctggttcacaaatacgggttagcagtgttccaagccttccttcgcactgagttcagtgaggagaatctggagttctggttggcttgtgaggacttcaagaaggtcaagtcacagtccaagatggcatccaaggccaagaagatctttgctgaatacatcgcgatccaggcatgcaaggaggtcaacctggactcctacacgcgggagcacaccaaggacaacctgcagagcgtcacgcggggctgcttcgacctggcacagaagcgcatcttcgggctcatggaaaaggactcgtaccctcgctttctccgttctgacctctacctggaccttattaaccagaagaagatgagtcccccgctttaggggccactggagtcgagctcagcgttcacaccaggcgggctgggtcccctgcccacctgcctccctgccccctgtgacggagggggcaagcaagcccccagaggctgtgtctctggacagacggatagacatacggaagcgaggcctggaccaagagaggcccaggctactggaggagtagaaggatgggccccgtggggtccccactgccccggtacgagggggcccaagaccctggcaggtcaggggccctggccaagccagatctggagctgctgctccctgctgcggagaccgcggaggcttcgcgttgaccaagttccttaaagaactggctgatggggcaggaggtccaggcctgggctctcgggccctcctagagggccattggagcttgcagctcagacccccactttgagttttatttatttaaatagtagttggatgcttggcacgtcgtcctgtaataggaaacccttgcctcatcagttttcctgatttacaagtgcaatattttagccaatgccttgggagaagctgccatgcaaaggtggacaccattctccagcttcaggggatatgctcgtcccgggcaccggtggcaggcagctggccttctggactaaggcagcctggggggacactgcagtctggctacacacagagatctggcaccccctgggtggagtgtccctcgggggctttgggaaagcatggcaccctcagaccacacagtagccaagttctggagcaaataaaaggcctgtgttatttcttgttcttga

SEQ ID NO: 174802 - DNA, 2716 bp, Homo sapiens
  Payload ID: 14330
  Gene Symbol: RGS3
  Gene Name: regulator of G-protein signaling 3
  Uniprot ID: P49796
  ENST ID: ENST00000394646
  CDS Start-End: 151-1926
ttggggaggtgagaggtgatttcctgccattcttctgtggggcgggcttcccagggtgctcatgccaggctgacgggtccagtgcgggctcccgctgctgggggagagctgggttttcatggggcggcagccgaggcaggacccgcagccatgaaccgcttcaatgggctctgcaaggtgtgctcggagcgccgctaccgccagatcaccatcccgaggggaaaggacggctttggcttcaccatctgctgcgactctccagttcgagtccaggccgtggattccgggggtccggcggaacgggcagggctgcagcagctggacacggtgctgcagctgaatgagaggcctgtggagcactggaaatgtgtggagctggcccacgagatccggagctgccccagtgagatcatcctactcgtgtggcgcatggtcccccaggtcaagccaggaccagatggcggggtcctgcggcgggcctcctgcaagtcgacacatgacctccagtcaccccccaacaaacgggagaagaactgcacccatggggtccaggcacggcctgagcagcgccacagctgccacctggtatgtgacagctctgatgggctgctgctcggcggctgggagcgctacaccgaggtggccaagcgcgggggccagcacaccctgcctgcactgtcccgtgccactgcccccaccgaccccaactacatcatcctggccccgctgaatcctgggagccagctgctccggcctgtgtaccaggaggataccatccccgaagaatcagggagtcccagtaaagggaagtcctacacaggcctggggaagaagtcccggctgatgaagacagtgcagaccatgaagggccacgggaactaccaaaactgcccggttgtgaggccgcatgccacgcactcaagctatggcacctacgtcaccctggcccccaaagtcctggtgttccctgtctttgttcagcctctagatctctgtaatcctgcccggaccctcctgctgtcagaggagctgctgctgtatgaagggaggaacaaggctgccgaggtgacactgtttgcctattcggacctgctgctcttcaccaaggaggacgagcctggccgctgcgacgtcctgaggaaccccctctacctccagagtgtgaagctgcaggaaggttcttcagaagacctgaaattctgcgtgctctatctagcagagaaggcagagtgcttattcactttggaagcgcactcgcaggagcagaagaagagagtgtgctggtgcctgtcggagaacatcgccaagcagcaacagctggcagcatcacccccggacagcaagatgagcggggctgacaccgttggggatgatgacgaagcctcccggaagagaaagagcaaaaacctagccaaggacatgaagaacaagctggggatcttcagacggcggaatgagtcccctggagcccctcccgcgggcaaggcagacaaaatgatgaagtcattcaagcccacctcagaggaagccctcaagtggggcgagtccttggagaagctgctggttcacaaatacgggttagcagtgttccaagccttccttcgcactgagttcagtgaggagaatctggagttctggttggcttgtgaggacttcaagaaggtcaagtcacagtccaagatggcatccaaggccaagaagatctttgctgaatacatcgcgatccaggcatgcaaggaggtcaacctggactcctacacgcgggagcacaccaaggacaacctgcagagcgtcacgcggggctgcttcgacctggcacagaagcgcatcttcgggctcatggaaaaggactcgtaccctcgctttctccgttctgacctctacctggaccttattaaccagaagaagatgagtcccccgctttaggggccactggagtcgagctcagcgttcacaccaggcgggctgggtcccctgcccacctgcctccctgccccctgtgacggagggggcaagcaagcccccagaggctgtgtctctggacagacggatagacatacggaagcgaggcctggaccaagagaggcccaggctactggaggagtagaaggatgggccccgtggggtccccactgccccggtacgagggggcccaagaccctggcaggtcaggggccctggccaagccagatctggagctgctgctccctgctgcggagaccgcggaggcttcgcgttgaccaagttccttaaagaactggctgatggggcaggaggtccaggcctgggctctcgggccctcctagagggccattggagcttgcagctcagacccccactttgagttttatttatttaaatagtagttggatgcttggcacgtcgtcctgtaataggaaacccttgcctcatcagttttcctgatttacaagtgcaatattttagccaatgccttgggagaagctgccatgcaaaggtggacaccattctccagcttcaggggatatgctcgtcccgggcaccggtggcaggcagctggccttctggactaaggcagcctggggggacactgcagtctggctacacacagagatctggcaccccctgggtggagtgtccctcgggggctttgggaaagcatggcaccctcagaccacacagtagccaagttctggagcaaataaaaggcctgtgttatttcttgttcttgaccctt

SEQ ID NO: 174803 - DNA, 571 bp, Homo sapiens
  Payload ID: 14330
  Gene Symbol: RGS3
  Gene Name: regulator of G-protein signaling 3
  ENST ID: ENST00000471324
  CDS Start-End: 350-571
actctgtgccactccgtgccaggccctgagggcacccggttgctgcttccttccgtctttccccaaggactatcagaggagctttcgagctttccagcttttccagcatacgctcctgatctgttactcaggcatgctggttatcccatttcatacgtggacaccttgaggcctaaagatgccagcgtgacccctgacacgtgtgtgcagcagcctgcagctgccccaagccatggctgaacactgactcccagctgtggggcttcaccattacagactccccagggcttcaaagacttctcagcttcgagcatggcttttggctgtcagggcagctgtacaatagtggatgtttgagacggaggcagatgagaagagggagatggccttggaggaagggaaggggcctggtgccgaggattccccacccagcaaggagccctctcctggccaggagcttcctccaggacaagaccttccacccaacaaggactccccttctgggcaggaacccgctcccagccaagaaccactgtccagcaaagactcagctacctctgaaggatcccct

SEQ ID NO: 174804 - DNA, 913 bp, Homo sapiens
  Payload ID: 14330
  Gene Symbol: RGS3
  Gene Name: regulator of G-protein signaling 3
  ENST ID: ENST00000467805
  CDS Start-End: 172-913
atgccagcgtgacccctgacacgtgtgtgcagcagcctgcagctgccccaagccatggctgaacactgactcccagctgtggggcttcaccattacagactccccagggcttcaaagacttctcagcttcgagcatggcttttggctgtcagggcagctgtacaatagtggatgtttgagacggaggcagatgagaagagggagatggccttggaggaagggaaggggcctggtgccgaggattccccacccagcaaggagccctctcctggccaggagcttcctccaggacaagaccttccacccaacaaggactccccttctgggcaggaacccgctcccagccaagaaccactgtccagcaaagactcagctacctctgaaggatcccctccaggcccagatgctccgcccagcaaggatgtgccaccatgccagggggctgagggtggcctctcactgcgtgtgcagaactcgctgcggcgccggacgcacagcgagggcagcctgctgcaggagccccgagggccctgctttgcctccgacaccaccttgcactgctcagacggtgagggcgccgcctccacctggggcatgccttcgcccagcaccctcaagaaagagctgggccgcaatggtggctccatgcaccacctttccctcttcttcacaggacacaggaagatgagcggggctgacaccgttggggatgatgacgaagcctcccggaagagaaagagcaaaaacctagccaaggacatgaagaacaagctggggatcttcagacggcggaatgagtcccctggagcccctcccgcgggcaaggcagacaaaatgatgaagtcattcaagcccacctcagaggaagccctcaagtggggcgagtccttggagaagctgctggttcacaaat

SEQ ID NO: 174805 - DNA, 641 bp, Homo sapiens
  Payload ID: 14330
  Gene Symbol: RGS3
  Gene Name: regulator of G-protein signaling 3
  ENST ID: ENST00000496113
  CDS Start-End: 1-641
gtggttagacttcctgtcaatgagtgtagctctcacgcctctagatctctgtaatcctgcccggaccctcctgctgtcagaggagctgctgctgtatgaagggaggaacaaggctgccgaggtgacactgtttgcctattcggacctgctgctcttcaccaaggaggacgagcctggccgctgcgacgtcctgaggaaccccctctacctccagagtgtgaagctgcaggaaggttcttcagaagacctgaaattctgcgtgctctatctagcagagaaggcagagtgcttattcactttggaagcgcactcgcaggagcagaagaagagagtgtgctggtgcctgtcggagaacatcgccaagcagcaacagctggcagcatcacccccggacagcaagatgtttgagacggaggcagatgagaagagggagatggccttggaggaagggaaggggcctggtgccgaggattccccacccagcaaggagccctctcctggccaggagcttcctccaggacaagaccttccacccaacaaggactccccttctgggcaggaacccgctcccagccaagaaccactgtccagcaaagactcagctacctctgaaggatcccctccaggcccagatgctccgc

SEQ ID NO: 174806 - DNA, 2759 bp, Homo sapiens
  Payload ID: 14330
  Gene Symbol: RGS3
  Gene Name: regulator of G-protein signaling 3
  Uniprot ID: P49796
  ENST ID: ENST00000462143
  CDS Start-End: 416-1975
atcggctctgtcctgctctccacaggcctctgctgtgttgggagccactgccttcctcccctcccccaacctgtgggcccacagctcgccagctggcccttgaacccacttccctgcgcctctggctgcctcaatgtcactggggattagtgtgcatttgcggcttttggcggacactcccctcctggctgcagcctcaccctctggagcccagggatgggcttgggcctgggagccccctgaaccagggagcagccctgaccgtccgtttctctattttccctgacgtcagaaggcagagtgcttattcactttggaagcgcactcgcaggagcagaagaagagagtgtgctggtgcctgtcggagaacatcgccaagcagcaacagctggcagcatcacccccggacagcaagatgtttgagacggaggcagatgagaagagggagatggccttggaggaagggaaggggcctggtgccgaggattccccacccagcaaggagccctctcctggccaggagcttcctccaggacaagaccttccacccaacaaggactccccttctgggcaggaacccgctcccagccaagaaccactgtccagcaaagactcagctacctctgaaggatcccctccaggcccagatgctccgcccagcaaggatgtgccaccatgccaggaaccccctccagcccaagacctctcaccctgccaggacctacctgctggtcaagaacccctgcctcaccaggaccctctactcaccaaagacctccctgccatccaggaatcccccacccgggaccttccaccctgtcaagatctgcctcctagccaggtctccctgccagccaaggcccttactgaggacaccatgagctccggggacctactagcagctactggggacccacctgcggcccccaggccagccttcgtgatccctgaggtccggctggatagcacctacagccagaaggcaggggcagagcagggctgctcgggagatgaggaggatgcagaagaggccgaggaggtggaggagggggaggaaggggaggaggacgaggatgaggacaccagcgatgacaactacggagagcgcagtgaggccaagcgcagcagcatgatcgagacgggccagggggctgagggtggcctctcactgcgtgtgcagaactcgctgcggcgccggacgcacagcgagggcagcctgctgcaggagccccgagggccctgctttgcctccgacaccaccttgcactgctcagacggtgagggcgccgcctccacctggggcatgccttcgcccagcaccctcaagaaagagctgggccgcaatggtggctccatgcaccacctttccctcttcttcacaggacacaggaagatgagcggggctgacaccgttggggatgatgacgaagcctcccggaagagaaagagcaaaaacctagccaaggacatgaagaacaagctggggatcttcagacggcggaatgagtcccctggagcccctcccgcgggcaaggcagacaaaatgatgaagtcattcaagcccacctcagaggaagccctcaagtggggcgagtccttggagaagctgctggttcacaaatacgggttagcagtgttccaagccttccttcgcactgagttcagtgaggagaatctggagttctggttggcttgtgaggacttcaagaaggtcaagtcacagtccaagatggcatccaaggccaagaagatctttgctgaatacatcgcgatccaggcatgcaaggaggtcaacctggactcctacacgcgggagcacaccaaggacaacctgcagagcgtcacgcggggctgcttcgacctggcacagaagcgcatcttcgggctcatggaaaaggactcgtaccctcgctttctccgttctgacctctacctggaccttattaaccagaagaagatgagtcccccgctttaggggccactggagtcgagctcagcgttcacaccaggcgggctgggtcccctgcccacctgcctccctgccccctgtgacggagggggcaagcaagcccccagaggctgtgtctctggacagacggatagacatacggaagcgaggcctggaccaagagaggcccaggctactggaggagtagaaggatgggccccgtggggtccccactgccccggtacgagggggcccaagaccctggcaggtcaggggccctggccaagccagatctggagctgctgctccctgctgcggagaccgcggaggcttcgcgttgaccaagttccttaaagaactggctgatggggcaggaggtccaggcctgggctctcgggccctcctagagggccattggagcttgcagctcagacccccactttgagttttatttatttaaatagtagttggatgcttggcacgtcgtcctgtaataggaaacccttgcctcatcagttttcctgatttacaagtgcaatattttagccaatgccttgggagaagctgccatgcaaaggtggacaccattctccagcttcaggggatatgctcgtcccgggcaccggtggcaggcagctggccttctggactaaggcagcctggggggacactgcagtctggctacacacagagatctggcaccccctgggtggagtgtccctcgggggctttgggaaagcatggcaccctcagaccacacagtagccaagttctggagcaaataaaaggcctgtgttatttcttgttcttg

SEQ ID NO: 174807 - DNA, 2155 bp, Homo sapiens
  Payload ID: 14330
  Gene Symbol: RGS3
  Gene Name: regulator of G-protein signaling 3
  Uniprot ID: P49796
  ENST ID: ENST00000462403
  CDS Start-End: 435-1370
attaaataattaaactttaaaatggtgtttttgtaagtttataggacttgtacttctgaagttattcaggcttaaaactactaagatgttggggtcctgctgtatattcatgactggatgtcgccaatgcaggtgactgaggctgagaggccggctggcaggagccattctctgggaggtgccctgtacagggggtctagggaaaagaggggcgaacatgagcaagaggcatttaactcctttcttgccagcagtttcacccagtgctgaattctgctgcctccttggggaccggcaaggctaaaaatggttcttggctaaaaatagccagtcctgccaccccggtggtgggcagtgcctcccctggctccctccttccctttcagcaatttgctgacttgtcccccaccccccaccactgtctccctgctgccatggtaacgaggaggccagtcacaaatagctgggactggcttcctgccggggcggccccagaggctgtcccttgcagacacatgcccctttcacggctccctctcagggttggccagaaggaatttttttttccgctccccctcctggtccctcccatttcctggctcctcctgtctgagtcccagccccggcttgtgcctgggagtccagtcatcaggccaggattccagagagcgtgtgtggctgcagcctgcaccgttgctgcccgctgcccaggacgcggggtgggggacaggagccagagtggtgcctcctacagaccaatctgcggccccaaggtggggggccctacagagatgctccgaggcatgtacctcactcgcaacgggaacctgcagaggcgacacacgatgaaggaagccaaggacatgaagaacaagctggggatcttcagacggcggaatgagtcccctggagcccctcccgcgggcaaggcagacaaaatgatgaagtcattcaagcccacctcagaggaagccctcaagtggggcgagtccttggagaagctgctggttcacaaatacgggttagcagtgttccaagccttccttcgcactgagttcagtgaggagaatctggagttctggttggcttgtgaggacttcaagaaggtcaagtcacagtccaagatggcatccaaggccaagaagatctttgctgaatacatcgcgatccaggcatgcaaggaggtcaacctggactcctacacgcgggagcacaccaaggacaacctgcagagcgtcacgcggggctgcttcgacctggcacagaagcgcatcttcgggctcatggaaaaggactcgtaccctcgctttctccgttctgacctctacctggaccttattaaccagaagaagatgagtcccccgctttaggggccactggagtcgagctcagcgttcacaccaggcgggctgggtcccctgcccacctgcctccctgccccctgtgacggagggggcaagcaagcccccagaggctgtgtctctggacagacggatagacatacggaagcgaggcctggaccaagagaggcccaggctactggaggagtagaaggatgggccccgtggggtccccactgccccggtacgagggggcccaagaccctggcaggtcaggggccctggccaagccagatctggagctgctgctccctgctgcggagaccgcggaggcttcgcgttgaccaagttccttaaagaactggctgatggggcaggaggtccaggcctgggctctcgggccctcctagagggccattggagcttgcagctcagacccccactttgagttttatttatttaaatagtagttggatgcttggcacgtcgtcctgtaataggaaacccttgcctcatcagttttcctgatttacaagtgcaatattttagccaatgccttgggagaagctgccatgcaaaggtggacaccattctccagcttcaggggatatgctcgtcccgggcaccggtggcaggcagctggccttctggactaaggcagcctggggggacactgcagtctggctacacacagagatctggcaccccctgggtggagtgtccctcgggggctttgggaaagcatggcaccctcagaccacacagtagccaagttctggagcaaataaaaggcctgtgttatttcttgttcttga

SEQ ID NO: 174808 - DNA, 1503 bp, Homo sapiens
  Payload ID: 14330
  Gene Symbol: RGS3
  Gene Name: regulator of G-protein signaling 3
  ENST ID: ENST00000620489
  CDS Start-End: 149-727
agtcatcaggccaggattccagagagcgtgtgtggctgcagcctgcaccgttgctgcccgctgcccaggacgcggggtgggggacaggagccagagtggtgcctcctacagaccaatctgcggccccaaggtggggggccctacagagatgctccgaggcatgtacctcactcgcaacgggaacctgcagaggcgacacacgatgaaggaagccaaggacatgaagaacaagctggggatcttcagacggcggaatgagtcccctggagcccctcccgcgggcaaggcagacaaaatgatgaagtcattcaagcccacctcagaggaagccctcaagtggggcgagtccttggagaagctgctggttcacaaatacgggttagcagtgttccaagccttccttcgcactgagttcagtgaggagaatctggagttctggttggcttgtgaggacttcaagaaggtcaagtcacagtccaagatggcatccaaggccaagaagatctttgctgaatacatcgcgatccaggcatgcaaggaggtcaacctggactcctacacgcgggagcacaccaaggacaacctgcagagcgtcacgcggggctgcttcgacctggcacagaagcgcatcttcgggctcatggaaaaggactcgtaccctcgctttctccgttctgacctctacctggaccttattaaccagaagaagatgagtcccccgctttaggggccactggagtcgagctcagcgttcacaccaggcgggctgggtcccctgcccacctgcctccctgccccctgtgacggagggggcaagcaagcccccagaggctgtgtctctggacagacggatagacatacggaagcgaggcctggaccaagagaggcccaggctactggaggagtagaaggatgggccccgtggggtccccactgccccggtacgagggggcccaagaccctggcaggtcaggggccctggccaagccagatctggagctgctgctccctgctgcggagaccgcggaggcttcgcgttgaccaagttccttaaagaactggctgatggggcaggaggtccaggcctgggctctcgggccctcctagagggccattggagcttgcagctcagacccccactttgagttttatttatttaaatagtagttggatgcttggcacgtcgtcctgtaataggaaacccttgcctcatcagttttcctgatttacaagtgcaatattttagccaatgccttgggagaagctgccatgcaaaggtggacaccattctccagcttcaggggatatgctcgtcccgggcaccggtggcaggcagctggccttctggactaaggcagcctggggggacactgcagtctggctacacacagagatctggcaccccctgggtggagtgtccctcgggggctttgggaaagcatggcaccctcagaccacacagtagccaagttctggagcaaataaaaggcctgtgttatttct

SEQ ID NO: 174809 - DNA, 1726 bp, Homo sapiens
  Payload ID: 14330
  Gene Symbol: RGS3
  Gene Name: regulator of G-protein signaling 3
  Uniprot ID: P49796
  ENST ID: ENST00000613049
  CDS Start-End: 1-936
atggtaacgaggaggccagtcacaaatagctgggactggcttcctgccggggcggccccagaggctgtcccttgcagacacatgcccctttcacggctccctctcagggttggccagaaggaatttttttttccgctccccctcctggtccctcccatttcctggctcctcctgtctgagtcccagccccggcttgtgcctgggagtccagtcatcaggccaggattccagagagcgtgtgtggctgcagcctgcaccgttgctgcccgctgcccaggacgcggggtgggggacaggagccagagtggtgcctcctacagaccaatctgcggccccaaggtggggggccctacagagatgctccgaggcatgtacctcactcgcaacgggaacctgcagaggcgacacacgatgaaggaagccaaggacatgaagaacaagctggggatcttcagacggcggaatgagtcccctggagcccctcccgcgggcaaggcagacaaaatgatgaagtcattcaagcccacctcagaggaagccctcaagtggggcgagtccttggagaagctgctggttcacaaatacgggttagcagtgttccaagccttccttcgcactgagttcagtgaggagaatctggagttctggttggcttgtgaggacttcaagaaggtcaagtcacagtccaagatggcatccaaggccaagaagatctttgctgaatacatcgcgatccaggcatgcaaggaggtcaacctggactcctacacgcgggagcacaccaaggacaacctgcagagcgtcacgcggggctgcttcgacctggcacagaagcgcatcttcgggctcatggaaaaggactcgtaccctcgctttctccgttctgacctctacctggaccttattaaccagaagaagatgagtcccccgctttaggggccactggagtcgagctcagcgttcacaccaggcgggctgggtcccctgcccacctgcctccctgccccctgtgacggagggggcaagcaagcccccagaggctgtgtctctggacagacggatagacatacggaagcgaggcctggaccaagagaggcccaggctactggaggagtagaaggatgggccccgtggggtccccactgccccggtacgagggggcccaagaccctggcaggtcaggggccctggccaagccagatctggagctgctgctccctgctgcggagaccgcggaggcttcgcgttgaccaagttccttaaagaactggctgatggggcaggaggtccaggcctgggctctcgggccctcctagagggccattggagcttgcagctcagacccccactttgagttttatttatttaaatagtagttggatgcttggcacgtcgtcctgtaataggaaacccttgcctcatcagttttcctgatttacaagtgcaatattttagccaatgccttgggagaagctgccatgcaaaggtggacaccattctccagcttcaggggatatgctcgtcccgggcaccggtggcaggcagctggccttctggactaaggcagcctggggggacactgcagtctggctacacacagagatctggcaccccctgggtggagtgtccctcgggggctttgggaaagcatggcaccctcagaccacacagtagccaagttctggagcaaataaaaggcctgtgttatttcttgttcttgaccctt

SEQ ID NO: 174810 - DNA, 930 bp, Homo sapiens
  Payload ID: 14331
  Gene Symbol: RGS4
  Gene Name: regulator of G-protein signaling 4
  Uniprot ID: P49798
  ENST ID: ENST00000367906
  CDS Start-End: 111-674
agatcactcatgtgttcagtgattcaggttctgttgaagataccaaagatattcggttggtcaaaatgacgggcatataaaggcttctcaggtttctgagtgcaaaagatatgaaacatcggctaggtttcctgctgcaaaaatctgattcctgtgaacacaattcttcccacaacaagaaggacaaagtggttatttgccagagagtgagccaagaggaagtcaagaaatgggctgaatcactggaaaacctgattagtcatgaatgtgggctggcagctttcaaagctttcttgaagtctgaatatagtgaggagaatattgacttctggatcagctgtgaagagtacaagaaaatcaaatcaccatctaaactaagtcccaaggccaaaaagatctataatgaattcatctcagtccaggcaaccaaagaggtgaacctggattcttgcaccagggaagagacaagccggaacatgctagagcctacaataacctgctttgatgaggcccagaagaagattttcaacctgatggagaaggattcctaccgccgcttcctcaagtctcgattctatcttgatttggtcaacccgtccagctgtggggcagaaaagcagaaaggagccaagagttcagcagactgtgcttccctggtccctcagtgtgcctaattctcacctgaaggcagagggatgaaatgccaagactctatgctctggaaaacctgaggccaaatattgatctgtattaagctccagtgctttatccacattgtagcctaatattcatgctgcctgccatgtgtgagtcacttctacgcataaactagatatagcttttggtgtttgagtgttcatcagggtgggaccccattccagtccaattttcctaagtttctttgagggttccatgggagcaaatatctaa

SEQ ID NO: 174811 - DNA, 2606 bp, Homo sapiens
  Payload ID: 14331
  Gene Symbol: RGS4
  Gene Name: regulator of G-protein signaling 4
  Uniprot ID: P49798
  ENST ID: ENST00000367908
  CDS Start-End: 125-406
aagacgctcagaggattctgacaatatctttaccggagaagaggcaaagtacgctcaaagccgaagccacagctcctcctgccgcatttctttcctgcttgcgaattccaagctgttaaataagatgtgcaaagggcttgcaggtctgccggcttcttgcttgaggagtgcaaaagatatgaaacatcggctaggtttcctgctgcaaaaatctgattcctgtgaacacaattcttcccacaacaagaaggacaaagtggttatttgccagagagtgagccaagaggaagtcaagaaatgggctgaatcactggaaaacctgattagtcatgaatgtgaacctggattcttgcaccagggaagagacaagccggaacatgctagagcctacaataacctgctttgatgaggcccagaagaagattttcaacctgatggagaaggattcctaccgccgcttcctcaagtctcgattctatcttgatttggtcaacccgtccagctgtggggcagaaaagcagaaaggagccaagagttcagcagactgtgcttccctggtccctcagtgtgcctaattctcacctgaaggcagagggatgaaatgccaagactctatgctctggaaaacctgaggccaaatattgatctgtattaagctccagtgctttatccacattgtagcctaatattcatgctgcctgccatgtgtgagtcacttctacgcataaactagatatagcttttggtgtttgagtgttcatcagggtgggaccccattccagtccaattttcctaagtttctttgagggttccatgggagcaaatatctaaataatggcctggtaggtctggattttcaaagattgttggcagtttcctcctcccaacagttttacctcgggatggttggttagtgcatgtcacatgacatccacatgcacatgtattctgttggccagcacgttctccagactctagatgtttagatgaggttgagctatgatatgtgcttgtgtgtatgtctatgtgtatatattatatatacattagacacacatatacattatttctgtatatagatgtctgtgtatacatatgtatgtgtgagtgtatgtatacacacacacacacacacacacacacacttttgcaagagtgatgggaaagaccctaggtgctcataactagagtatgtgtatgtacttacatgggtgttttgatctctgttctttcatactacatttgaacagggcaaaatgaactaactgccatgtaggctaagaaagaaatgctaacctgtggaaagttggttttgtaaaattccatggatcttgctggagaagcatccaaggaacttcatgcttgatttgaccactgacagcctccaccttgagcactattctaaggagcaaataccttagctcccttgagctggttttctctgatggcacttttgagctcctaagctgccagccttcccttcttttcctgggtgctcagggcatgcttattagcagctgggttggtatggagttggcagacaggatgttcaacttaatgaagaaatacagctaaggccttgccagcaacacctgccgtaagttactggctgagtgagggcatagaagttaaaggttactgtttttatcctctatccttttttcctttcctgatcaaggtgctcttctcattttttcctgagaaccttagccatcagatgaggctccttagtttattgtggttggttgttttttctttataatggctctgggctatatgcctatatttataaaccagcagcaggggaaagattatattttataagagggaacaaattttcacaatttgaaaagcccacataagttttctcttttaaggtagaatcttgttaatttcattccaaacatcggggctaacagagactggaggcatttctttttaggctctgagactaaatgagaggaaaagaaaagaaaaaaaaaatgattgtctaaccaattgtgagaattactgtttgaaacttttcaaggcacattgaaatacttgaaaacttctcatttatgttatttatgatgttattttgtacgtgttattattattatattgttttataaatggaggtacaggatatcacctgaattattaatgaatgcccaggaagtaattttcttctcattcttctaaaactactgcctttcaaagtgcacacacacgcgtccacatacactgcattcgttgctccagtataaattacatgcatgagcacctttctggcttttaagccaatataatgggctgcaaaatgaagacaccagagtgtatgcatacaaatctcactgtattaaagatgcaggttttctaattgtacccttcttgtctctctggcaatcttgcccttaatatccctggagttcctcatcagtgtcattttctgttatacacagttccacaattttgtctctagttgacttcaaatgtgtaactttattggtcttgccctattataattgtcatgactttcagattgtatctgaactcacagactgctgtcttactaataggtctggaaggtcacgctgaatgagaagtaaattattttatgtaat

SEQ ID NO: 174812 - DNA, 3200 bp, Homo sapiens
  Payload ID: 14331
  Gene Symbol: RGS4
  Gene Name: regulator of G-protein signaling 4
  Uniprot ID: P49798
  ENST ID: ENST00000367909
  CDS Start-End: 341-958
gacattgagtacattttttcccatatccctacttttcagaaggattttctctgctcgttcacttaacattgctgatgcgtcagtcttttcttcctcatctctttcaggggctggagaggcagagggagacagaggagctggtactgcagagcggtcgtctgattggctggacggtcgtagctgggctataaaagagacccctacaggcttagcaggaagacgctcagaggattctgacaatatctttaccggagaagaggcaaagtacgctcaaagccgaagccacagctcctcctgccgcatttctttcctgcttgcgaattccaagctgttaaataagatgtgcaaagggcttgcaggtctgccggcttcttgcttgaggagtgcaaaagatatgaaacatcggctaggtttcctgctgcaaaaatctgattcctgtgaacacaattcttcccacaacaagaaggacaaagtggttatttgccagagagtgagccaagaggaagtcaagaaatgggctgaatcactggaaaacctgattagtcatgaatgtgggctggcagctttcaaagctttcttgaagtctgaatatagtgaggagaatattgacttctggatcagctgtgaagagtacaagaaaatcaaatcaccatctaaactaagtcccaaggccaaaaagatctataatgaattcatctcagtccaggcaaccaaagaggtgaacctggattcttgcaccagggaagagacaagccggaacatgctagagcctacaataacctgctttgatgaggcccagaagaagattttcaacctgatggagaaggattcctaccgccgcttcctcaagtctcgattctatcttgatttggtcaacccgtccagctgtggggcagaaaagcagaaaggagccaagagttcagcagactgtgcttccctggtccctcagtgtgcctaattctcacctgaaggcagagggatgaaatgccaagactctatgctctggaaaacctgaggccaaatattgatctgtattaagctccagtgctttatccacattgtagcctaatattcatgctgcctgccatgtgtgagtcacttctacgcataaactagatatagcttttggtgtttgagtgttcatcagggtgggaccccattccagtccaattttcctaagtttctttgagggttccatgggagcaaatatctaaataatggcctggtaggtctggattttcaaagattgttggcagtttcctcctcccaacagttttacctcgggatggttggttagtgcatgtcacatgacatccacatgcacatgtattctgttggccagcacgttctccagactctagatgtttagatgaggttgagctatgatatgtgcttgtgtgtatgtctatgtgtatatattatatatacattagacacacatatacattatttctgtatatagatgtctgtgtatacatatgtatgtgtgagtgtatgtatacacacacacacacacacacacacacacttttgcaagagtgatgggaaagaccctaggtgctcataactagagtatgtgtatgtacttacatgggtgttttgatctctgttctttcatactacatttgaacagggcaaaatgaactaactgccatgtaggctaagaaagaaatgctaacctgtggaaagttggttttgtaaaattccatggatcttgctggagaagcatccaaggaacttcatgcttgatttgaccactgacagcctccaccttgagcactattctaaggagcaaataccttagctcccttgagctggttttctctgatggcacttttgagctcctaagctgccagccttcccttcttttcctgggtgctcagggcatgcttattagcagctgggttggtatggagttggcagacaggatgttcaacttaatgaagaaatacagctaaggccttgccagcaacacctgccgtaagttactggctgagtgagggcatagaagttaaaggttactgtttttatcctctatccttttttcctttcctgatcaaggtgctcttctcattttttcctgagaaccttagccatcagatgaggctccttagtttattgtggttggttgttttttctttataatggctctgggctatatgcctatatttataaaccagcagcaggggaaagattatattttataagagggaacaaattttcacaatttgaaaagcccacataagttttctcttttaaggtagaatcttgttaatttcattccaaacatcggggctaacagagactggaggcatttctttttaggctctgagactaaatgagaggaaaagaaaagaaaaaaaaaatgattgtctaaccaattgtgagaattactgtttgaaacttttcaaggcacattgaaatacttgaaaacttctcatttatgttatttatgatgttattttgtacgtgttattattattatattgttttataaatggaggtacaggatatcacctgaattattaatgaatgcccaggaagtaattttcttctcattcttctaaaactactgcctttcaaagtgcacacacacgcgtccacatacactgcattcgttgctccagtataaattacatgcatgagcacctttctggcttttaagccaatataatgggctgcaaaatgaagacaccagagtgtatgcatacaaatctcactgtattaaagatgcaggttttctaattgtacccttcttgtctctctggcaatcttgcccttaatatccctggagttcctcatcagtgtcattttctgttatacacagttccacaattttgtctctagttgacttcaaatgtgtaactttattggtcttgccctattataattgtcatgactttcagattgtatctgaactcacagactgctgtcttactaataggtctggaaggtcacgctgaatgagaagtaaattattttatgtaatacatttttgagtgtgtttttcagttgtatttccctgttatttcatcactatttccaatggtgagcttgcctgctcatgctccctggacagaatactccttccttttgcatgcctgtttctatcatgtgcttgataggcctcaaagctaatgcttccagtgaaacacacgcatcttaataataagggtaaataaacgctccatatgaaacta

SEQ ID NO: 174813 - DNA, 3311 bp, Homo sapiens
  Payload ID: 14331
  Gene Symbol: RGS4
  Gene Name: regulator of G-protein signaling 4
  Uniprot ID: P49798
  ENST ID: ENST00000421743
  CDS Start-End: 161-1069
agtttctgtatgctgccgggcttataactgtctgtcatccagctatttctctccaccttcttgtttgcataacaaccaaggcaacttccgcaaatcactgcgtggagacgatgatcctgccagctcccttttggaaatcgtgaggatcagatcttggaccatgtataatatgatgcttctaatccaaaagaggaaaggcattgggagtcagctcctaagggctggagaggcagagggagacagaggagctggtactgcagagcggtcgtctgattggctggacggtcgtagctgggctataaaagagacccctacaggcttagcaggaagacgctcagaggattctgacaatatctttaccggagaagaggcaaagtacgctcaaagccgaagccacagctcctcctgccgcatttctttcctgcttgcgaattccaagctgttaaataagatgtgcaaagggcttgcaggtctgccggcttcttgcttgaggagtgcaaaagatatgaaacatcggctaggtttcctgctgcaaaaatctgattcctgtgaacacaattcttcccacaacaagaaggacaaagtggttatttgccagagagtgagccaagaggaagtcaagaaatgggctgaatcactggaaaacctgattagtcatgaatgtgggctggcagctttcaaagctttcttgaagtctgaatatagtgaggagaatattgacttctggatcagctgtgaagagtacaagaaaatcaaatcaccatctaaactaagtcccaaggccaaaaagatctataatgaattcatctcagtccaggcaaccaaagaggtgaacctggattcttgcaccagggaagagacaagccggaacatgctagagcctacaataacctgctttgatgaggcccagaagaagattttcaacctgatggagaaggattcctaccgccgcttcctcaagtctcgattctatcttgatttggtcaacccgtccagctgtggggcagaaaagcagaaaggagccaagagttcagcagactgtgcttccctggtccctcagtgtgcctaattctcacctgaaggcagagggatgaaatgccaagactctatgctctggaaaacctgaggccaaatattgatctgtattaagctccagtgctttatccacattgtagcctaatattcatgctgcctgccatgtgtgagtcacttctacgcataaactagatatagcttttggtgtttgagtgttcatcagggtgggaccccattccagtccaattttcctaagtttctttgagggttccatgggagcaaatatctaaataatggcctggtaggtctggattttcaaagattgttggcagtttcctcctcccaacagttttacctcgggatggttggttagtgcatgtcacatgacatccacatgcacatgtattctgttggccagcacgttctccagactctagatgtttagatgaggttgagctatgatatgtgcttgtgtgtatgtctatgtgtatatattatatatacattagacacacatatacattatttctgtatatagatgtctgtgtatacatatgtatgtgtgagtgtatgtatacacacacacacacacacacacacacacttttgcaagagtgatgggaaagaccctaggtgctcataactagagtatgtgtatgtacttacatgggtgttttgatctctgttctttcatactacatttgaacagggcaaaatgaactaactgccatgtaggctaagaaagaaatgctaacctgtggaaagttggttttgtaaaattccatggatcttgctggagaagcatccaaggaacttcatgcttgatttgaccactgacagcctccaccttgagcactattctaaggagcaaataccttagctcccttgagctggttttctctgatggcacttttgagctcctaagctgccagccttcccttcttttcctgggtgctcagggcatgcttattagcagctgggttggtatggagttggcagacaggatgttcaacttaatgaagaaatacagctaaggccttgccagcaacacctgccgtaagttactggctgagtgagggcatagaagttaaaggttactgtttttatcctctatccttttttcctttcctgatcaaggtgctcttctcattttttcctgagaaccttagccatcagatgaggctccttagtttattgtggttggttgttttttctttataatggctctgggctatatgcctatatttataaaccagcagcaggggaaagattatattttataagagggaacaaattttcacaatttgaaaagcccacataagttttctcttttaaggtagaatcttgttaatttcattccaaacatcggggctaacagagactggaggcatttctttttaggctctgagactaaatgagaggaaaagaaaagaaaaaaaaaatgattgtctaaccaattgtgagaattactgtttgaaacttttcaaggcacattgaaatacttgaaaacttctcatttatgttatttatgatgttattttgtacgtgttattattattatattgttttataaatggaggtacaggatatcacctgaattattaatgaatgcccaggaagtaattttcttctcattcttctaaaactactgcctttcaaagtgcacacacacgcgtccacatacactgcattcgttgctccagtataaattacatgcatgagcacctttctggcttttaagccaatataatgggctgcaaaatgaagacaccagagtgtatgcatacaaatctcactgtattaaagatgcaggttttctaattgtacccttcttgtctctctggcaatcttgcccttaatatccctggagttcctcatcagtgtcattttctgttatacacagttccacaattttgtctctagttgacttcaaatgtgtaactttattggtcttgccctattataattgtcatgactttcagattgtatctgaactcacagactgctgtcttactaataggtctggaaggtcacgctgaatgagaagtaaattattttatgtaatacatttttgagtgtgtttttcagttgtatttccctgttatttcatcactatttccaatggtgagcttgcctgctcatgctccctggacagaatactccttccttttgcatgcctgtttctatcatgtgcttgataggcctcaaagctaatgcttccagtgaaacacacgcatcttaataataagggtaaataaacgctccatatgaaacta

SEQ ID NO: 174814 - DNA, 551 bp, Homo sapiens
  Payload ID: 14331
  Gene Symbol: RGS4
  Gene Name: regulator of G-protein signaling 4
  ENST ID: ENST00000528938
  CDS Start-End: 121-551
aaactgaagggtcagaattccagttgtggatgaaggaaatggtgttatgactgcctcaaggttttgtagcaagtcatagggaaccaagaggaatcttgttttcctcagagtgcaaaagatatgaaacatcggctaggtttcctgctgcaaaaatctgattcctgtgaacacaattcttcccacaacaagaaggacaaagtggttatttgccagagagtgagccaagaggaagtcaagaaatgggctgaatcactggaaaacctgattagtcatgaatgtgggctggcagctttcaaagctttcttgaagtctgaatatagtgaggagaatattgacttctggatcagctgtgaagagtacaagaaaatcaaatcaccatctaaactaagtcccaaggccaaaaagatctataatgaattcatctcagtccaggcaaccaaagaggtgaacctggattcttgcaccagggaagagacaagccggaacatgctagagcctacaataacctgctttgatgaggcccagaagaagattttcaacctgatggagaa

SEQ ID NO: 174815 - DNA, 817 bp, Homo sapiens
  Payload ID: 14331
  Gene Symbol: RGS4
  Gene Name: regulator of G-protein signaling 4
  Uniprot ID: P49798
  ENST ID: ENST00000527809
  CDS Start-End: 59-622
aagacgctcagaggattctgacaatatctttaccggagaagaggcaaatgcaaaagatatgaaacatcggctaggtttcctgctgcaaaaatctgattcctgtgaacacaattcttcccacaacaagaaggacaaagtggttatttgccagagagtgagccaagaggaagtcaagaaatgggctgaatcactggaaaacctgattagtcatgaatgtgggctggcagctttcaaagctttcttgaagtctgaatatagtgaggagaatattgacttctggatcagctgtgaagagtacaagaaaatcaaatcaccatctaaactaagtcccaaggccaaaaagatctataatgaattcatctcagtccaggcaaccaaagaggtgaacctggattcttgcaccagggaagagacaagccggaacatgctagagcctacaataacctgctttgatgaggcccagaagaagattttcaacctgatggagaaggattcctaccgccgcttcctcaagtctcgattctatcttgatttggtcaacccgtccagctgtggggcagaaaagcagaaaggagccaagagttcagcagactgtgcttccctggtccctcagtgtgcctaattctcacctgaaggcagagggatgaaatgccaagactctatgctctggaaaacctgaggccaaatattgatctgtattaagctccagtgctttatccacattgtagcctaatattcatgctgcctgccatgtgtgagtcacttctacgcataaactagatatagcttttggtgtttgagtgttcatcagggtggg

SEQ ID NO: 174816 - DNA, 544 bp, Homo sapiens
  Payload ID: 14331
  Gene Symbol: RGS4
  Gene Name: regulator of G-protein signaling 4
  ENST ID: ENST00000531057
  CDS Start-End: 125-466
aagacgctcagaggattctgacaatatctttaccggagaagaggcaaagtacgctcaaagccgaagccacagctcctcctgccgcatttctttcctgcttgcgaattccaagctgttaaataagatgtgcaaagggcttgcaggtctgccggcttcttgcttgaggagtgcaaaagatatgaaacatcggctaggtttcctgctgcaaaaatctgattcctgtgaacacaattcttcccacaacaagaaggacaaagtggttatttgccagagagtgagccaagaggaagtcaagaaatgggctgaatcactggaaaacctgattagtcatgaatgtgggctggcagctttcaaagctttcttgaagtctgaatatagtgaggagaatattgacttctggatcagctgtgaagagtacaagaaaatcaaatcaccatctaaactaagtcccaaggccaaatattgatctgtattaagctccagtgctttatccacattgtagcctaatattcatgctgcctgccatgtgtgagtcacttctacg

SEQ ID NO: 174817 - DNA, 5862 bp, Homo sapiens
  Payload ID: 14332
  Gene Symbol: RGS5
  Gene Name: regulator of G-protein signaling 5
  Uniprot ID: O15539
  ENST ID: ENST00000313961
  CDS Start-End: 279-824
gagtgttgtgataagagcagatgaaagccttatgccacagtagtgcctgtagcagagaaaggattccctcctccacctcagggcccactgctgctgctctccagcctgcagtttcctctaaggctctggattggctggaagagcaacagagggctgggaaagagcttctatatatacctcaggaggaaaggcatcccagacagttttgaagttttcaaagactggctctgctgttaagaagttgtacttaaagcggaggagctaagccacctgccaaaatgtgcaaaggacttgcagctttgccccactcatgcctggaaagggccaaggagattaagatcaagttgggaattctcctccagaagccagactcagttggtgaccttgtcattccgtacaatgagaagccagagaaaccagccaagacccagaaaacctcgctggacgaggccctgcagtggcgtgattccctggacaaactcctgcagaacaactatggacttgccagtttcaaaagtttcctgaagtctgaattcagtgaggaaaaccttgagttctggattgcctgtgaggattacaagaagatcaagtcccctgccaagatggctgagaaggcaaagcaaatttatgaagaattcattcaaacggaggctcctaaagaggtgaatattgaccacttcactaaggacatcacaatgaagaacctggtggaaccttccctgagcagctttgacatggcccagaaaagaatccatgccctgatggaaaaggattctctgcctcgctttgtgcgctctgagttttatcaggagttaatcaagtagtaatttagccaggctatgaaatcatcctgtgagttatttcctccataataaccctgcatttcccattaatctacatatcttcccacagcagctttgctcagtgatacccacatgggaaaaatcccaggggatgttgcttactctttttgcccacactgctttggatacttatctactgtccgaaggccttctttccccactcaattcttcctgccctgttattaattaagatatcttcagcttgtagtcagacacaatcagaatcacagaaaaatcctgcctaaggcaaagaaatataagacaagactatgatatcaatgaatgtgggttaagtaatagatttccagctaaattggtctaaaaaagaatattaagtgtggacagacctatttcaaaggagcttaattgatctcacttgttttagttctgatccagggagatcacccctctaattatttctgaacttggttaataaaagtttataagatttttatgaagcagccactgtatgatattttaagcaaatatgttatttaaaatattgatccttcccttggaccaccttcatgttagttgggtattataaataagagatacaaccatgaatatattatgtttatacaaaatcaatctgaacacaattcataaagatttctcttttataccttcctcactggccccctccacctgcccatagtcaccaaattctgttttaaatcaatgacctaagatcaacaatgaagtattttataaatgtatttatgctgctagactgtgggtcaaatgtttccattttcaaattatttagaattcttatgagtttaaaatttgtaaatttctaaatccaatcatgtaaaatgaaactgttgctccattggagtagtctcccacctaaatatcaagatggctatatgctaaaaagagaaaatatggtcaagtctaaaatggctaattgtcctatgatgctattatcatagactaatgacatttatcttcaaaacaccaaattgtctttagaaaaattaatgtgattacaggtagaggccttctaggtgagacacttttaaggtacactgcattttgcaaaaaaaaaaaaaaaaagtaatcttttagcaaccccagtattccttcactatttcgcttcctgcattagcaaattttacttacagtcaaaagtgcagatttatactcctgacgtgtctcattcacagctaaataataggccataggacttttggtaggtttaaacttttaattctgtatttcatgattataagtcttgctagaattttttctaatctttagtagatttgattaaataatgattcacagaatttagtaacagaatcaaactaagccatgtatgagggtaatcgagatgaggatattaactcaaaagaaatagggtgatttttaaaggattaataaaattctgaaatgttaagtagaagattacattgtctagtcttgtatttcctccttctgttgctctctttcattcacacactctcagtttctcatatttgtagctcatttatttggttatttcctaagaatattgaaagtgaagcaactatgtgactgtattcttcaggtaaacactgactgcgcttgttggattttccctatttttgtgacttcaagaataatatgccctgctgaatacatgccatttcacattctgaaactgggtagagtggttgggtgttctgccaacaattgctagtggtgtgaattcattcatatttgccagtattgctcacttcaaagaaactccttcatcaagcagtccagagctaggccagatcaatgctacaatcatgaagttctcattgcatgcaattgtgtaggattgacaaggaactcagataaaaatttccagggtgcacttccagaaccagcttcaacatatgtctacattgcccccaagttaataaagtgccaaccctttactctctcatacagccagaaatgttagaaatccaaaatcttggtgcattattttttcataaacgctaaaacatttgaagaaacaatttaattatttaaaattcaagtattttattcacattatttgcaatatccaaatgtttaaaaattcccagataattaactagctattacagatctcacctagagggttgatgttatgaagactccagtggactgtactcacaaattgactggacaccctatgaaagtgggtagacctctcagcggaaaataagaagggcttttacctacagggcaggacagggtcccatgagagcagttctgtggagatataaaaagaatggaagaaggaatgccttatagtgatattgtgacattatatctatatatctacatatatctatctatctatatctacatctatataatcttacatttaaaattgtattcctacacatattagaaactcttctaataaatgaagtaaaaaaattaaaaagaatacaaatattccagccccaaatgagaaatcaaacatattaaaattgttcaagaaaatttctttgaacacttctgaaagtttttggaaacttagaaaagagggaaaaaaatccagtgttactagtaatttccatggtaatacagataaaatacattcttttaattctgggaaattagaaaaagtggggtgatctttccaggaaaaacatgtgtaacatctgcttatcactccagctccctcctcctcctcctctccacgttcccttgagtaaatgtctgggaaagcatgaagcttgatgcaagaaccctgttgtactggcgttttcctcccctgtgaaaacgtaactactgttgggagtgaattgaggatgtagaaaggtggtggaaccaaattgtggtcaatggaaataggagaatatggttctcactcttgagaaaaaaacctaagattagcccaggtagttgcctgtaacttcagtttttctgcctgggtttgatatagtttagggttggggttagattaagatctaaattacatcaggacaaagagacagactattaactccacagttaattaaggacgtatgttccatgtttatttgttaaagcagtgtgaatagccttcaagcatgtgaataatcttccatcttccccgccacacatacacacacacactttttgtttctttcaggtagacaccttttaaaatgcagaactaactgaggcatttcagtaactttgctttcaaatcaataaagtcaaatgtatggaaacattttgtgccctactctccataccccgtgtactcaaattctctactgtatgaattatgctttaagtagaattcagtgccaaggagaacttggtgaaataaattattttaattttttttttatcctttacaaagccatggattttatttggttgatgtgtgctctgtacacaagccatttcaataggatggagctgttaattattttccaaagagtaatagacatgcaaaagtttcaataaaaactgggccattaacaaataaattaataaactaataagcattcccttctaggtttttgccaaactgcctatccaataacaaatttgagaatcgttgtaaaagctagttatatttcagagaaatgattttcattattgaaactgttctccctagcaggccattttccctttttcctgggagtttagcaagtttaggagagaatagtcatgaaaagaaagggaagaaaggggagaagggaagaggttaaaaagtaagtgctcagacctatgaacgtaatccctttgctacaaatatttaagagcagctcagcttggttgaaactgagttttgtcatcttccatatttgcaggaaggtattttctgacttgcaatgcagctagatgtaaaattttattttatcatcctagaaagccttgactagaaaaatgaataaatattgagggtttcctgtccatatctggcttgcatgtgccagaaagcagagaatagaaaatgtaatctccaacatccaagcatcgaaacccaaggggtaggcaattctatgtaggttttggacatgaagtttggtgcatcttggtttatgctggctcaactgctattaaacctctctggcttatagtctcttcattctattagacaagcacgtatcgaacacttgcttcgcacaaggctctttagttaacaatttagcagctactgtttgtgttaaacacacttttcaccaaataggttctgaggcaaacgagagcaatgactatttaaagaaaggctttcccagcatcacttacacatcccaaaactaaaaagatcaactcttccaactgagaaaagactcctggctttgaatggaaacttacagcagagagtcacaggccacggcaacaacaacgacaacaacaaacatttggaatattattctcaactcacgttttaataatacatcttattatttttctagtagagaaactacaaatcagcctcttcaacatttatatacagtttaataagcctcttgcaagttacttgttctctcacctgaggtatttttttcctccccaccttgcccctgttcctcccttcctcttctccctttgcaagaggaaatatttaacatatttgggtccaacttcaataatgtaataattaatacattaaaagcatttaacttcctttctagaaaaatgcacaggctaaggcatagacaaaacaaagagaaatgctgagaaatttgccactggagacaagcaatctgaataaatatttgccaaaagttctttttatgtcatatagtgtcaggatttgaaggagctatttttttttaatgttgcaactagcaactcatcttcggaagacacagccaggagaatgaagtagaagtgaaaggtttataaatccatttgtaagcatttatcccatatattttaaattcaagaaaaattgtgtttatctttagaattttgtattcaatactttatgtactatgtgactcatgcttctggataaataaagcaccaaatatgtatctgtaaccacaatcacacatattatattaaatatatatctatataa

SEQ ID NO: 174818 - DNA, 934 bp, Homo sapiens
  Payload ID: 14332
  Gene Symbol: RGS5
  Gene Name: regulator of G-protein signaling 5
  ENST ID: ENST00000367903
  CDS Start-End: 43-648
agaagtgtctgacaaaacaaagaaacaaaacctcagtgaaaaatgtgcgcaagaaacatttcacaggatattctcatcttacagatgcacagtgctcattggcatatcaatggcaaatatgaggaaaagagtaacctgatgttctgggccaaggagattaagatcaagttgggaattctcctccagaagccagactcagttggtgaccttgtcattccgtacaatgagaagccagagaaaccagccaagacccagaaaacctcgctggacgaggccctgcagtggcgtgattccctggacaaactcctgcagaacaactatggacttgccagtttcaaaagtttcctgaagtctgaattcagtgaggaaaaccttgagttctggattgcctgtgaggattacaagaagatcaagtcccctgccaagatggctgagaaggcaaagcaaatttatgaagaattcattcaaacggaggctcctaaagaggtgaatattgaccacttcactaaggacatcacaatgaagaacctggtggaaccttccctgagcagctttgacatggcccagaaaagaatccatgccctgatggaaaaggattctctgcctcgctttgtgcgctctgagttttatcaggagttaatcaagtagtaatttagccaggctatgaaatcatcctgtgagttatttcctccataataaccctgcatttcccattaatctacatatcttcccacagcagctttgctcagtgatacccacatgggaaaaatcccaggggatgttgcttactctttttgcccacactgctttggatacttatctactgtccgaaggccttctttccccactcaattcttcctgccctgttattaattaagatatcttcagcttgtagtcagacacaatcagaatcacagaaaaatcctgcctaagg

SEQ ID NO: 174819 - DNA, 373 bp, Homo sapiens
  Payload ID: 14332
  Gene Symbol: RGS5
  Gene Name: regulator of G-protein signaling 5
  Uniprot ID: O15539
  ENST ID: ENST00000527988
  CDS Start-End: 152-373
atgtgcaaaggacttgcagctttgccccactcatgcctggaaagatggacttgccagtttcaaaagtttcctgaagtctgaattcagtgaggaaaaccttgagttctggattgcctgtgaggattacaagaagatcaagtcccctgccaagatggctgagaaggcaaagcaaatttatgaagaattcattcaaacggaggctcctaaagaggtgaatattgaccacttcactaaggacatcacaatgaagaacctggtggaaccttccctgagcagctttgacatggcccagaaaagaatccatgccctgatggaaaaggattctctgcctcgctttgtgcgctctgagttttatcaggagttaatcaagtag

SEQ ID NO: 174820 - DNA, 851 bp, Homo sapiens
  Payload ID: 14332
  Gene Symbol: RGS5
  Gene Name: regulator of G-protein signaling 5
  Uniprot ID: O15539
  ENST ID: ENST00000530507
  CDS Start-End: 69-626
gttttcaaagactggctctgctgttaagaagttgtacttaaagcggaggagctaagccacctgccaaaatgtgcaaaggacttgcagctttgccccactcatgcctggaaagggccaaggagattaagatcaagttgggaattctcctccagaagccagactcagttggtgaccttgtcattccgtacaatgagaagccagagaaaccagccaagacccagaaaacctcgctggacgaggccctgcagtggcgtgattccctggacaaactcctgcagaacaactatggacttgccagtttcaaaagtttcctgaagtctgaattcagtgaggaaaaccttgagttctggattgcctgtgaggattacaagaagatcaagtcccctgccaagatggctgagaaggcaaagcaaatttatgaagaattcattcaaacggaggctcctaaagaggttggtctctgggtgaatattgaccacttcactaaggacatcacaatgaagaacctggtggaaccttccctgagcagctttgacatggcccagaaaagaatccatgccctgatggaaaaggattctctgcctcgctttgtgcgctctgagttttatcaggagttaatcaagtagtaatttagccaggctatgaaatcatcctgtgagttatttcctccataataaccctgcatttcccattaatctacatatcttcccacagcagctttgctcagtgatacccacatgggaaaaatcccaggggatgttgcttactctttttgcccacactgctttggatacttatctactgtccgaaggccttctttccccactcaattcttcctgccctgttattaa

SEQ ID NO: 174821 - DNA, 278 bp, Homo sapiens
  Payload ID: 14332
  Gene Symbol: RGS5
  Gene Name: regulator of G-protein signaling 5
  ENST ID: ENST00000531476
  CDS Start-End: 64-278
caaagactggctctgctgttaagaagttgtacttaaagcggaggagctaagccacctgccaaaatgtgcaaaggacttgcagctttgccccactcatgcctggaaagaacctcgctggacgaggccctgcagtggcgtgattccctggacaaactcctgcagaacaactatggacttgccagtttcaaaagtttcctgaagtctgaattcagtgaggaaaaccttgagttctggattgcctgtgaggattacaagaagatcaagtcccctgccaagat

SEQ ID NO: 174822 - DNA, 5812 bp, Homo sapiens
  Payload ID: 14332
  Gene Symbol: RGS5
  Gene Name: regulator of G-protein signaling 5
  Uniprot ID: O15539
  ENST ID: ENST00000618415
  CDS Start-End: 548-769
caggaagtgggagcaccgcggtttcggggaagagaccggggttgagcgtctagcccatctctgcgtgacttccgccagcgtttagagcgttttcggggtccgagttgaagagcaaaaccaagtgaaggaaacttcactaagttcagggtgacaagggaggaagtacagagaaacagagcgcttaaaaagcactgtctggatatcttcagagggaaaaaggagaaagttaactgaattggtgacacttcgggtctctcacagaggaagggccaaggagattaagatcaagttgggaattctcctccagaagccagactcagttggtgaccttgtcattccgtacaatgagaagccagagaaaccagccaagacccagaaaacctcgctggacgaggccctgcagtggcgtgattccctggacaaactcctgcagaacaactatggacttgccagtttcaaaagtttcctgaagtctgaattcagtgaggaaaaccttgagttctggattgcctgtgaggattacaagaagatcaagtcccctgccaagatggctgagaaggcaaagcaaatttatgaagaattcattcaaacggaggctcctaaagaggtgaatattgaccacttcactaaggacatcacaatgaagaacctggtggaaccttccctgagcagctttgacatggcccagaaaagaatccatgccctgatggaaaaggattctctgcctcgctttgtgcgctctgagttttatcaggagttaatcaagtagtaatttagccaggctatgaaatcatcctgtgagttatttcctccataataaccctgcatttcccattaatctacatatcttcccacagcagctttgctcagtgatacccacatgggaaaaatcccaggggatgttgcttactctttttgcccacactgctttggatacttatctactgtccgaaggccttctttccccactcaattcttcctgccctgttattaattaagatatcttcagcttgtagtcagacacaatcagaatcacagaaaaatcctgcctaaggcaaagaaatataagacaagactatgatatcaatgaatgtgggttaagtaatagatttccagctaaattggtctaaaaaagaatattaagtgtggacagacctatttcaaaggagcttaattgatctcacttgttttagttctgatccagggagatcacccctctaattatttctgaacttggttaataaaagtttataagatttttatgaagcagccactgtatgatattttaagcaaatatgttatttaaaatattgatccttcccttggaccaccttcatgttagttgggtattataaataagagatacaaccatgaatatattatgtttatacaaaatcaatctgaacacaattcataaagatttctcttttataccttcctcactggccccctccacctgcccatagtcaccaaattctgttttaaatcaatgacctaagatcaacaatgaagtattttataaatgtatttatgctgctagactgtgggtcaaatgtttccattttcaaattatttagaattcttatgagtttaaaatttgtaaatttctaaatccaatcatgtaaaatgaaactgttgctccattggagtagtctcccacctaaatatcaagatggctatatgctaaaaagagaaaatatggtcaagtctaaaatggctaattgtcctatgatgctattatcatagactaatgacatttatcttcaaaacaccaaattgtctttagaaaaattaatgtgattacaggtagaggccttctaggtgagacacttttaaggtacactgcattttgcaaaaaaaaaaaaaaaaagtaatcttttagcaaccccagtattccttcactatttcgcttcctgcattagcaaattttacttacagtcaaaagtgcagatttatactcctgacgtgtctcattcacagctaaataataggccataggacttttggtaggtttaaacttttaattctgtatttcatgattataagtcttgctagaattttttctaatctttagtagatttgattaaataatgattcacagaatttagtaacagaatcaaactaagccatgtatgagggtaatcgagatgaggatattaactcaaaagaaatagggtgatttttaaaggattaataaaattctgaaatgttaagtagaagattacattgtctagtcttgtatttcctccttctgttgctctctttcattcacacactctcagtttctcatatttgtagctcatttatttggttatttcctaagaatattgaaagtgaagcaactatgtgactgtattcttcaggtaaacactgactgcgcttgttggattttccctatttttgtgacttcaagaataatatgccctgctgaatacatgccatttcacattctgaaactgggtagagtggttgggtgttctgccaacaattgctagtggtgtgaattcattcatatttgccagtattgctcacttcaaagaaactccttcatcaagcagtccagagctaggccagatcaatgctacaatcatgaagttctcattgcatgcaattgtgtaggattgacaaggaactcagataaaaatttccagggtgcacttccagaaccagcttcaacatatgtctacattgcccccaagttaataaagtgccaaccctttactctctcatacagccagaaatgttagaaatccaaaatcttggtgcattattttttcataaacgctaaaacatttgaagaaacaatttaattatttaaaattcaagtattttattcacattatttgcaatatccaaatgtttaaaaattcccagataattaactagctattacagatctcacctagagggttgatgttatgaagactccagtggactgtactcacaaattgactggacaccctatgaaagtgggtagacctctcagcggaaaataagaagggcttttacctacagggcaggacagggtcccatgagagcagttctgtggagatataaaaagaatggaagaaggaatgccttatagtgatattgtgacattatatctatatatctacatatatctatctatctatatctacatctatataatcttacatttaaaattgtattcctacacatattagaaactcttctaataaatgaagtaaaaaaattaaaaagaatacaaatattccagccccaaatgagaaatcaaacatattaaaattgttcaagaaaatttctttgaacacttctgaaagtttttggaaacttagaaaagagggaaaaaaatccagtgttactagtaatttccatggtaatacagataaaatacattcttttaattctgggaaattagaaaaagtggggtgatctttccaggaaaaacatgtgtaacatctgcttatcactccagctccctcctcctcctcctctccacgttcccttgagtaaatgtctgggaaagcatgaagcttgatgcaagaaccctgttgtactggcgttttcctcccctgtgaaaacgtaactactgttgggagtgaattgaggatgtagaaaggtggtggaaccaaattgtggtcaatggaaataggagaatatggttctcactcttgagaaaaaaacctaagattagcccaggtagttgcctgtaacttcagtttttctgcctgggtttgatatagtttagggttggggttagattaagatctaaattacatcaggacaaagagacagactattaactccacagttaattaaggacgtatgttccatgtttatttgttaaagcagtgtgaatagccttcaagcatgtgaataatcttccatcttccccgccacacatacacacacacactttttgtttctttcaggtagacaccttttaaaatgcagaactaactgaggcatttcagtaactttgctttcaaatcaataaagtcaaatgtatggaaacattttgtgccctactctccataccccgtgtactcaaattctctactgtatgaattatgctttaagtagaattcagtgccaaggagaacttggtgaaataaattattttaattttttttttatcctttacaaagccatggattttatttggttgatgtgtgctctgtacacaagccatttcaataggatggagctgttaattattttccaaagagtaatagacatgcaaaagtttcaataaaaactgggccattaacaaataaattaataaactaataagcattcccttctaggtttttgccaaactgcctatccaataacaaatttgagaatcgttgtaaaagctagttatatttcagagaaatgattttcattattgaaactgttctccctagcaggccattttccctttttcctgggagtttagcaagtttaggagagaatagtcatgaaaagaaagggaagaaaggggagaagggaagaggttaaaaagtaagtgctcagacctatgaacgtaatccctttgctacaaatatttaagagcagctcagcttggttgaaactgagttttgtcatcttccatatttgcaggaaggtattttctgacttgcaatgcagctagatgtaaaattttattttatcatcctagaaagccttgactagaaaaatgaataaatattgagggtttcctgtccatatctggcttgcatgtgccagaaagcagagaatagaaaatgtaatctccaacatccaagcatcgaaacccaaggggtaggcaattctatgtaggttttggacatgaagtttggtgcatcttggtttatgctggctcaactgctattaaacctctctggcttatagtctcttcattctattagacaagcacgtatcgaacacttgcttcgcacaaggctctttagttaacaatttagcagctactgtttgtgttaaacacacttttcaccaaataggttctgaggcaaacgagagcaatgactatttaaagaaaggctttcccagcatcacttacacatcccaaaactaaaaagatcaactcttccaactgagaaaagactcctggctttgaatggaaacttacagcagagagtcacaggccacggcaacaacaacgacaacaacaaacatttggaatattattctcaactcacgttttaataatacatcttattatttttctagtagagaaactacaaatcagcctcttcaacatttatatacagtttaataagcctcttgcaagttacttgttctctcacctgaggtatttttttcctccccaccttgcccctgttcctcccttcctcttctccctttgcaagaggaaatatttaacatatttgggtccaacttcaataatgtaataattaatacattaaaagcatttaacttcctttctagaaaaatgcacaggctaaggcatagacaaaacaaagagaaatgctgagaaatttgccactggagacaagcaatctgaataaatatttgccaaaagttctttttatgtcatatagtgtcaggatttgaaggagctatttttttttaatgttgcaactagcaactcatcttcggaagacacagccaggagaatgaagtagaagtgaaaggtttataaatccatttgtaagcatttatcccatatattttaaattcaagaaaaattgtgtttatctttagaattttgtattcaatactttatgtactatgtgactcatgcttctggataaataaagcaccaaatatgtatctgtaaccacaatcacacatattatattaaatatatatctatataacagcc

SEQ ID NO: 174823 - DNA, 5342 bp, Homo sapiens
  Payload ID: 14333
  Gene Symbol: RGS6
  Gene Name: regulator of G-protein signaling 6
  ENST ID: ENST00000343854
  CDS Start-End: 24-1280
agattgaagacatcattacaaagatgcaagatgacaagacagggggtgtgcccatcagaacagtcaagagctttctctccaaaatccccagtgtcgtcacaggtactgacattgtgcagtggcttatgaagaacctttccattgaggacccagttgaagcaatacacttggggagccttatcgctgcccagggctacatctttccaatctcagaccatgttctcaccatgaaggatgatggcaccttttatcgtttccaggctccgtacttctggccttcgaactgctgggaacctgaaaacactgactatgccatctatctctgtaagaggacaatgcaaaataaagcaaggctggaactggcagattatgaagcagaaaacttagcaagactccagagggcctttgcgaggaagtgggaattcatctttatgcaagcagaagcacaagtaaagattgaccggaaaaaagacaagacagaaaggaaaattttggatagtcaagaacgagccttttgggatgtccacaggcctgtgccaggctgtgtgaacacaacagaaatggatatccgaaaatgtcgacgtttgaagaatccacaaaaggttaaaaagtccgtgtatggcgtgactgaagagtcccaggcacagagcccggtgcatgtactcagccaaccaatcaggaaaacaacaaaagaggacatccggaaacagataacatttttgaacgcacagatcgacagacattgtttgaaaatgtccaaagtggctgaaagcaaagagcccagccaacagcgagtaaaaagatggggcttctctttcgatgagatattgaaggaccaggtggggcgggaccagtttctacgattcctggagtccgaattcagttcagaaaacctcaggttctggctggctgtccaagatcttaagaaacaacccctacaggatgtggccaagagggtagaagaaatctggcaagagtttctggctccaggggctccaagtgcaatcaacctggattctcacagctatgagataaccagtcaaaatgtcaaagatggagggagatatacatttgaagacgcccaggagcacatctacaagctgatgaagagtgacagctatgcccgcttcctccggtcaaatgcttaccaggatttgctgctggccaagaagaagccagaaagtgagcaaggtcgtagaacttccctagaaaagttcactcgcagtgtgggaaagtcgctggcgggcaagcgcctcacgggcctgatgcagtcctcctgaccgttcctaccgcaggtccagggcctgggcccgcggaccccacaggcaggcggcggcgctccacatctgcggacagagtttccttacgaggagacttggtcactgtgaaggagaaagagtgagggcaatgaagggcgatggtggggagactcggtgggtgaatggggagaccagaaagaaagagtccacagagcctgggctgggcccggtggaggctcctgtttacagccctctcttctttgtacagttgtattccaacactccactcgctaagaggccctgatcccagctcattcaggggagaacacgtcgtggggttcctgtcacgactatcacttgagattatattattatcctcactccctcgctgtctggagacggtcacaccttctggcaaattcaagaggcatgagtggaccgagagcacatccagcatttgcatcacctccctggcacctcccatagttacagccactacatccccaccgccgcctgtcatccctcacgtctctgtggccacccgggtgtcactgccagcaccaggcactgctttcacgtaaaatgtccaaatcacatcttcagcaagaaagcaacctcacggattgccccgcctcaaggtctttccaccctctttgagatcagcgttcggagaggtccccgccagcccggtggctgccctcaggtcccgtcacatgtctcaagggtccagcgttcgaggaagcactgttgtagatgacagagctttttgtttcacagctgcggggattctgctgaccatcttttagaaaattatttcataatttattctggctttgcccccttgctccttggtttattccctcatgttttactcaaaataaacatggccatgaactcaggggccattgggattctcccctctggcagccccaggtgggagctgggagggtccccagcccaggaggtggctggattgcagggctggcagcccccacgtggtggcatcctgacaggcacagtgagacccttgctgggtcaggtctcctttgtgtgtgaagctggggcagagtatgctacgaagggaccaggccaggccacagggctctcctcccagtctttatctgaaggcccagccaaagcacccctctaaaccggtcacctaggggaaatgcaaaaacctgcaaaagatccacctgtattccctgtgtgtgtgtgtcaaaatgaccatttgccaacctggctgtgaggtaatgtatgtaaagcaccgagtcaggtgcctgatacgcagtaggtgcttagcaaacggtagctaatactatcatcattgtcattgttattgtgacacccatgagcccacagacagagctgtattaagtaacctgttttgaatccagacattcactcccccacttgctatgactaccctcctttgatctatttttggtcataggtaaaaaaaaaaatctctcttgggagcatataaacaaaaaacatagaagcaataaagcgatcgctggtatttcttttctcatgcagccaaattcgccagctggtgaccaaaggctcagatgcttgcttatttgcagacccggcctcctgggtgctccccagtgacccatctttccaccccaccacctccaagtcctgtctatgtctgcttccacacagccctgtccccagggcaccagccttctgtccctcacagcagtgccatcgcgggcattaggagtcttcgttatgttgtatccttgtgagttcttgactaccatgcccaagtttcccccactggcaatggttcctctcttggaggtacagtggaaaccagagagatgacagatgttgagtcctcagtgtctcagaggcagcaattcttgctggacacctgcacatgctcagcacagaggctggtactttggaggcactaaccacttgatgagtaaatcaatggcataaagccccattccaagttatggggtcttttgacaggcccctttcatcctctttctctttgtataaacctcatgtttcagaacaaaattacagtctaagttcatttgcccccagccttgcccaaggatccccgggctgtgctgacccctaggcatagggcaaagggtgttcccaagcagcaggcacctcagtgccctcagttatccagggcaaggggcctggctgccccctgctcctccccatgatgcaggggctttctaagccaggctgcagacagggcagggttggcttcttggccattccctctgtgcccccttctccttctgactggtctcaccctggagatccccagaggatctgaccagagccaggtggactgtggccctgagatggagctggctgcaggcttacaagcacctctggggacatccagaggggagggtcagtaagcacaacggagctagggagacttcagatggactcaaacccagagcaataatactctcacaccaccccacagctaaggcactcatgttccccagtagatcaagccagaagctttgcaagaagggagtggaacgaggctgcctatccaaggtccatctaccacgcagaacttggtcatgcaagtacatttggaaaatctggtcttggcccgtcccccattggcctggtctacacagccaaaaattcagactagattagatgtttgcaggcaattctgtagcaaagcaaattcccctaccccgtcccttccccctagaagctgccttagcctccctgactgggtgtggtctctgggcctaggactcctccctatgaggaaaagtgctctccagccacatcttggcagccccacaaccacagcatcagggcagctgcagcaagtgaccacccacccgtcgggttagacacacaaggcaccaggcactggcatctgactaaaataacctttccctacatgggaagaggaaagcttgtaggctggcacatataaacgtccagccgcagccagatggcctgaactaagcagcaggaactctctgggctggggaggagcctcctgcccttctagaaagtgatgcgtcagctttgttctcctgggaaggtgttgctataccccaggaacaaagcagggcccaactgccagtgcagtcagctgggcctgcgctccaggctcaccaccgctaagtggtcaggtaccgggccagcatcctgggagggacctcttgcgactctgagttgcagcttggactagctgaacacatggggacatgctccaggggcttcttccctggcaggattcctgggatttcaaactacctcaccaacaggacgctgaaccaggagcctgccacccaactggcccccttggtgattgtggaaggtgatgtttttcctaaaatgcatccctcctgttctgctccatatacatgtgcttcaaaaaccaccaccaggaaagccttcccagaagagggaaaggattaagggctctcttcctttgggccctgcagaatgtattggagggaggtgttgctgcaaggtccaggagctgggaaactctgggctcggggggagataatgcaccaccagcctcaaaaaggagctgcccaagttgaatatgtagcaaagaccatgggataagttgaatagtggccagacgaatcactaataactcaccatgggaccctctgaagagaggcctgtgctcgtgtaaccatagcaacagcagatgccagcaacctactcattagtaccacccagtgataaggcatcccctgggctagacccaggggccataaagtagcaaagtagcaaatgtagcaataaagggcccgggtctatacggggacagggtccaaatgaccaggacttggccctctccccagccccgatgagggctcagagccagctgctgtcagctgtctggggagggaaggccctgctccataccaggggtccctgttctatactctaagcccactcaccgcatgatcacggactcatcggaatggcctcctcttagtgcatgtggttctctttagtttatttttctggaatttggggattggaccccagaaccaaacatgctggtacagtctaaaaataaatgacttgaacccacttcaatcc

SEQ ID NO: 174824 - DNA, 1564 bp, Homo sapiens
  Payload ID: 14333
  Gene Symbol: RGS6
  Gene Name: regulator of G-protein signaling 6
  Uniprot ID: P49758
  ENST ID: ENST00000355512
  CDS Start-End: 1-1383
atggctcaaggatccggggatcaaagagcagtgggggttgctgacccagaggagagttctccaaacatgatcgtttactgcaaaattgaagacatcattacaaagatgcaagatgacaagacagggggtgtgcccatcagaacagtcaagagctttctctccaaaatccccagtgtcgtcacaggtactgacattgtgcagtggcttatgaagaacctttccattgaggacccagttgaagcaatacacttggggagccttatcgctgcccagggctacatctttccaatctcagaccatgttctcaccatgaaggatgatggcaccttttatcgtttccaggctccgtacttctggccttcgaactgctgggaacctgaaaacactgactatgccatctatctctgtaagaggacaatgcaaaataaagcaaggctggaactggcagattatgaagcagaaaacttagcaagactccagagggcctttgcgaggaagtgggaattcatctttatgcaagcagaagcacaagtaaagattgaccggaaaaaagacaagacagaaaggaaaattttggatagtcaagaacgagccttttgggatgtccacaggcctgtgccaggctgtgtgaacacaacagaaatggatatccgaaaatgtcgacgtttgaagaatccacaaaaggttaaaaagtccgtgtatggcgtgactgaagagtcccaggcacagagcccggtgcatgtactcagccaaccaatcaggaaaacaacaaaagaggacatccggaaacagataacatttttgaacgcacagatcgacagacattgtttgaaaatgtccaaagtggctgaaagtttaattgcctacacggaacaatatgtggaatatgaccctttgataacaccagctgagccatccaacccttggatcagcgatgacgttgctttgtgggacatagagatgagcaaagagcccagccaacagcgagtaaaaagatggggcttctctttcgatgagatattgaaggaccaggtggggcgggaccagtttctacgattcctggagtccgaattcagttcagaaaacctcaggttctggctggctgtccaagatcttaagaaacaacccctacaggatgtggccaagagggtagaagaaatctggcaagagtttctggctccaggggctccaagtgcaatcaacctggattctcacagctatgagataaccagtcaaaatgtcaaagatggagggagatatacatttgaagacgcccaggagcacatctacaagctgatgaagagtgacagctatgcccgcttcctccggtcaaatgcttaccaggatttgctgctggccaagaagaaggtgtggctactgtgatgggcagtgtggagcctggcctcctgtcgattcccctgctggaggatgccaatggaggggctcctttggaggaggccgacaccctcatacatggctctaatgcccattttttctaagaactagaggaaagaaaaattataggaacttttgataactccagcccagatctcatggatgaagg

SEQ ID NO: 174825 - DNA, 5400 bp, Homo sapiens
  Payload ID: 14333
  Gene Symbol: RGS6
  Gene Name: regulator of G-protein signaling 6
  ENST ID: ENST00000402788
  CDS Start-End: 25-1338
cagattgaagacatcattacaaagatgcaagatgacaagacagggggtgtgcccatcagaacagtcaagagctttctctccaaaatccccagtgtcgtcacaggtactgacattgtgcagtggcttatgaagaacctttccattgaggacccagttgaagcaatacacttggggagccttatcgctgcccagggctacatctttccaatctcagaccatgttctcaccatgaaggatgatggcaccttttatcgtttccaggctccgtacttctggccttcgaactgctgggaacctgaaaacactgactatgccatctatctctgtaagaggacaatgcaaaataaagcaaggctggaactggcagattatgaagcagaaaacttagcaagactccagagggcctttgcgaggaagtgggaattcatctttatgcaagcagaagcacaagtaaagattgaccggaaaaaagacaagacagaaaggaaaattttggatagtcaagaacgagccttttgggatgtccacaggcctgtgccaggctgtgtgaacacaacagaaatggatatccgaaaatgtcgacgtttgaagaatccacaaaaggttaaaaagtccgtgtatggcgtgactgaagagtcccaggcacagagcccggtgcatgtactcagccaaccaatcaggaaaacaacaaaagaggacatccggaaacagataacatttttgaacgcacagatcgacagacattgtttgaaaatgtccaaagtggctgaaagtttaattgcctacacggaacaatatgtggaatatgaccctttgataacaccagctgagccatccaacccttggatcagcgatgacgttgctttgtgggacatagagatgagcaaagagcccagccaacagcgagtaaaaagatggggcttctctttcgatgagatattgaaggaccaggtggggcgggaccagtttctacgattcctggagtccgaattcagttcagaaaacctcaggttctggctggctgtccaagatcttaagaaacaacccctacaggatgtggccaagagggtagaagaaatctggcaagagtttctggctccaggggctccaagtgcaatcaacctggattctcacagctatgagataaccagtcaaaatgtcaaagatggagggagatatacatttgaagacgcccaggagcacatctacaagctgatgaagagtgacagctatgcccgcttcctccggtcaaatgcttaccaggatttgctgctggccaagaagaagggaaagtcgctggcgggcaagcgcctcacgggcctgatgcagtcctcctgaccgttcctaccgcaggtccagggcctgggcccgcggaccccacaggcaggcggcggcgctccacatctgcggacagagtttccttacgaggagacttggtcactgtgaaggagaaagagtgagggcaatgaagggcgatggtggggagactcggtgggtgaatggggagaccagaaagaaagagtccacagagcctgggctgggcccggtggaggctcctgtttacagccctctcttctttgtacagttgtattccaacactccactcgctaagaggccctgatcccagctcattcaggggagaacacgtcgtggggttcctgtcacgactatcacttgagattatattattatcctcactccctcgctgtctggagacggtcacaccttctggcaaattcaagaggcatgagtggaccgagagcacatccagcatttgcatcacctccctggcacctcccatagttacagccactacatccccaccgccgcctgtcatccctcacgtctctgtggccacccgggtgtcactgccagcaccaggcactgctttcacgtaaaatgtccaaatcacatcttcagcaagaaagcaacctcacggattgccccgcctcaaggtctttccaccctctttgagatcagcgttcggagaggtccccgccagcccggtggctgccctcaggtcccgtcacatgtctcaagggtccagcgttcgaggaagcactgttgtagatgacagagctttttgtttcacagctgcggggattctgctgaccatcttttagaaaattatttcataatttattctggctttgcccccttgctccttggtttattccctcatgttttactcaaaataaacatggccatgaactcaggggccattgggattctcccctctggcagccccaggtgggagctgggagggtccccagcccaggaggtggctggattgcagggctggcagcccccacgtggtggcatcctgacaggcacagtgagacccttgctgggtcaggtctcctttgtgtgtgaagctggggcagagtatgctacgaagggaccaggccaggccacagggctctcctcccagtctttatctgaaggcccagccaaagcacccctctaaaccggtcacctaggggaaatgcaaaaacctgcaaaagatccacctgtattccctgtgtgtgtgtgtcaaaatgaccatttgccaacctggctgtgaggtaatgtatgtaaagcaccgagtcaggtgcctgatacgcagtaggtgcttagcaaacggtagctaatactatcatcattgtcattgttattgtgacacccatgagcccacagacagagctgtattaagtaacctgttttgaatccagacattcactcccccacttgctatgactaccctcctttgatctatttttggtcataggtaaaaaaaaaaatctctcttgggagcatataaacaaaaaacatagaagcaataaagcgatcgctggtatttcttttctcatgcagccaaattcgccagctggtgaccaaaggctcagatgcttgcttatttgcagacccggcctcctgggtgctccccagtgacccatctttccaccccaccacctccaagtcctgtctatgtctgcttccacacagccctgtccccagggcaccagccttctgtccctcacagcagtgccatcgcgggcattaggagtcttcgttatgttgtatccttgtgagttcttgactaccatgcccaagtttcccccactggcaatggttcctctcttggaggtacagtggaaaccagagagatgacagatgttgagtcctcagtgtctcagaggcagcaattcttgctggacacctgcacatgctcagcacagaggctggtactttggaggcactaaccacttgatgagtaaatcaatggcataaagccccattccaagttatggggtcttttgacaggcccctttcatcctctttctctttgtataaacctcatgtttcagaacaaaattacagtctaagttcatttgcccccagccttgcccaaggatccccgggctgtgctgacccctaggcatagggcaaagggtgttcccaagcagcaggcacctcagtgccctcagttatccagggcaaggggcctggctgccccctgctcctccccatgatgcaggggctttctaagccaggctgcagacagggcagggttggcttcttggccattccctctgtgcccccttctccttctgactggtctcaccctggagatccccagaggatctgaccagagccaggtggactgtggccctgagatggagctggctgcaggcttacaagcacctctggggacatccagaggggagggtcagtaagcacaacggagctagggagacttcagatggactcaaacccagagcaataatactctcacaccaccccacagctaaggcactcatgttccccagtagatcaagccagaagctttgcaagaagggagtggaacgaggctgcctatccaaggtccatctaccacgcagaacttggtcatgcaagtacatttggaaaatctggtcttggcccgtcccccattggcctggtctacacagccaaaaattcagactagattagatgtttgcaggcaattctgtagcaaagcaaattcccctaccccgtcccttccccctagaagctgccttagcctccctgactgggtgtggtctctgggcctaggactcctccctatgaggaaaagtgctctccagccacatcttggcagccccacaaccacagcatcagggcagctgcagcaagtgaccacccacccgtcgggttagacacacaaggcaccaggcactggcatctgactaaaataacctttccctacatgggaagaggaaagcttgtaggctggcacatataaacgtccagccgcagccagatggcctgaactaagcagcaggaactctctgggctggggaggagcctcctgcccttctagaaagtgatgcgtcagctttgttctcctgggaaggtgttgctataccccaggaacaaagcagggcccaactgccagtgcagtcagctgggcctgcgctccaggctcaccaccgctaagtggtcaggtaccgggccagcatcctgggagggacctcttgcgactctgagttgcagcttggactagctgaacacatggggacatgctccaggggcttcttccctggcaggattcctgggatttcaaactacctcaccaacaggacgctgaaccaggagcctgccacccaactggcccccttggtgattgtggaaggtgatgtttttcctaaaatgcatccctcctgttctgctccatatacatgtgcttcaaaaaccaccaccaggaaagccttcccagaagagggaaaggattaagggctctcttcctttgggccctgcagaatgtattggagggaggtgttgctgcaaggtccaggagctgggaaactctgggctcggggggagataatgcaccaccagcctcaaaaaggagctgcccaagttgaatatgtagcaaagaccatgggataagttgaatagtggccagacgaatcactaataactcaccatgggaccctctgaagagaggcctgtgctcgtgtaaccatagcaacagcagatgccagcaacctactcattagtaccacccagtgataaggcatcccctgggctagacccaggggccataaagtagcaaagtagcaaatgtagcaataaagggcccgggtctatacggggacagggtccaaatgaccaggacttggccctctccccagccccgatgagggctcagagccagctgctgtcagctgtctggggagggaaggccctgctccataccaggggtccctgttctatactctaagcccactcaccgcatgatcacggactcatcggaatggcctcctcttagtgcatgtggttctctttagtttatttttctggaatttggggattggaccccagaaccaaacatgctggtacagtctaaaaataaatgacttgaacccacttcaatcc

SEQ ID NO: 174826 - DNA, 1476 bp, Homo sapiens
  Payload ID: 14333
  Gene Symbol: RGS6
  Gene Name: regulator of G-protein signaling 6
  Uniprot ID: P49758
  ENST ID: ENST00000406236
  CDS Start-End: 1-1428
atggctcaaggatccggggatcaaagagcagtgggggttgctgacccagaggagagttctccaaacatgatcgtttactgcaaaattgaagacatcattacaaagatgcaagatgacaagacagggggtgtgcccatcagaacagtcaagagctttctctccaaaatccccagtgtcgtcacaggtactgacattgtgcagtggcttatgaagaacctttccattgaggacccagttgaagcaatacacttggggagccttatcgctgcccagggctacatctttccaatctcagaccatgttctcaccatgaaggatgatggcaccttttatcgtttccaggctccgtacttctggccttcgaactgctgggaacctgaaaacactgactatgccatctatctctgtaagaggacaatgcaaaataaagcaaggctggaactggcagattatgaagcagaaaacttagcaagactccagagggcctttgcgaggaagtgggaattcatctttatgcaagcagaagcacaagtaaagattgaccggaaaaaagacaagacagaaaggaaaattttggatagtcaagaacgagccttttgggatgtccacaggcctgtgccaggctgtgtgaacacaacagaaatggatatccgaaaatgtcgacgtttgaagaatccacaaaaggttaaaaagtccgtgtatggcgtgactgaagagtcccaggcacagagcccggtgcatgtactcagccaaccaatcaggaaaacaacaaaagaggacatccggaaacagataacatttttgaacgcacagatcgacagacattgtttgaaaatgtccaaagtggctgaaagtttaattgcctacacggaacaatatgtggaatatgaccctttgataacaccagctgagccatccaacccttggatcagcgatgacgttgctttgtgggacatagagatgagcaaagagcccagccaacagcgagtaaaaagatggggcttctctttcgatgagatattgaaggaccaggtggggcgggaccagtttctacgattcctggagtccgaattcagttcagaaaacctcaggttctggctggctgtccaagatcttaagaaacaacccctacaggatgtggccaagagggtagaagaaatctggcaagagtttctggctccaggggctccaagtgcaatcaacctggattctcacagctatgagataaccagtcaaaatgtcaaagatggagggagatatacatttgaagacgcccaggagcacatctacaagctgatgaagagtgacagctatgcccgcttcctccggtcaaatgcttaccaggatttgctgctggccaagaagaagccagaaagtgagcaaggtcgtagaacttccctagaaaagttcactcgcagtgtgggatgaaaatgcaaaaaagagcaagcggctccctctgcagaaggtgcacccttg

SEQ ID NO: 174827 - DNA, 1497 bp, Homo sapiens
  Payload ID: 14333
  Gene Symbol: RGS6
  Gene Name: regulator of G-protein signaling 6
  Uniprot ID: P49758
  ENST ID: ENST00000407322
  CDS Start-End: 1-1434
atggctcaaggatccggggatcaaagagcagtgggggttgctgacccagaggagagttctccaaacatgatcgtttactgcaaaattgaagacatcattacaaagatgcaagatgacaagacagggggtgtgcccatcagaacagtcaagagctttctctccaaaatccccagtgtcgtcacaggtactgacattgtgcagtggcttatgaagaacctttccattgaggacccagttgaagcaatacacttggggagccttatcgctgcccagggctacatctttccaatctcagaccatgttctcaccatgaaggatgatggcaccttttatcgtttccaggctccgtacttctggccttcgaactgctgggaacctgaaaacactgactatgccatctatctctgtaagaggacaatgcaaaataaagcaaggctggaactggcagattatgaagcagaaaacttagcaagactccagagggcctttgcgaggaagtgggaattcatctttatgcaagcagaagcacaagtaaagattgaccggaaaaaagacaagacagaaaggaaaattttggatagtcaagaacgagccttttgggatgtccacaggcctgtgccaggctgtgtgaacacaacagaaatggatatccgaaaatgtcgacgtttgaagaatccacaaaaggttaaaaagtccgtgtatggcgtgactgaagagtcccaggcacagagcccggtgcatgtactcagccaaccaatcaggaaaacaacaaaagaggacatccggaaacagataacatttttgaacgcacagatcgacagacattgtttgaaaatgtccaaagtggctgaaagtttaattgcctacacggaacaatatgtggaatatgaccctttgataacaccagctgagccatccaacccttggatcagcgatgacgttgctttgtgggacatagagatgagcaaagagcccagccaacagcgagtaaaaagatggggcttctctttcgatgagatattgaaggaccaggtggggcgggaccagtttctacgattcctggagtccgaattcagttcagaaaacctcaggttctggctggctgtccaagatcttaagaaacaacccctacaggatgtggccaagagggtagaagaaatctggcaagagtttctggctccaggggctccaagtgcaatcaacctggattctcacagctatgagataaccagtcaaaatgtcaaagatggagggagatatacatttgaagacgcccaggagcacatctacaagctgatgaagagtgacagctatgcccgcttcctccggtcaaatgcttaccaggatttgctgctggccaagaagaagccagaaagtgagcaaggtcgtagaacttccctagaaaagttcactcgcagtgtgcttctcttctagggatgaaaatgcaaaaaagagcaagcggctccctctgcagaaggtgcacccttgatcgcccag

SEQ ID NO: 174828 - DNA, 1497 bp, Homo sapiens
  Payload ID: 14333
  Gene Symbol: RGS6
  Gene Name: regulator of G-protein signaling 6
  Uniprot ID: P49758
  ENST ID: ENST00000404301
  CDS Start-End: 1-1443
atggctcaaggatccggggatcaaagagcagtgggggttgctgacccagaggagagttctccaaacatgatcgtttactgcaaaattgaagacatcattacaaagatgcaagatgacaagacagggggtgtgcccatcagaacagtcaagagctttctctccaaaatccccagtgtcgtcacaggtactgacattgtgcagtggcttatgaagaacctttccattgaggacccagttgaagcaatacacttggggagccttatcgctgcccagggctacatctttccaatctcagaccatgttctcaccatgaaggatgatggcaccttttatcgtttccaggctccgtacttctggccttcgaactgctgggaacctgaaaacactgactatgccatctatctctgtaagaggacaatgcaaaataaagcaaggctggaactggcagattatgaagcagaaaacttagcaagactccagagggcctttgcgaggaagtgggaattcatctttatgcaagcagaagcacaagtaaagattgaccggaaaaaagacaagacagaaaggaaaattttggatagtcaagaacgagccttttgggatgtccacaggcctgtgccaggctgtgtgaacacaacagaaatggatatccgaaaatgtcgacgtttgaagaatccacaaaaggttaaaaagtccgtgtatggcgtgactgaagagtcccaggcacagagcccggtgcatgtactcagccaaccaatcaggaaaacaacaaaagaggacatccggaaacagataacatttttgaacgcacagatcgacagacattgtttgaaaatgtccaaagtggctgaaagtttaattgcctacacggaacaatatgtggaatatgaccctttgataacaccagctgagccatccaacccttggatcagcgatgacgttgctttgtgggacatagagatgagcaaagagcccagccaacagcgagtaaaaagatggggcttctctttcgatgagatattgaaggaccaggtggggcgggaccagtttctacgattcctggagtccgaattcagttcagaaaacctcaggttctggctggctgtccaagatcttaagaaacaacccctacaggatgtggccaagagggtagaagaaatctggcaagagtttctggctccaggggctccaagtgcaatcaacctggattctcacagctatgagataaccagtcaaaatgtcaaagatggagggagatatacatttgaagacgcccaggagcacatctacaagctgatgaagagtgacagctatgcccgcttcctccggtcaaatgcttaccaggatttgctgctggccaagaagaagccagaaagtgagcaaggtcgtagaacttccctagaaaagttcactcgcagtgtgtgtctgcagcttctcttctagggatgaaaatgcaaaaaagagcaagcggctccctctgcagaaggtgcacccttg

SEQ ID NO: 174829 - DNA, 1828 bp, Homo sapiens
  Payload ID: 14333
  Gene Symbol: RGS6
  Gene Name: regulator of G-protein signaling 6
  ENST ID: ENST00000434263
  CDS Start-End: 32-1651
cgttgcaggtactgacattgtgcagtggcttatgaagaacctttccattgaggacccagttgaagcaatacacttggggagccttatcgctgcccagggctacatctttccaatctcagaccatgttctcaccatgaaggatgatggcaccttttatcgtttccaggctccgtacttctggccttcgaactgctgggaacctgaaaacactgactatgccatctatctctgtaagaggacaatgcaaaataaagcaaggctggaactggcagattatgaagcagaaaacttagcaagactccagagggcctttgcgaggaagtgggaattcatctttatgcaagcagaagcacaagtaaagattgaccggaaaaaagacaagacagaaaggaaaattttggatagtcaagaacgagccttttgggatgtccacaggcctgtgccaggctgtgtgaacacaacagaaatggatatccgaaaatgtcgacgtttgaagaatccacaaaaggttaaaaagtccgtgtatggcgtgactgaagagtcccaggcacagagcccggtgcatgtactcagccaaccaatcaggaaaacaacaaaagaggacatccggaaacagataacatttttgaacgcacagatcgacagacattgtttgaaaatgtccaaagtggctgaaagtttaattgcctacacggaacaatatgtggaatatgaccctttgataacaccagctgagccatccaacccttggatcagcgatgacgttgctttgtgggacatagagatgagcaaagagcccagccaacagcgagtaaaaagatggggcttctctttcgatgagatattgaaggaccaggtggggcgggaccagtttctacgattcctggagtccgaattcagttcagaaaacctcaggttctggctggctgtccaagatcttaagaaacaacccctacaggatgtggccaagagggtagaagaaatctggcaagagtttctggctccaggggctccaagtgcaatcaacctggattctcacagctatgagataaccagtcaaaatgtcaaagatggagggagatatacatttgaagacgcccaggagcacatctacaagctgatgaagagtgacagctatgcccgcttcctccggtcaaatgcttaccaggatttgctgctggccaagaagaagccagaaagtgagcaaggtcgtagaacttccctagaaaagttcactcgcagtgtgaatgtgcagaacacaaggcctgcgggtgcctggtctatcttcatggctgctttgccaatggccgtgtggctccgcacaccaagaagctgccacgggctgtcagagtcaaggcttctgggacttccttcactccatgatggcctgagagaaggacagagcctgcctcagtcctgtccggggagcagcagcaccgcagcagagggggccagagaaagagcatccaatggcaggagtctggcaaggcgacagcactgccaatgtcacggtcaaggagaggagacccaactctgcctgtggtccagactggaaagttcaaagagaagtcagagagcttcaagtctgaggacttcaaaggctaagaagaaaagacagactgtcaagcaaggaccgaaagcctggccttaacatcatagcacattacactgggaaatggagatggagcatccaagacaacacttaacccaaccttgtaatcttctgcagcaaaagtggtgggggaattctgatacgtgctctgtcctggttaatactagaaggttctgaggcatccataattctaaataattaaaggagtcaatcaat

SEQ ID NO: 174830 - DNA, 2111 bp, Homo sapiens
  Payload ID: 14333
  Gene Symbol: RGS6
  Gene Name: regulator of G-protein signaling 6
  Uniprot ID: P49758
  ENST ID: ENST00000554474
  CDS Start-End: 179-1576
gttaggcaagctggcgtgtggacttgtgtgggatgggtgcaggtctgcatataaatcatgttcctgggtttctgggtgtgaagcgcacaccgacggggacgagagcgcagaggatggcgcttttagatacttccagtcttccgatgttgtgatcgcagtgtgagtgaagacactcaggatggctcaaggatccggggatcaaagagcagtgggggttgctgacccagaggagagttctccaaacatgatcgtttactgcaaaattgaagacatcattacaaagatgcaagatgacaagacagggggtgtgcccatcagaacagtcaagagctttctctccaaaatccccagtgtcgtcacaggtactgacattgtgcagtggcttatgaagaacctttccattgaggacccagttgaagcaatacacttggggagccttatcgctgcccagggctacatctttccaatctcagaccatgttctcaccatgaaggatgatggcaccttttatcgtttccaggctccgtacttctggccttcgaactgctgggaacctgaaaacactgactatgccatctatctctgtaagaggacaatgcaaaataaagcaaggctggaactggcagattatgaagcagaaaacttagcaagactccagagggcctttgcgaggaagtgggaattcatctttatgcaagcagaagcacaagtaaagattgaccggaaaaaagacaagacagaaaggaaaattttggatagtcaagaacgagccttttgggatgtccacaggcctgtgccaggctgtgtgaacacaacagaaatggatatccgaaaatgtcgacgtttgaagaatccacaaaaggttaaaaagtccgtgtatggcgtgactgaagagtcccaggcacagagcccggtgcatgtactcagccaaccaatcaggaaaacaacaaaagaggacatccggaaacagataacatttttgaacgcacagatcgacagacattgtttgaaaatgtccaaagtggctgaaagtttaattgcctacacggaacaatatgtggaatatgaccctttgataacaccagctgagccatccaacccttggatcagcgatgacgttgctttgtgggacatagagatgagcaaagagcccagccaacagcgagtaaaaagatggggcttctctttcgatgagatattgaaggaccaggtggggcgggaccagtttctacgattcctggagtccgaattcagttcagaaaacctcaggttctggctggctgtccaagatcttaagaaacaacccctacaggatgtggccaagagggtagaagaaatctggcaagagtttctggctccaggggctccaagtgcaatcaacctggattctcacagctatgagataaccagtcaaaatgtcaaagatggagggagatatacatttgaagacgcccaggagcacatctacaagctgatgaagagtgacagctatgcccgcttcctccggtcaaatgcttaccaggatttgctgctggccaagaagaagaaagtgagcaaggtcgtagaacttccctagaaaagttcactcgcagtgtgtgctgctggcgcagagtcagaatggccgctgcatttcacccccgaggtggcttccttccagcagtggggaaagtcgctggcgggcaagcgcctcacgggcctgatgcagtcctcctgaccgttcctaccgcaggtccagggcctgggcccgcggaccccacaggcaggcggcggcgctccacatctgcggacagagtttccttacgaggagacttggtcactgtgaaggagaaagagtgagggcaatgaagggcgatggtggggagactcggtgggtgaatggggagaccagaaagaaagagtccacagagcctgggctgggcccggtggaggctcctgtttacagccctctcttctttgtacagttgtattccaacactccactcgctaagaggccctgatcccagctcattcaggggagaacacgtcgtggggttcctgtcacgactatcacttgagattatattattatcctcactccctcgctgtctggagacggtcacaccttctggcaa

SEQ ID NO: 174831 - DNA, 1764 bp, Homo sapiens
  Payload ID: 14333
  Gene Symbol: RGS6
  Gene Name: regulator of G-protein signaling 6
  Uniprot ID: P49758
  ENST ID: ENST00000555571
  CDS Start-End: 346-1764
agccaggccagcccggagcgcgccggggacaccctgtgcgccccgagtcccggcaccatgcgacccgccgcgcgtcctcgcgggcccggggcttcgctcttcgctcgctgagcccctgcgctcgccaccacggaaactcggaaagaggaggcgaggctgtggggagcggcgcggagacggactagacttcccctccgcccccaagaggctgccggtccccggttccctgggcttctccagctttatcatgaacctggcgcaaggttggctttaggaaaaattctggagccagagggagagtcaaggcaattctttggttgctaagtgtgagtgaagacactcaggatggctcaaggatccggggatcaaagagcagtgggggttgctgacccagaggagagttctccaaacatgatcgtttactgcaaaattgaagacatcattacaaagatgcaagatgacaagacagggggtgtgcccatcagaacagtcaagagctttctctccaaaatccccagtgtcgtcacaggtactgacattgtgcagtggcttatgaagaacctttccattgaggacccagttgaagcaatacacttggggagccttatcgctgcccagggctacatctttccaatctcagaccatgttctcaccatgaaggatgatggcaccttttatcgtttccaggctccgtacttctggccttcgaactgctgggaacctgaaaacactgactatgccatctatctctgtaagaggacaatgcaaaataaagcaaggctggaactggcagattatgaagcagaaaacttagcaagactccagagggcctttgcgaggaagtgggaattcatctttatgcaagcagaagcacaagtaaagattgaccggaaaaaagacaagacagaaaggaaaattttggatagtcaagaacgagccttttgggatgtccacaggcctgtgccaggctgtgtgaacacaacagaaatggatatccgaaaatgtcgacgtttgaagaatccacaaaaggttaaaaagtccgtgtatggcgtgactgaagagtcccaggcacagagcccggtgcatgtactcagccaaccaatcaggaaaacaacaaaagaggacatccggaaacagataacatttttgaacgcacagatcgacagacattgtttgaaaatgtccaaagtggctgaaagtttaattgcctacacggaacaatatgtggaatatgaccctttgataacaccagctgagccatccaacccttggatcagcgatgacgttgctttgtgggacatagagatgagcaaagagcccagccaacagcgagtaaaaagatggggcttctctttcgatgagatattgaaggaccaggtggggcgggaccagtttctacgattcctggagtccgaattcagttcagaaaacctcaggttctggctggctgtccaagatcttaagaaacaacccctacaggatgtggccaagagggtagaagaaatctggcaagagtttctggctccaggggctccaagtgcaatcaacctggattctcacagctatgagataaccagtcaaaatgtcaaagatggagggagatatacatttgaagacgcccaggagcacatctacaagctgatgaagagtgacagctatgcccgcttcctccggtcaaatgcttaccaggatttgctgctggccaagaagaagggaaagtcgctggcgggcaagcgcctcacgggcctgatgcagtcctcctga

SEQ ID NO: 174832 - DNA, 2005 bp, Homo sapiens
  Payload ID: 14333
  Gene Symbol: RGS6
  Gene Name: regulator of G-protein signaling 6
  Uniprot ID: P49758
  ENST ID: ENST00000553525
  CDS Start-End: 524-1996
gcgagttggggcagctcctcgcgctcggccctgctcggcggcgagagctccgcctgggcgccgcgttcctacagccgccggagccgccaggcgccgagggaacggacagacctccgcgcacccttgccgaccggggcgggcagaggcgggcaagcggcgaacgcctgggagcgcggagagccaggccagcccggagcgcgccggggacaccctgtgcgccccgagtcccggcaccatgcgacccgccgcgcgtcctcgcgggcccggggcttcgctcttcgctcgctgagcccctgcgctcgccaccacggaaactcggaaagaggaggcgaggctgtggggagcggcgcggagacggactagacttcccctccgcccccaagaggctgccggtccccggttccctgggcttctccagctttatcatgaacctggcgcaaggttggctttaggaaaaattctggagccagagggagagtcaaggcaattctttggttgctaagtgtgagtgaagacactcaggatggctcaaggatccggggatcaaagagcagtgggggttgctgacccagaggagagttctccaaacatgatcgtttactgcaaaattgaagacatcattacaaagatgcaagatgacaagacagggggtgtgcccatcagaacagtcaagagctttctctccaaaatccccagtgtcgtcacaggtactgacattgtgcagtggcttatgaagaacctttccattgaggacccagttgaagcaatacacttggggagccttatcgctgcccagggctacatctttccaatctcagaccatgttctcaccatgaaggatgatggcaccttttatcgtttccaggctccgtacttctggccttcgaactgctgggaacctgaaaacactgactatgccatctatctctgtaagaggacaatgcaaaataaagcaaggctggaactggcagattatgaagcagaaaacttagcaagactccagagggcctttgcgaggaagtgggaattcatctttatgcaagcagaagcacaagtaaagattgaccggaaaaaagacaagacagaaaggaaaattttggatagtcaagaacgagccttttgggatgtccacaggcctgtgccaggctgtgtgaacacaacagaaatggatatccgaaaatgtcgacgtttgaagaatccacaaaaggttaaaaagtccgtgtatggcgtgactgaagagtcccaggcacagagcccggtgcatgtactcagccaaccaatcaggaaaacaacaaaagaggacatccggaaacagataacatttttgaacgcacagatcgacagacattgtttgaaaatgtccaaagtggctgaaagtttaattgcctacacggaacaatatgtggaatatgaccctttgataacaccagctgagccatccaacccttggatcagcgatgacgttgctttgtgggacatagagatgagcaaagagcccagccaacagcgagtaaaaagatggggcttctctttcgatgagatattgaaggaccaggtggggcgggaccagtttctacgattcctggagtccgaattcagttcagaaaacctcaggttctggctggctgtccaagatcttaagaaacaacccctacaggatgtggccaagagggtagaagaaatctggcaagagtttctggctccaggggctccaagtgcaatcaacctggattctcacagctatgagataaccagtcaaaatgtcaaagatggagggagatatacatttgaagacgcccaggagcacatctacaagctgatgaagagtgacagctatgcccgcttcctccggtcaaatgcttaccaggatttgctgctggccaagaagaagccagaaagtgagcaaggtcgtagaacttccctagaaaagttcactcgcagtgtgggaaagtcgctggcgggcaagcgcctcacgggcctgatgcagtcctcctgaccgttccta

SEQ ID NO: 174833 - DNA, 1689 bp, Homo sapiens
  Payload ID: 14333
  Gene Symbol: RGS6
  Gene Name: regulator of G-protein signaling 6
  Uniprot ID: P49758
  ENST ID: ENST00000556437
  CDS Start-End: 92-1564
caccgacggggacgagagcgcagaggatggcgcttttagatacttccagtcttccgatgttgtgatcgcagtgtgagtgaagacactcaggatggctcaaggatccggggatcaaagagcagtgggggttgctgacccagaggagagttctccaaacatgatcgtttactgcaaaattgaagacatcattacaaagatgcaagatgacaagacagggggtgtgcccatcagaacagtcaagagctttctctccaaaatccccagtgtcgtcacaggtactgacattgtgcagtggcttatgaagaacctttccattgaggacccagttgaagcaatacacttggggagccttatcgctgcccagggctacatctttccaatctcagaccatgttctcaccatgaaggatgatggcaccttttatcgtttccaggctccgtacttctggccttcgaactgctgggaacctgaaaacactgactatgccatctatctctgtaagaggacaatgcaaaataaagcaaggctggaactggcagattatgaagcagaaaacttagcaagactccagagggcctttgcgaggaagtgggaattcatctttatgcaagcagaagcacaagtaaagattgaccggaaaaaagacaagacagaaaggaaaattttggatagtcaagaacgagccttttgggatgtccacaggcctgtgccaggctgtgtgaacacaacagaaatggatatccgaaaatgtcgacgtttgaagaatccacaaaaggttaaaaagtccgtgtatggcgtgactgaagagtcccaggcacagagcccggtgcatgtactcagccaaccaatcaggaaaacaacaaaagaggacatccggaaacagataacatttttgaacgcacagatcgacagacattgtttgaaaatgtccaaagtggctgaaagtttaattgcctacacggaacaatatgtggaatatgaccctttgataacaccagctgagccatccaacccttggatcagcgatgacgttgctttgtgggacatagagatgagcaaagagcccagccaacagcgagtaaaaagatggggcttctctttcgatgagatattgaaggaccaggtggggcgggaccagtttctacgattcctggagtccgaattcagttcagaaaacctcaggttctggctggctgtccaagatcttaagaaacaacccctacaggatgtggccaagagggtagaagaaatctggcaagagtttctggctccaggggctccaagtgcaatcaacctggattctcacagctatgagataaccagtcaaaatgtcaaagatggagggagatatacatttgaagacgcccaggagcacatctacaagctgatgaagagtgacagctatgcccgcttcctccggtcaaatgcttaccaggatttgctgctggccaagaagaagccagaaagtgagcaaggtcgtagaacttccctagaaaagttcactcgcagtgtgggaaagtcgctggcgggcaagcgcctcacgggcctgatgcagtcctcctgaccgttcctaccgcaggtccagggcctgggcccgcggaccccacaggcaggcggcggcgctccacatctgcggacagagtttccttacgaggagacttggtcactgtgaaggagaaagagtgaggg

SEQ ID NO: 174834 - DNA, 1110 bp, Homo sapiens
  Payload ID: 14333
  Gene Symbol: RGS6
  Gene Name: regulator of G-protein signaling 6
  Uniprot ID: P49758
  ENST ID: ENST00000554782
  CDS Start-End: 66-1106
aaaacactgactatgaaggaggaagacattgaagaaggaaagccatctatctctgtaagaggacaatgcaaaataaagcaaggctggaactggcagattatgaagcagaaaacttagcaagactccagagggcctttgcgaggaagtgggaattcatctttatgcaagcagaagcacaagtaaagattgaccggaaaaaagacaagacagaaaggaaaattttggatagtcaagaacgagccttttgggatgtccacaggcctgtgccaggctgtgtgaacacaacagaaatggatatccgaaaatgtcgacgtttgaagaatccacaaaaggttaaaaagtccgtgtatggcgtgactgaagagtcccaggcacagagcccggtgcatgtactcagccaaccaatcaggaaaacaacaaaagaggacatccggaaacagataacatttttgaacgcacagatcgacagacattgtttgaaaatgtccaaagtggctgaaagtttaattgcctacacggaacaatatgtggaatatgaccctttgataacaccagctgagccatccaacccttggatcagcgatgacgttgctttgtgggacatagagatgagcaaagagcccagccaacagcgagtaaaaagatggggcttctctttcgatgagatattgaaggaccaggtggggcgggaccagtttctacgattcctggagtccgaattcagttcagaaaacctcaggttctggctggctgtccaagatcttaagaaacaacccctacaggatgtggccaagagggtagaagaaatctggcaagagtttctggctccaggggctccaagtgcaatcaacctggattctcacagctatgagataaccagtcaaaatgtcaaagatggagggagatatacatttgaagacgcccaggagcacatctacaagctgatgaagagtgacagctatgcccgcttcctccggtcaaatgcttaccaggatttgctgctggccaagaagaagccagaaagtgagcaaggtcgtagaacttccctagaaaagttcactcgcagtgtgttgtattccaacactccactcgctaagaggccctgatccc

SEQ ID NO: 174835 - DNA, 5685 bp, Homo sapiens
  Payload ID: 14333
  Gene Symbol: RGS6
  Gene Name: regulator of G-protein signaling 6
  Uniprot ID: P49758
  ENST ID: ENST00000553530
  CDS Start-End: 208-1626
gactgtggaagcacgagcttacataagtggttaggcaagctggcgtgtggacttgtgtgggatgggtgcaggtctgcatataaatcatgttcctgggtttctgggtgtgaagcgcacaccgacggggacgagagcgcagaggatggcgcttttagatacttccagtcttccgatgttgtgatcgcagtgtgagtgaagacactcaggatggctcaaggatccggggatcaaagagcagtgggggttgctgacccagaggagagttctccaaacatgatcgtttactgcaaaattgaagacatcattacaaagatgcaagatgacaagacagggggtgtgcccatcagaacagtcaagagctttctctccaaaatccccagtgtcgtcacaggtactgacattgtgcagtggcttatgaagaacctttccattgaggacccagttgaagcaatacacttggggagccttatcgctgcccagggctacatctttccaatctcagaccatgttctcaccatgaaggatgatggcaccttttatcgtttccaggctccgtacttctggccttcgaactgctgggaacctgaaaacactgactatgccatctatctctgtaagaggacaatgcaaaataaagcaaggctggaactggcagattatgaagcagaaaacttagcaagactccagagggcctttgcgaggaagtgggaattcatctttatgcaagcagaagcacaagtaaagattgaccggaaaaaagacaagacagaaaggaaaattttggatagtcaagaacgagccttttgggatgtccacaggcctgtgccaggctgtgtgaacacaacagaaatggatatccgaaaatgtcgacgtttgaagaatccacaaaaggttaaaaagtccgtgtatggcgtgactgaagagtcccaggcacagagcccggtgcatgtactcagccaaccaatcaggaaaacaacaaaagaggacatccggaaacagataacatttttgaacgcacagatcgacagacattgtttgaaaatgtccaaagtggctgaaagtttaattgcctacacggaacaatatgtggaatatgaccctttgataacaccagctgagccatccaacccttggatcagcgatgacgttgctttgtgggacatagagatgagcaaagagcccagccaacagcgagtaaaaagatggggcttctctttcgatgagatattgaaggaccaggtggggcgggaccagtttctacgattcctggagtccgaattcagttcagaaaacctcaggttctggctggctgtccaagatcttaagaaacaacccctacaggatgtggccaagagggtagaagaaatctggcaagagtttctggctccaggggctccaagtgcaatcaacctggattctcacagctatgagataaccagtcaaaatgtcaaagatggagggagatatacatttgaagacgcccaggagcacatctacaagctgatgaagagtgacagctatgcccgcttcctccggtcaaatgcttaccaggatttgctgctggccaagaagaagggaaagtcgctggcgggcaagcgcctcacgggcctgatgcagtcctcctgaccgttcctaccgcaggtccagggcctgggcccgcggaccccacaggcaggcggcggcgctccacatctgcggacagagtttccttacgaggagacttggtcactgtgaaggagaaagagtgagggcaatgaagggcgatggtggggagactcggtgggtgaatggggagaccagaaagaaagagtccacagagcctgggctgggcccggtggaggctcctgtttacagccctctcttctttgtacagttgtattccaacactccactcgctaagaggccctgatcccagctcattcaggggagaacacgtcgtggggttcctgtcacgactatcacttgagattatattattatcctcactccctcgctgtctggagacggtcacaccttctggcaaattcaagaggcatgagtggaccgagagcacatccagcatttgcatcacctccctggcacctcccatagttacagccactacatccccaccgccgcctgtcatccctcacgtctctgtggccacccgggtgtcactgccagcaccaggcactgctttcacgtaaaatgtccaaatcacatcttcagcaagaaagcaacctcacggattgccccgcctcaaggtctttccaccctctttgagatcagcgttcggagaggtccccgccagcccggtggctgccctcaggtcccgtcacatgtctcaagggtccagcgttcgaggaagcactgttgtagatgacagagctttttgtttcacagctgcggggattctgctgaccatcttttagaaaattatttcataatttattctggctttgcccccttgctccttggtttattccctcatgttttactcaaaataaacatggccatgaactcaggggccattgggattctcccctctggcagccccaggtgggagctgggagggtccccagcccaggaggtggctggattgcagggctggcagcccccacgtggtggcatcctgacaggcacagtgagacccttgctgggtcaggtctcctttgtgtgtgaagctggggcagagtatgctacgaagggaccaggccaggccacagggctctcctcccagtctttatctgaaggcccagccaaagcacccctctaaaccggtcacctaggggaaatgcaaaaacctgcaaaagatccacctgtattccctgtgtgtgtgtgtcaaaatgaccatttgccaacctggctgtgaggtaatgtatgtaaagcaccgagtcaggtgcctgatacgcagtaggtgcttagcaaacggtagctaatactatcatcattgtcattgttattgtgacacccatgagcccacagacagagctgtattaagtaacctgttttgaatccagacattcactcccccacttgctatgactaccctcctttgatctatttttggtcataggtaaaaaaaaaaatctctcttgggagcatataaacaaaaaacatagaagcaataaagcgatcgctggtatttcttttctcatgcagccaaattcgccagctggtgaccaaaggctcagatgcttgcttatttgcagacccggcctcctgggtgctccccagtgacccatctttccaccccaccacctccaagtcctgtctatgtctgcttccacacagccctgtccccagggcaccagccttctgtccctcacagcagtgccatcgcgggcattaggagtcttcgttatgttgtatccttgtgagttcttgactaccatgcccaagtttcccccactggcaatggttcctctcttggaggtacagtggaaaccagagagatgacagatgttgagtcctcagtgtctcagaggcagcaattcttgctggacacctgcacatgctcagcacagaggctggtactttggaggcactaaccacttgatgagtaaatcaatggcataaagccccattccaagttatggggtcttttgacaggcccctttcatcctctttctctttgtataaacctcatgtttcagaacaaaattacagtctaagttcatttgcccccagccttgcccaaggatccccgggctgtgctgacccctaggcatagggcaaagggtgttcccaagcagcaggcacctcagtgccctcagttatccagggcaaggggcctggctgccccctgctcctccccatgatgcaggggctttctaagccaggctgcagacagggcagggttggcttcttggccattccctctgtgcccccttctccttctgactggtctcaccctggagatccccagaggatctgaccagagccaggtggactgtggccctgagatggagctggctgcaggcttacaagcacctctggggacatccagaggggagggtcagtaagcacaacggagctagggagacttcagatggactcaaacccagagcaataatactctcacaccaccccacagctaaggcactcatgttccccagtagatcaagccagaagctttgcaagaagggagtggaacgaggctgcctatccaaggtccatctaccacgcagaacttggtcatgcaagtacatttggaaaatctggtcttggcccgtcccccattggcctggtctacacagccaaaaattcagactagattagatgtttgcaggcaattctgtagcaaagcaaattcccctaccccgtcccttccccctagaagctgccttagcctccctgactgggtgtggtctctgggcctaggactcctccctatgaggaaaagtgctctccagccacatcttggcagccccacaaccacagcatcagggcagctgcagcaagtgaccacccacccgtcgggttagacacacaaggcaccaggcactggcatctgactaaaataacctttccctacatgggaagaggaaagcttgtaggctggcacatataaacgtccagccgcagccagatggcctgaactaagcagcaggaactctctgggctggggaggagcctcctgcccttctagaaagtgatgcgtcagctttgttctcctgggaaggtgttgctataccccaggaacaaagcagggcccaactgccagtgcagtcagctgggcctgcgctccaggctcaccaccgctaagtggtcaggtaccgggccagcatcctgggagggacctcttgcgactctgagttgcagcttggactagctgaacacatggggacatgctccaggggcttcttccctggcaggattcctgggatttcaaactacctcaccaacaggacgctgaaccaggagcctgccacccaactggcccccttggtgattgtggaaggtgatgtttttcctaaaatgcatccctcctgttctgctccatatacatgtgcttcaaaaaccaccaccaggaaagccttcccagaagagggaaaggattaagggctctcttcctttgggccctgcagaatgtattggagggaggtgttgctgcaaggtccaggagctgggaaactctgggctcggggggagataatgcaccaccagcctcaaaaaggagctgcccaagttgaatatgtagcaaagaccatgggataagttgaatagtggccagacgaatcactaataactcaccatgggaccctctgaagagaggcctgtgctcgtgtaaccatagcaacagcagatgccagcaacctactcattagtaccacccagtgataaggcatcccctgggctagacccaggggccataaagtagcaaagtagcaaatgtagcaataaagggcccgggtctatacggggacagggtccaaatgaccaggacttggccctctccccagccccgatgagggctcagagccagctgctgtcagctgtctggggagggaaggccctgctccataccaggggtccctgttctatactctaagcccactcaccgcatgatcacggactcatcggaatggcctcctcttagtgcatgtggttctctttagtttatttttctggaatttggggattggaccccagaaccaaacatgctggtacagtctaaaaataaatgacttgaacccacttcaa

SEQ ID NO: 174836 - DNA, 5453 bp, Homo sapiens
  Payload ID: 14333
  Gene Symbol: RGS6
  Gene Name: regulator of G-protein signaling 6
  ENST ID: ENST00000622468
  CDS Start-End: 24-1391
agattgaagacatcattacaaagatgcaagatgacaagacagggggtgtgcccatcagaacagtcaagagctttctctccaaaatccccagtgtcgtcacaggtactgacattgtgcagtggcttatgaagaacctttccattgaggacccagttgaagcaatacacttggggagccttatcgctgcccagggctacatctttccaatctcagaccatgttctcaccatgaaggatgatggcaccttttatcgtttccaggctccgtacttctggccttcgaactgctgggaacctgaaaacactgactatgccatctatctctgtaagaggacaatgcaaaataaagcaaggctggaactggcagattatgaagcagaaaacttagcaagactccagagggcctttgcgaggaagtgggaattcatctttatgcaagcagaagcacaagtaaagattgaccggaaaaaagacaagacagaaaggaaaattttggatagtcaagaacgagccttttgggatgtccacaggcctgtgccaggctgtgtgaacacaacagaaatggatatccgaaaatgtcgacgtttgaagaatccacaaaaggttaaaaagtccgtgtatggcgtgactgaagagtcccaggcacagagcccggtgcatgtactcagccaaccaatcaggaaaacaacaaaagaggacatccggaaacagataacatttttgaacgcacagatcgacagacattgtttgaaaatgtccaaagtggctgaaagtttaattgcctacacggaacaatatgtggaatatgaccctttgataacaccagctgagccatccaacccttggatcagcgatgacgttgctttgtgggacatagagatgagcaaagagcccagccaacagcgagtaaaaagatggggcttctctttcgatgagatattgaaggaccaggtggggcgggaccagtttctacgattcctggagtccgaattcagttcagaaaacctcaggttctggctggctgtccaagatcttaagaaacaacccctacaggatgtggccaagagggtagaagaaatctggcaagagtttctggctccaggggctccaagtgcaatcaacctggattctcacagctatgagataaccagtcaaaatgtcaaagatggagggagatatacatttgaagacgcccaggagcacatctacaagctgatgaagagtgacagctatgcccgcttcctccggtcaaatgcttaccaggatttgctgctggccaagaagaagccagaaagtgagcaaggtcgtagaacttccctagaaaagttcactcgcagtgtgggaaagtcgctggcgggcaagcgcctcacgggcctgatgcagtcctcctgaccgttcctaccgcaggtccagggcctgggcccgcggaccccacaggcaggcggcggcgctccacatctgcggacagagtttccttacgaggagacttggtcactgtgaaggagaaagagtgagggcaatgaagggcgatggtggggagactcggtgggtgaatggggagaccagaaagaaagagtccacagagcctgggctgggcccggtggaggctcctgtttacagccctctcttctttgtacagttgtattccaacactccactcgctaagaggccctgatcccagctcattcaggggagaacacgtcgtggggttcctgtcacgactatcacttgagattatattattatcctcactccctcgctgtctggagacggtcacaccttctggcaaattcaagaggcatgagtggaccgagagcacatccagcatttgcatcacctccctggcacctcccatagttacagccactacatccccaccgccgcctgtcatccctcacgtctctgtggccacccgggtgtcactgccagcaccaggcactgctttcacgtaaaatgtccaaatcacatcttcagcaagaaagcaacctcacggattgccccgcctcaaggtctttccaccctctttgagatcagcgttcggagaggtccccgccagcccggtggctgccctcaggtcccgtcacatgtctcaagggtccagcgttcgaggaagcactgttgtagatgacagagctttttgtttcacagctgcggggattctgctgaccatcttttagaaaattatttcataatttattctggctttgcccccttgctccttggtttattccctcatgttttactcaaaataaacatggccatgaactcaggggccattgggattctcccctctggcagccccaggtgggagctgggagggtccccagcccaggaggtggctggattgcagggctggcagcccccacgtggtggcatcctgacaggcacagtgagacccttgctgggtcaggtctcctttgtgtgtgaagctggggcagagtatgctacgaagggaccaggccaggccacagggctctcctcccagtctttatctgaaggcccagccaaagcacccctctaaaccggtcacctaggggaaatgcaaaaacctgcaaaagatccacctgtattccctgtgtgtgtgtgtcaaaatgaccatttgccaacctggctgtgaggtaatgtatgtaaagcaccgagtcaggtgcctgatacgcagtaggtgcttagcaaacggtagctaatactatcatcattgtcattgttattgtgacacccatgagcccacagacagagctgtattaagtaacctgttttgaatccagacattcactcccccacttgctatgactaccctcctttgatctatttttggtcataggtaaaaaaaaaaatctctcttgggagcatataaacaaaaaacatagaagcaataaagcgatcgctggtatttcttttctcatgcagccaaattcgccagctggtgaccaaaggctcagatgcttgcttatttgcagacccggcctcctgggtgctccccagtgacccatctttccaccccaccacctccaagtcctgtctatgtctgcttccacacagccctgtccccagggcaccagccttctgtccctcacagcagtgccatcgcgggcattaggagtcttcgttatgttgtatccttgtgagttcttgactaccatgcccaagtttcccccactggcaatggttcctctcttggaggtacagtggaaaccagagagatgacagatgttgagtcctcagtgtctcagaggcagcaattcttgctggacacctgcacatgctcagcacagaggctggtactttggaggcactaaccacttgatgagtaaatcaatggcataaagccccattccaagttatggggtcttttgacaggcccctttcatcctctttctctttgtataaacctcatgtttcagaacaaaattacagtctaagttcatttgcccccagccttgcccaaggatccccgggctgtgctgacccctaggcatagggcaaagggtgttcccaagcagcaggcacctcagtgccctcagttatccagggcaaggggcctggctgccccctgctcctccccatgatgcaggggctttctaagccaggctgcagacagggcagggttggcttcttggccattccctctgtgcccccttctccttctgactggtctcaccctggagatccccagaggatctgaccagagccaggtggactgtggccctgagatggagctggctgcaggcttacaagcacctctggggacatccagaggggagggtcagtaagcacaacggagctagggagacttcagatggactcaaacccagagcaataatactctcacaccaccccacagctaaggcactcatgttccccagtagatcaagccagaagctttgcaagaagggagtggaacgaggctgcctatccaaggtccatctaccacgcagaacttggtcatgcaagtacatttggaaaatctggtcttggcccgtcccccattggcctggtctacacagccaaaaattcagactagattagatgtttgcaggcaattctgtagcaaagcaaattcccctaccccgtcccttccccctagaagctgccttagcctccctgactgggtgtggtctctgggcctaggactcctccctatgaggaaaagtgctctccagccacatcttggcagccccacaaccacagcatcagggcagctgcagcaagtgaccacccacccgtcgggttagacacacaaggcaccaggcactggcatctgactaaaataacctttccctacatgggaagaggaaagcttgtaggctggcacatataaacgtccagccgcagccagatggcctgaactaagcagcaggaactctctgggctggggaggagcctcctgcccttctagaaagtgatgcgtcagctttgttctcctgggaaggtgttgctataccccaggaacaaagcagggcccaactgccagtgcagtcagctgggcctgcgctccaggctcaccaccgctaagtggtcaggtaccgggccagcatcctgggagggacctcttgcgactctgagttgcagcttggactagctgaacacatggggacatgctccaggggcttcttccctggcaggattcctgggatttcaaactacctcaccaacaggacgctgaaccaggagcctgccacccaactggcccccttggtgattgtggaaggtgatgtttttcctaaaatgcatccctcctgttctgctccatatacatgtgcttcaaaaaccaccaccaggaaagccttcccagaagagggaaaggattaagggctctcttcctttgggccctgcagaatgtattggagggaggtgttgctgcaaggtccaggagctgggaaactctgggctcggggggagataatgcaccaccagcctcaaaaaggagctgcccaagttgaatatgtagcaaagaccatgggataagttgaatagtggccagacgaatcactaataactcaccatgggaccctctgaagagaggcctgtgctcgtgtaaccatagcaacagcagatgccagcaacctactcattagtaccacccagtgataaggcatcccctgggctagacccaggggccataaagtagcaaagtagcaaatgtagcaataaagggcccgggtctatacggggacagggtccaaatgaccaggacttggccctctccccagccccgatgagggctcagagccagctgctgtcagctgtctggggagggaaggccctgctccataccaggggtccctgttctatactctaagcccactcaccgcatgatcacggactcatcggaatggcctcctcttagtgcatgtggttctctttagtttatttttctggaatttggggattggaccccagaaccaaacatgctggtacagtctaaaaataaatgacttgaacccacttcaatcc

SEQ ID NO: 174837 - DNA, 1980 bp, Homo sapiens
  Payload ID: 14334
  Gene Symbol: RGS7
  Gene Name: regulator of G-protein signaling 7
  Uniprot ID: P49802
  ENST ID: ENST00000348120
  CDS Start-End: 1-1275
atggcccaggggaataattatgggcagaccagcaacggggtggccgatgaatcacccaacatgctggtgtacagaaagatggaagacgtcatagcacggatgcaagatgaaaaaaatggaattcctattcgtacggtcaaaagctttctttccaagatacctagcgtcttctctggttcagacattgttcaatggttgataaagaacttaactatagaagatccagccgtttacctctgcaagagaacaatgcaaaacaaggcacgactggagctcgcagactatgaggctgagagcctggccaggctgcagagagcatttgcccggaagtgggagttcattttcatgcaagcagaagcacaagcaaaagtggacaagaagagagacaagattgaaaggaagatccttgacagccaagagagagcgttctgggacgtgcacaggcccgtgcctggatgtgtaaatacaactgaagtggacattaagaagtcatccagaatgagaaacccccacaaaacacggaagtctgtctatggtttacaaaatgatattagaagtcacagtcctacccacacacccacaccagaaactaaacctccaacagaagatgagttacaacaacagataaaatattggcaaatacagttagatagacatcggttaaaaatgtcaaaagtcgctgacagtctactaagttacacggaacagtatttagaatacgacccgtttcttttgccacctgacccttctaacccatggctgtccgatgacaccactttctgggaacttgaggcaagcaaagaaccgagccagcagagggtaaaacgatggggttttggcatggacgaggcattgaaagacccagttgggagagaacagttccttaaatttctagagtcagaattcagctcggaaaatttaagattctggctggcagtggaggacctgaaaaagaggcctattaaagaagtaccctcaagagttcaggaaatatggcaagagtttctggctcccggagcccccagtgctattaacttggattccaagagttatgacaaaaccacacagaacgtgaaggaacctggacgatacacatttgaagatgctcaggagcacatttacaaactgatgaaaagtgattcatacccacgttttataagatccagtgcctatcaggagcttctacaggcaaagaaaaagggcagaaacatccctattttcccatgccataaaaactgtacaccaacactgagggccagcactaacctgttatgaaaagaggggaaatctctcacgtccaagaggttaacaagccttgctcagtcttactaaacggatcatcttgtagcatgaatgcagactggagtcactgcacacactttgtagctcaatgttgtgacctggagcagaggacattagaacaagatgttgcatgagcaaaggacctaaattgttatttttgtgtgtacattccatctccaatggactcttccgtctcaatgcctccattccaaactgttgtctgctttctttctccttctactatgctggatctgtgtctcttcctttttaacaagttcaagtgaagtaaaaccttttctttttttccttctttctctctctctctctctcaaagcttcagttagacacacagttcactgaaaattcagtcagtcaaaaactggaagaactgtaaaagaaaaaagtatatatcaataagtatacatgtggcttcacatttattaaacaataaattccgcacagaaagtttcatttcaccaatgtgtcacagtcagaaacaaactcatgtcttcgtctgttgtctgtacattctccgttaatgtttctcgcatttatttttataccatatttaaagaagaaacaccttttactccaaatgtattaaagttgatcccttctctgtaaatttgtgtatgtttatattgttgttttatctttcattaaaagatgcagaatctc

SEQ ID NO: 174838 - DNA, 2118 bp, Homo sapiens
  Payload ID: 14334
  Gene Symbol: RGS7
  Gene Name: regulator of G-protein signaling 7
  ENST ID: ENST00000366562
  CDS Start-End: 177-1412
agatggaagacgtcatagcacggatgcaagatgaaaaaaatggaattcctattcgtacggtcaaaagctttctttccaagatacctagcgtcttctctggttcagacattgttcaatggttgataaagaacttaactatagaagatccagtggaggcgctccatttgggaacattaatggctgcccacggctacttctttccaatctcagatcatgtcctcacactcaaggatgatggcaccttttaccggtttcaaaccccctatttttggccatcaaattgttgggagccggaaaacacagattatgccgtttacctctgcaagagaacaatgcaaaacaaggcacgactggagctcgcagactatgaggctgagagcctggccaggctgcagagagcatttgcccggaagtgggagttcattttcatgcaagcagaagcacaagcaaaagtggacaagaagagagacaagattgaaaggaagatccttgacagccaagagagagcgttctgggacgtgcacaggcccgtgcctggatgtgtaaatacaactgaagtggacattaagaagtcatccagaatgagaaacccccacaaaacacggaagtctgtctatggtttacaaaatgatattagaagtcacagtcctacccacacacccacaccagaaactaaacctccaacagaagatgagttacaacaacagataaaatattggcaaatacagttagatagacatcggttaaaaatgtcaaaagtcgctgacagtctactaagttacacggaacagtatttagaatacgacccgtttcttttgccacctgacccttctaacccatggctgtccgatgacaccactttctgggaacttgaggcaagcaaagaaccgagccagcagagggtaaaacgatggggttttggcatggacgaggcattgaaagacccagttgggagagaacagttccttaaatttctagagtcagaattcagctcggaaaatttaagattctggctggcagtggaggacctgaaaaagaggcctattaaagaagtaccctcaagagttcaggaaatatggcaagagtttctggctcccggagcccccagtgctattaacttggattccaagagttatgacaaaaccacacagaacgtgaaggaacctggacgatacacatttgaagatgctcaggagcacatttacaaactgatgaaaagtgattcatacccacgttttataagatccagtgcctatcaggagcttctacaggcaaagaaaaagtctggaaactcaatggatcgcagaacatcttttgaaaaatttgcacagaatgtgggcagaaacatccctattttcccatgccataaaaactgtacaccaacactgagggccagcactaacctgttatgaaaagaggggaaatctctcacgtccaagaggttaacaagccttgctcagtcttactaaacggatcatcttgtagcatgaatgcagactggagtcactgcacacactttgtagctcaatgttgtgacctggagcagaggacattagaacaagatgttgcatgagcaaaggacctaaattgttatttttgtgtgtacattccatctccaatggactcttccgtctcaatgcctccattccaaactgttgtctgctttctttctccttctactatgctggatctgtgtctcttcctttttaacaagttcaagtgaagtaaaaccttttctttttttccttctttctctctctctctctctcaaagcttcagttagacacacagttcactgaaaattcagtcagtcaaaaactggaagaactgtaaaagaaaaaagtatatatcaataagtatacatgtggcttcacatttattaaacaataaattccgcacagaaagtttcatttcaccaatgtgtcacagtcagaaacaaactcatgtcttcgtctgttgtctgtacattctccgttaatgtttctcgcatttatttttataccatatttaaagaagaaacaccttttactccaaatgtattaaagttgatcccttctctgtaaatttgtgtatgtttatattgttgttttatctttcattaaaagatgcagaatctca

SEQ ID NO: 174839 - DNA, 2206 bp, Homo sapiens
  Payload ID: 14334
  Gene Symbol: RGS7
  Gene Name: regulator of G-protein signaling 7
  Uniprot ID: P49802
  ENST ID: ENST00000366563
  CDS Start-End: 68-1501
tgaccttggcggaggagggcacactgataattcttgtatcttgagagtggaccaagttttgggtgacatggcccaggggaataattatgggcagaccagcaacggggtggccgatgaatcacccaacatgctggtgtacagaaagatggaagacgtcatagcacggatgcaagatgaaaaaaatggaattcctattcgtacggtcaaaagctttctttccaagatacctagcgtcttctctggttcagacattgttcaatggttgataaagaacttaactatagaagatccagtggaggcgctccatttgggaacattaatggctgcccacggctacttctttccaatctcagatcatgtcctcacactcaaggatgatggcaccttttaccggtttcaaaccccctatttttggccatcaaattgttgggagccggaaaacacagattatgccgtttacctctgcaagagaacaatgcaaaacaaggcacgactggagctcgcagactatgaggctgagagcctggccaggctgcagagagcatttgcccggaagtgggagttcattttcatgcaagcagaagcacaagcaaaagtggacaagaagagagacaagattgaaaggaagatccttgacagccaagagagagcgttctgggacgtgcacaggcccgtgcctggatgtgtaaatacaactgaagtggacattaagaagtcatccagaatgagaaacccccacaaaacacggaagtctgtctatggtttacaaaatgatattagaagtcacagtcctacccacacacccacaccagaaactaaacctccaacagaagatgagttacaacaacagataaaatattggcaaatacagttagatagacatcggttaaaaatgtcaaaagtcgctgacagtctactaagttacacggaacagtatttagaatacgacccgtttcttttgccacctgacccttctaacccatggctgtccgatgacaccactttctgggaacttgaggcaagcaaagaaccgagccagcagagggtaaaacgatggggttttggcatggacgaggcattgaaagacccagttgggagagaacagttccttaaatttctagagtcagaattcagctcggaaaatttaagattctggctggcagtggaggacctgaaaaagaggcctattaaagaagtaccctcaagagttcaggaaatatggcaagagtttctggctcccggagcccccagtgctattaacttggattccaagagttatgacaaaaccacacagaacgtgaaggaacctggacgatacacatttgaagatgctcaggagcacatttacaaactgatgaaaagtgattcatacccacgttttataagatccagtgcctatcaggagcttctacaggcaaagaaaaagggcagaaacatccctattttcccatgccataaaaactgtacaccaacactgagggccagcactaacctgttatgaaaagaggggaaatctctcacgtccaagaggttaacaagccttgctcagtcttactaaacggatcatcttgtagcatgaatgcagactggagtcactgcacacactttgtagctcaatgttgtgacctggagcagaggacattagaacaagatgttgcatgagcaaaggacctaaattgttatttttgtgtgtacattccatctccaatggactcttccgtctcaatgcctccattccaaactgttgtctgctttctttctccttctactatgctggatctgtgtctcttcctttttaacaagttcaagtgaagtaaaaccttttctttttttccttctttctctctctctctctctcaaagcttcagttagacacacagttcactgaaaattcagtcagtcaaaaactggaagaactgtaaaagaaaaaagtatatatcaataagtatacatgtggcttcacatttattaaacaataaattccgcacagaaagtttcatttcaccaatgtgtcacagtcagaaacaaactcatgtcttcgtctgttgtctgtacattctccgttaatgtttctcgcatttatttttataccatatttaaagaagaaacaccttttactccaaatgtattaaagttgatcccttctctgtaaatttgtgtatgtttatattgttgttttatctttcattaaaagatgcagaatctc

SEQ ID NO: 174840 - DNA, 2295 bp, Homo sapiens
  Payload ID: 14334
  Gene Symbol: RGS7
  Gene Name: regulator of G-protein signaling 7
  Uniprot ID: P49802
  ENST ID: ENST00000366564
  CDS Start-End: 238-1647
gggcggcggcgaggcgagggtggcggtcgcctgagcagctagagccggggcggcgcggaatccgcatccgccgcgagtgtgatgaagctaccctgcctcgctgctccgcttgccgccagctgacaccgcctgcacccagcccgcccgggaggggagacgccgcggggccgtgaccttggcggaggagggcacactgataattcttgtatcttgagagtggaccaagttttgggtgacatggcccaggggaataattatgggcagaccagcaacggggtggccgatgaatcacccaacatgctggtgtacagaaagatggaagacgtcatagcacggatgcaagatgaaaaaaatggaattcctattcgtacggtcaaaagctttctttccaagatacctagcgtcttctctggttcagacattgttcaatggttgataaagaacttaactatagaagatccagtggaggcgctccatttgggaacattaatggctgcccacggctacttctttccaatctcagatcatgtcctcacactcaaggatgatggcaccttttaccggtttcaaaccccctatttttggccatcaaattgttgggagccggaaaacacagattatgccgtttacctctgcaagagaacaatgcaaaacaaggcacgactggagctcgcagactatgaggctgagagcctggccaggctgcagagagcatttgcccggaagtgggagttcattttcatgcaagcagaagcacaagcaaaagtggacaagaagagagacaagattgaaaggaagatccttgacagccaagagagagcgttctgggacgtgcacaggcccgtgcctggatgtgtaaatacaactgaagtggacattaagaagtcatccagaatgagaaacccccacaaaacacggaagtctgtctatggtttacaaaatgatattagaagtcacagtcctacccacacacccacaccagaaactaaacctccaacagaagatgagttacaacaacagataaaatattggcaaatacagttagatagacatcggttaaaaatgtcaaaagtcgctgacagtctactaagttacacggaacagtatttagaatacgacccgtttcttttgccacctgacccttctaacccatggctgtccgatgacaccactttctgggaacttgaggcaagcaaagaaccgagccagcagagggtaaaacgatggggttttggcatggacgaggcattgaaagacccagttgggagagaacagttccttaaatttctagagtcagaattcagctcggaaaatttaagattctggctggcagtggaggacctgaaaaagaggcctattaaagaagtaccctcaagagttcaggaaatatggcaagagtttctggctcccggagcccccagtgctattaacttggattccaagagttatgacaaaaccacacagaacgtgaaggaacctggacgatacacatttgaagatgctcaggagcacatttacaaactgatgaaaagtgattcatacccacgttttataagatccagtgcctatcaggagcttctacaggcaaagaaaaaggggaaatctctcacgtccaagaggttaacaagccttgctcagtcttactaaacggatcatcttgtagcatgaatgcagactggagtcactgcacacactttgtagctcaatgttgtgacctggagcagaggacattagaacaagatgttgcatgagcaaaggacctaaattgttatttttgtgtgtacattccatctccaatggactcttccgtctcaatgcctccattccaaactgttgtctgctttctttctccttctactatgctggatctgtgtctcttcctttttaacaagttcaagtgaagtaaaaccttttctttttttccttctttctctctctctctctctcaaagcttcagttagacacacagttcactgaaaattcagtcagtcaaaaactggaagaactgtaaaagaaaaaagtatatatcaataagtatacatgtggcttcacatttattaaacaataaattccgcacagaaagtttcatttcaccaatgtgtcacagtcagaaacaaactcatgtcttcgtctgttgtctgtacattctccgttaatgtttctcgcatttatttttataccatatttaaagaagaaacaccttttactccaaatgtattaaagttgatcccttctctgtaaatttgtgtatgtttatattgttgttttatctttcattaaaagatgcagaatctc

SEQ ID NO: 174841 - DNA, 2494 bp, Homo sapiens
  Payload ID: 14334
  Gene Symbol: RGS7
  Gene Name: regulator of G-protein signaling 7
  Uniprot ID: P49802
  ENST ID: ENST00000366565
  CDS Start-End: 383-1846
gtcgcgcgcacgggccgggcgtctcgactcccgcgcgcgctcggctggtcccagtccccgggagaagaagcggaggagggagagagccagcgaggcggcccaggggagcgggcgcgagtggcggctgccggagccgcctgtgcacgggcggcggcgaggcgagggtggcggtcgcctgagcagctagagccggggcggcgcggaatccgcatccgccgcgagtgtgatgaagctaccctgcctcgctgctccgcttgccgccagctgacaccgcctgcacccagcccgcccgggaggggagacgccgcggggccgtgaccttggcggaggagggcacactgataattcttgtatcttgagagtggaccaagttttgggtgacatggcccaggggaataattatgggcagaccagcaacggggtggccgatgaatcacccaacatgctggtgtacagaaagatggaagacgtcatagcacggatgcaagatgaaaaaaatggaattcctattcgtacggtcaaaagctttctttccaagatacctagcgtcttctctggttcagacattgttcaatggttgataaagaacttaactatagaagatccagtggaggcgctccatttgggaacattaatggctgcccacggctacttctttccaatctcagatcatgtcctcacactcaaggatgatggcaccttttaccggtttcaaaccccctatttttggccatcaaattgttgggagccggaaaacacagattatgccgtttacctctgcaagagaacaatgcaaaacaaggcacgactggagctcgcagactatgaggctgagagcctggccaggctgcagagagcatttgcccggaagtgggagttcattttcatgcaagcagaagcacaagcaaaagtggacaagaagagagacaagattgaaaggaagatccttgacagccaagagagagcgttctgggacgtgcacaggcccgtgcctggatgtgtaaatacaactgaagtggacattaagaagtcatccagaatgagaaacccccacaaaacacggaagtctgtctatggtttacaaaatgatattagaagtcacagtcctacccacacacccacaccagaaactaaacctccaacagaagatgagttacaacaacagataaaatattggcaaatacagttagatagacatcggttaaaaatgtcaaaagtcgctgacagtctactaagttacacggaacagtatttagaatacgacccgtttcttttgccacctgacccttctaacccatggctgtccgatgacaccactttctgggaacttgaggcaagcaaagaaccgagccagcagagggtaaaacgatggggttttggcatggacgaggcattgaaagacccagttgggagagaacagttccttaaatttctagagtcagaattcagctcggaaaatttaagattctggctggcagtggaggacctgaaaaagaggcctattaaagaagtaccctcaagagttcaggaaatatggcaagagtttctggctcccggagcccccagtgctattaacttggattccaagagttatgacaaaaccacacagaacgtgaaggaacctggacgatacacatttgaagatgctcaggagcacatttacaaactgatgaaaagtgattcatacccacgttttataagatccagtgcctatcaggagcttctacaggcaaagaaaaagtctggaaactcaatggatcgcagaacatcttttgaaaaatttgcacagaatgtggggaaatctctcacgtccaagaggttaacaagccttgctcagtcttactaaacggatcatcttgtagcatgaatgcagactggagtcactgcacacactttgtagctcaatgttgtgacctggagcagaggacattagaacaagatgttgcatgagcaaaggacctaaattgttatttttgtgtgtacattccatctccaatggactcttccgtctcaatgcctccattccaaactgttgtctgctttctttctccttctactatgctggatctgtgtctcttcctttttaacaagttcaagtgaagtaaaaccttttctttttttccttctttctctctctctctctctcaaagcttcagttagacacacagttcactgaaaattcagtcagtcaaaaactggaagaactgtaaaagaaaaaagtatatatcaataagtatacatgtggcttcacatttattaaacaataaattccgcacagaaagtttcatttcaccaatgtgtcacagtcagaaacaaactcatgtcttcgtctgttgtctgtacattctccgttaatgtttctcgcatttatttttataccatatttaaagaagaaacaccttttactccaaatgtattaaagttgatcccttctctgtaaatttgtgtatgtttatattgttgttttatctttcattaaaagatgcagaatctc

SEQ ID NO: 174842 - DNA, 1254 bp, Homo sapiens
  Payload ID: 14334
  Gene Symbol: RGS7
  Gene Name: regulator of G-protein signaling 7
  ENST ID: ENST00000401882
  CDS Start-End: 1-1197
atggaagacgtcatagcacggatgcaagatgaaaaaaatggaattcctattcgtacggtcaaaagctttctttccaagatacctagcgtcttctctggttcagacattgttcaatggttgataaagaacttaactatagaagatccagccgtttacctctgcaagagaacaatgcaaaacaaggcacgactggagctcgcagactatgaggctgagagcctggccaggctgcagagagcatttgcccggaagtgggagttcattttcatgcaagcagaagcacaagcaaaagtggacaagaagagagacaagattgaaaggaagatccttgacagccaagagagagcgttctgggacgtgcacaggcccgtgcctggatgtgtaaatacaactgaagtggacattaagaagtcatccagaatgagaaacccccacaaaacacggaagtctgtctatggtttacaaaatgatattagaagtcacagtcctacccacacacccacaccagaaactaaacctccaacagaagatgagttacaacaacagataaaatattggcaaatacagttagatagacatcggttaaaaatgtcaaaagtcgctgacagtctactaagttacacggaacagtatttagaatacgacccgtttcttttgccacctgacccttctaacccatggctgtccgatgacaccactttctgggaacttgaggcaagcaaagaaccgagccagcagagggtaaaacgatggggttttggcatggacgaggcattgaaagacccagttgggagagaacagttccttaaatttctagagtcagaattcagctcggaaaatttaagattctggctggcagtggaggacctgaaaaagaggcctattaaagaagtaccctcaagagttcaggaaatatggcaagagtttctggctcccggagcccccagtgctattaacttggattccaagagttatgacaaaaccacacagaacgtgaaggaacctggacgatacacatttgaagatgctcaggagcacatttacaaactgatgaaaagtgattcatacccacgttttataagatccagtgcctatcaggagcttctacaggcaaagaaaaagggcagaaacatccctattttcccatgccataaaaactgtacaccaacactgagggccagcactaacctgttatgaaaagaggggaaatctctcacgtccaagaggttaacaagccttgctcagtcttactaa

SEQ ID NO: 174843 - DNA, 2064 bp, Homo sapiens
  Payload ID: 14334
  Gene Symbol: RGS7
  Gene Name: regulator of G-protein signaling 7
  ENST ID: ENST00000446183
  CDS Start-End: 177-1358
agatggaagacgtcatagcacggatgcaagatgaaaaaaatggaattcctattcgtacggtcaaaagctttctttccaagatacctagcgtcttctctggttcagacattgttcaatggttgataaagaacttaactatagaagatccagtggaggcgctccatttgggaacattaatggctgcccacggctacttctttccaatctcagatcatgtcctcacactcaaggatgatggcaccttttaccggtttcaaaccccctatttttggccatcaaattgttgggagccggaaaacacagattatgccgtttacctctgcaagagaacaatgcaaaacaaggcacgactggagctcgcagactatgaggctgagagcctggccaggctgcagagagcatttgcccggaagtgggagttcattttcatgcaagcagaagcacaagcaaaagtggacaagaagagagacaagattgaaaggaagatccttgacagccaagagagagcgttctgggacgtgcacaggcccgtgcctggatgtgtaaatacaactgaagtggacattaagaagtcatccagaatgagaaacccccacaaaacacggaagtctgtctatggtttacaaaatgatattagaagtcacagtcctacccacacacccacaccagaaactaaacctccaacagaagatgagttacaacaacagataaaatattggcaaatacagttagatagacatcggttaaaaatgtcaaaagtcgctgacagtctactaagttacacggaacagtatttagaatacgacccgtttcttttgccacctgacccttctaacccatggctgtccgatgacaccactttctgggaacttgaggcaagcaaagaaccgagccagcagagggtaaaacgatggggttttggcatggacgaggcattgaaagacccagttgggagagaacagttccttaaatttctagagtcagaattcagctcggaaaatttaagattctggctggcagtggaggacctgaaaaagaggcctattaaagaagtaccctcaagagttcaggaaatatggcaagagtttctggctcccggagcccccagtgctattaacttggattccaagagttatgacaaaaccacacagaacgtgaaggaacctggacgatacacatttgaagatgctcaggagcacatttacaaactgatgaaaagtgattcatacccacgttttataagatccagtgcctatcaggagcttctacaggcaaagaaaaagggcagaaacatccctattttcccatgccataaaaactgtacaccaacactgagggccagcactaacctgttatgaaaagaggggaaatctctcacgtccaagaggttaacaagccttgctcagtcttactaaacggatcatcttgtagcatgaatgcagactggagtcactgcacacactttgtagctcaatgttgtgacctggagcagaggacattagaacaagatgttgcatgagcaaaggacctaaattgttatttttgtgtgtacattccatctccaatggactcttccgtctcaatgcctccattccaaactgttgtctgctttctttctccttctactatgctggatctgtgtctcttcctttttaacaagttcaagtgaagtaaaaccttttctttttttccttctttctctctctctctctctcaaagcttcagttagacacacagttcactgaaaattcagtcagtcaaaaactggaagaactgtaaaagaaaaaagtatatatcaataagtatacatgtggcttcacatttattaaacaataaattccgcacagaaagtttcatttcaccaatgtgtcacagtcagaaacaaactcatgtcttcgtctgttgtctgtacattctccgttaatgtttctcgcatttatttttataccatatttaaagaagaaacaccttttactccaaatgtattaaagttgatcccttctctgtaaatttgtgtatgtttatattgttgttttatctttcattaaaagatgcagaatctca

SEQ ID NO: 174844 - DNA, 1686 bp, Homo sapiens
  Payload ID: 14334
  Gene Symbol: RGS7
  Gene Name: regulator of G-protein signaling 7
  ENST ID: ENST00000440928
  CDS Start-End: 1-981
caagcagaagcacaagcaaaagtggacaagaagagagacaagattgaaaggaagatccttgacagccaagagagagcgttctgggacgtgcacaggcccgtgcctggatgtgtaaatacaactgaagtggacattaagaagtcatccagaatgagaaacccccacaaaacacggaagtctgtctatggtttacaaaatgatattagaagtcacagtcctacccacacacccacaccagaaactaaacctccaacagaagatgagttacaacaacagataaaatattggcaaatacagttagatagacatcggttaaaaatgtcaaaagtcgctgacagtctactaagttacacggaacagtatttagaatacgacccgtttcttttgccacctgacccttctaacccatggctgtccgatgacaccactttctgggaacttgaggcaagcaaagaaccgagccagcagagggtaaaacgatggggttttggcatggacgaggcattgaaagacccagttgggagagaacagttccttaaatttctagagtcagaattcagctcggaaaatttaagattctggctggcagtggaggacctgaaaaagaggcctattaaagaagtaccctcaagagttcaggaaatatggcaagagtttctggctcccggagcccccagtgctattaacttggattccaagagttatgacaaaaccacacagaacgtgaaggaacctggacgatacacatttgaagatgctcaggagcacatttacaaactgatgaaaagtgattcatacccacgttttataagatccagtgcctatcaggagcttctacaggcaaagaaaaagtctggaaactcaatggatcgcagaacatcttttgaaaaatttgcacagaatgtgggcagaaacatccctattttcccatgccataaaaactgtacaccaacactgagggccagcactaacctgttatgaaaagaggggaaatctctcacgtccaagaggttaacaagccttgctcagtcttactaaacggatcatcttgtagcatgaatgcagactggagtcactgcacacactttgtagctcaatgttgtgacctggagcagaggacattagaacaagatgttgcatgagcaaaggacctaaattgttatttttgtgtgtacattccatctccaatggactcttccgtctcaatgcctccattccaaactgttgtctgctttctttctccttctactatgctggatctgtgtctcttcctttttaacaagttcaagtgaagtaaaaccttttctttttttccttctttctctctctctctctctcaaagcttcagttagacacacagttcactgaaaattcagtcagtcaaaaactggaagaactgtaaaagaaaaaagtatatatcaataagtatacatgtggcttcacatttattaaacaataaattccgcacagaaagtttcatttcaccaatgtgtcacagtcagaaacaaactcatgtcttcgtctgttgtctgtacattctccgttaatgtttctcgcatttatttttataccatatttaaagaagaaacaccttttactccaaatgtattaaagttgatcccttctctgtaaatttgtgtatgtttatattgttgttttatctttcattaaaagatgcagaatctc

SEQ ID NO: 174845 - DNA, 4160 bp, Homo sapiens
  Payload ID: 14335
  Gene Symbol: RGS7BP
  Gene Name: regulator of G-protein signaling 7 binding protein
  Uniprot ID: Q6MZT1
  ENST ID: ENST00000334025
  CDS Start-End: 327-1100
agccttgcaatccatgccgagaggaaggcagtgcgagcccgcgccagcgcccagctcccgggacagggtcggcaatgctgctgagcagaacttgatcgcgctccttcctcgctgctagtggaagcgatgctgcacggcacagctagcgcttccccggctctccttcaagctgaaggttaccgacccgcgcagccagccccagcactgtgagctgcgcgcctcaggtccgggctccggctgcttggcggcggcgcccagggcaacaaccgggccgcccgcgccggggcgcactgcaccagcggcttcggcttggtggatgtgtatgcatgagttctgcaccgaatgggcgcaaaaagcgccccagccggtccacccgctcctcgatcttccagatcagcaagcccccgctgcagagcggagattgggagcgcaggggcagcggctccgagagcgcccacaaaacccaacgagccctggacgactgcaagatgcttgtccaagagttcaacacacaagtggccctgtaccgagagctggtcatttctattggggatgtctcggtcagctgcccctcactccgggcggaaatgcacaagacaagaaccaaaggctgtgaaatggcccgtcaggcacaccaaaaattggctgccatctcaggcccggaagatggtgagatccatccagaaatctgtcggctttacatccagctgcagtgctgcttagaaatgtataccacagagatgctaaaatccatatgtctgctggggtctcttcagtttcatcgaaaaggaaaggaacctggcgggggaaccaagagtttggattgcaaaattgaggagagtgctgaaacacctgccctagaagactcctcatcatcccccgtagatagtcagcaacattcctggcaggtttccacagacattgagaacactgaaagagacatgagagaaatgaaaaaccttttaagcaaactcagggaaactatgcctttaccattgaaaaatcaagatgacagcagccttctgaatctaactccctaccccctggtgagaagacggaagagaaggttctttgggctgtgttgtctcatctcaagctaggtggctcctcctggaaacccactgagaacatctgaaaaaaaatcacaaaacccgaggacctccagacagctgaaccacacagttattggtttttgactatgttttctatgcttccttattacttttatctgcctccccctgcccttttaaatgattttacacttgaaagcagctgccgtcaagaaaaaaaagaacagattcaaaaaccaggctgtttttaaaagggaattttaaagctgacattgtgcatgtctgctccaaaccacgccatgacagatgcaagaattatgatttttaaattatttaaaggttttttaaatgtattatacagaggaaaaatatttcacatataatagtatatctatagctcttgctgatctcatgttaaaatttatcgtatatgaaagaagtctttaaacatagaaatctatttaaaactgaaaaactgtgttcaaaaatccaatctatcaatatcattagaaataatattataagcaaacatataccacctcacctattgctttctctgcactcatttacatttagtcttccattctgtcagaatctaagagcttcaacataaaagtatcttaatttataaagcaacaaaaaccacatatgaaaagtactaaaattttgtaaatacacaataatcctaataccttcgtacaaatgcatatgggcaactaatttctttttgatccaatgatgtctttttcagcttcttggagaatgaagtaatccagttaggaaatggtgtagtaacatatacaattgccctcaaatgtaaaatcaaatattattacattttgttctaattgaaatctgaagcatggtgtctgcacatcagcatagtgttaaatcttatagggcatgctggaattagctcagattataaaaatatttaacattttacattgttaataaagttttttagttaagctaagcttgtctcattttagatgactatgcagataagatttttccaacgtgtacttggtgtcttgtcttatgcttagactcttgaaagcaggacacattaagcaatactatattttagaaaggaggaagccacatgctttgtttttctgctcacagctttgttgtgatcttccttcactaaacttgtaacatggtacaaattttgttataccgtctcctgttcttcctttggcccatttcccagacagaatttcccatgggttgagagatcaagtctttgcactttttttcttgttttccatagtctgaaaaaccttcaagtcagacaggaggcaccagtgtccagtacaatagaaggatgagctagatgccgataagtggtttatccaagacacatctttagtcccaaccctgttctttaccaatacttatgtgcacaggcatttatatgtataccaatatttttacctaaaaactaaatatattaaggccttttgctttagtgaagatgaactactgtaataattattgtattaggttgaattatatgaaatttcctatatgtgactgttttgacctacaaaatggcaatttcttatagttcaccctaatatccaatgtggaaattatacttggaattgtcttctagctcttttgattgaaagtgaaagaattaaagggttggaagagaacgttatacaggtctctatttagatcataccagctggtttttggccttattctttgaatctagagttgtgttccaaggaaccagtaattaatgcatggttataggtatacctggcttcaaaaaaaagaagtagccgtggaaagctatatgagaaaatcacaattttctgaatcaaatatttgtaaaacaatttggctatttaaagactcttagggtaaatactccctggaaaagcaagcaatccagacttatctggtctgcaaaccttgatttcagcttaatatcctttcctgaatctaattcattttcacccactaaggtcatttcatttaagatccattgtttttgaaattttgaagtagcccagtttggcagctctcagcacctgcctctgccctctcctatacttcaactatattgaactctagcttcaatctagttcctactaatccatgcaaaagttattaactgataagcccaatcttgttcagcacgttcttctaaatgcctgacctaaataacttctgcttggttaacttgtgttcattctcaccttagcctcagtgtgaaagtaacacttaccttctgtgcaattgtcctttgtacaactgaagactgttaataaattcaggtctcacctccatgtctgaaaaggctatagtagctattcatggagatgggaatttgtctaattacctagccagagtttgcatatttaaggtaatatattcagctaccgtatcttttattcatagtgcctgttttccagcctttgatcagttttgtagttcccgtggataaactccaagatctaaagatcctctttcagtagcatatactaaaattaagtttagtgctcaaaaccctggtaacctacactggcccaaggttacagtaggtaattcaccgtctcacattagacaggccaatgcatcccttaggagctgccccactctcctctcacctaccaaaggattttctcaggtgtggttccaagcgataaagttctactgtctcggcttcctgctggtaattcgctttcagattagcaataacactgagctgatctctagggttaagaagagaacattgaactcattttgtcgcatgtacccacaggcttgaaacagaaaatgatgtaaacttttgtggcatacattcacccattttcccaccatatctttactatcctgtgttgatttttttttcaaattacaaagacaatacatgttctttgtgggaaatctgaaaaatactaccaaatagaaaataaaaatcacctgaattccaccacgaccacattgtttaaaaccacatttctgggttttaaatcagtcagtggctgggcccaaaggcacttttgggtaagataagtgaagaaatgcccacaaggccaaggtgtcacttaaaaaaacaaacaaaaaaaa

SEQ ID NO: 174846 - DNA, 5606 bp, Homo sapiens
  Payload ID: 14336
  Gene Symbol: RGS8
  Gene Name: regulator of G-protein signaling 8
  Uniprot ID: P57771
  ENST ID: ENST00000258302
  CDS Start-End: 91-687
gttcagggaccacgcttggagaaccactacactagggcaagcaggaagagagtcctccttctggaactgaagcaggcagtgtgaagacccatgtggaacaccttaacccgaagcctctctgaccatccagttggcaaagaccctcaggccatgaggactggccaaagacagaacaaagggatgaggactcgactgggatgcctgtctcacaagtcagactcgtgtagtgatttcacagctattcttccagacaaacccaaccgcgctctcaagagattatcgacagaagaagctacgaggtgggcagattcctttgatgtgcttctctctcataagtatggggtggctgcattccgtgccttcttgaagacggagttcagtgaggagaacctggaattctggttggcctgtgaggagttcaagaagaccaggtcaactgcaaaactggtctctaaggcccataggatctttgaggagtttgtggatgtgcaggctccacgggaggtaaacattgacttccagacccgagaagccacgaggaagaacctgcaggagccatccctgacttgctttgaccaagcccaaggaaaagtacacagcctcatggagaaagactcttaccccaggttcctgaggtccaaaatgtacttagatctgctgtcccaaagccagaggaggctcagttagacctcagaagggaactcctggaaatcaccggctttcccctccacttgctgccaagatcatattctaatgtgaaatgtcataggtgttcaaaagcggtggcattgggggtgggaggctgggggtgaggagggaatgaagggccattccaaagtatgacccagctgccggagcttggactctattccatttacccatgtttgtgttttggttagtggtagcgccttgccgctgtcacccttttctgggtcagcaacttgcccttcatataatgccttgggtcacctctgctgagagggcagatttgctgtgctaggctaatctgtaaataatgcaaatgcaattcccaccacctccacaccctcctcggttaggattcctgactctccacttgttgtaaatccctgggaggaatagctgaaagacttgggctcaactctgtgatttgtagtggccagctctgctcactgggatctcacagcttaggagagaggtttctgtggaattccaggtttctagttctgtcattgacaggtgacctctcagagaaggagtgaaatccatggagttgtttgtttcttccatttccattggaccagtgtgaaaaactgtgattacttcccatcttggcctaggaaattcacaagactaccctaaccttacatttccagaaagagtcttgggtgatgttcttcatgacttctgaagtggaactgccattaagaaagatacagcttgcaaatcttcctcaattctacgaagaacttttccagaagtcaagagacgagggcaagtagcaccagtagacttctattcaaaggggtaccatgtaacctgtctgttgctcagtgtcttctctgccctcacctctctgcagcatcatacatcactgatgtcttaggatgacagcttggcaaagggaggtgaattcctatagcatggagtgctcccatggtgcctaatactttccctgtatctccacctccccccttccatgccggtcatgtaattatgatgggggagaatgggaatttaggctgaaactctttccagcatacttcctgggaaaatgctttcttagaaagatctctctcttggatactatgaagcaccttctttcttgatctttgaccttttggaattgagcatgaaataggaggtgtggctaagaagatcactgtgaacatctggacgtggacaaccttcctaaaatgctttcatggtaccctgcagctgctcttggaaatgtgtcaggcaattcttccttggaggatgagtgagcagcctggaacctactctagccacccaggaaaaagctgactttggcacaagactagtgcccaggagatgaacctttagcagagagaccggaaagtgaaagaggggcatgtaagaggctggtttccaggtggagaggataacagagtggagttactattggaataattcacgaccagtggatttggattcattgcagatctacaaaacgttcagcttgactaagtggaacagcacatgattaggcataagctctggagtgcagatgattgagaactgggctgaaccattttccttttaaggggtgaggggccttttaacgttatgctggtggcgttctagtgcttgtgttcctctccagtaactttgagaatctcttccttttttagctatagctagaccaggccaagaaagcccttgagtcccactagtgctagggccactgcactgctacagcacattgttatctgtgagtgagggtgggtgtgactgtgtgaacctcaaggggagagaagaacacatgtctcctagccctcacagacaccgaaaagacctgtggaattttgtgtttgagaactccaaagcctcaaatgggtgttcctagttagatcaggtagtatcctcccaaccgtggttaaaaaaacaaatcattctttcttagataaagctgccagaattaatttaatgattaaattctctaacagggtattttaaacattgtttacatatgaaatgtgcatctgctgccaactctactgtcgaatatgaggtgcatataaattagaactgcacagagttatagaaatgtgaaacattctgaaaggggatttttctccacttccactattccaaggagaaaagcctgaacaagagtgtcgtgcgatggcctcatagagaggcctagagttcttgccaactattgaggaaacgaaggctgcagatggtggtgtcatggcgccctggtgacttcctcccacaatggggaggtgtgaaagaccaagcttggggatcctgaattttgcagctaagcaagggtatgtgggcatgtgtccatgtgtagaggaacgtgatagctaaatttatggtactcctgtggagtgtctctgtgtgtttgtgtgtgtgtgacaactgtgagcattagactagtacacggcagacatgatcttcccgtggggtggagctttcctcataccttgtatgccctgcttcccacaagaggcacagagctctccactctgatgcctactttcaggcactctggtcgtgccaacccagattttggtctgtgatgaaacaaagagaaatgtttacaacatctagagcaatatccaagcatacctcatccctgagcttccatgtttcccagtcctgccctctctcccattgcctcttccgcaagcccatgtccttgggtatcacttccatttatttcctgtcttccttggctcctcaagccgagcctgtgctgtggacttgccttctggacttgaggcttgctcagtcctgggcctatgcaggctccaggcaagccagggcagggcaagtccaggcaagtctaggcagagctgtgacttctagaattgctctccatccctgagtgatcttgccccactggagggctaacttgtttgggggctggtgtgagattcgtcattgcccttggcaaactaaatagaatactgtcagtatcaaccattcatggccttgggcacctctggggtgaggaagaatcctctgaggcagtccttctcattaaacttgagcatgcacaggaatcacctggaaagcctgtgacacgtgctaattcccaggtgcacacccagagatgctgatctgatagacctgagatggggcccagaaatccacatttttaataagttcctagatggctagtggcctgtggacttggactcttagacagagtctcacgaccttggctgctccttagaatcacctagggagtttttaaaacccagatgtccaggtcccaccccagaacagccaaatcagaagcttttgttagagacccaggcatcagtcatttttaaagctccacaggtgattccaatgtgcagctgaacttaggaagcattgagtctaaggagtgaggaggaacacagcgcgggggcgggggggctgggggaggggggagacacagctgtgtgggccaagggggctggtgtatctccacatgcaagcacgtagataccgaggaacctggccagccctgcagcctgactcgggatggctgcctctatgccctctgcgtctgactttctcctttgagataaaggtgttttggcccaagctgagtgcattgctgggcagcggccatgccgaaggtggtagctgaagggacccttgatcgaaagacgctctgccatgctttctgagtcctgtctcctccaagcttgtctcctagactgtttcccctgtctgttttcctgcgcccttgtgtttggccatttttgcattaggctgtgtctctgtacccaaggccacgtgacaaggtagttggaacccccactcaagtggtgagtgaagagcgtcgtggtaataataatagtagtaacacaacttccaaatttctcagtggagagtgtcacgtcctgggggtatcaagatctgtgaggcctttccaagccctcaccattccctctttggtcccacgttgggtgggcagctgggaaggtcctagttgattttaatctccggtgctttccccagaactgctgctctgaataaaccaaagctgtgaaagagtgttctgcgcaggctgcgggcccagcctctgggtgcaggccctgggcacttgagctgagcagctcagctggctctgctgtgagggaaagccgtgaacttaactgtgctgagagctgggtgagggcaaaatggggaagactgaagaagaaggagcaggtgggagagaccagccgctaacatggtgtctacttctccgtggatcagagaagggatgagtagcaaatgcagaggcagggtggtctcccagcaacaaggatgtccagagttctcctgaccctgtctgcacccacttccatgcaaggcagaggcatcacagttttccatcccaggccacccttcactcttccaagtgtcaggcctctttaaatctgcatccctttgggttagaagcaagagaggtggcaaagtctccctggcactgagagcctgtcccaccatgccactcggcatgagatggtggaggaagaagccaagagcagggatgccttcctgtccccgtggcctctcaggactccacaagatgctgtggaccaagatgagagatttcaggatggggccactggccttcctaggttgggctctgggtcctttcaataaactgttcctttcctgattcttactcccttctggtccttccactcccttccctctgccaggtatggaaaaggtggctgggctcggtgtgcgctccaaccccggtagcattagctgagtcacgcggcgagcacacaacagatttgtagcagctcatctgccatataaaccgcttggctgatggagtcctcattgagttttttcattatcgtgtaaagtggaatcatgtcattcacctttactataaacaaggctgtgagaacataataaacagaacctgaacaagc

SEQ ID NO: 174847 - DNA, 843 bp, Homo sapiens
  Payload ID: 14336
  Gene Symbol: RGS8
  Gene Name: regulator of G-protein signaling 8
  Uniprot ID: P57771
  ENST ID: ENST00000367556
  CDS Start-End: 301-843
gggaggtgtgttgtgcatgcctgtgtgtgtatatgtgtgtgtgtgcccctatgtgttcatgcacacatgcccttcactcgccgaggatttgactgctaaaagaaagatctactttttccccagaacaccttaacccgaagcctctctgaccatccagttggcaaagaccctcaggccatgaggactggccaaagacagtgagaggacgtgcaagggtaaattcctgagccccgcagtcttatttcctgccctgacgtccctgcataccagcccaagggttaaccgtaagctgatgcctgtatggcggccttactgatgccacgcaggaacaaagggatgaggactcgactgggatgcctgtctcacaagtcagactcgtgtagtgatttcacagctattcttccagacaaacccaaccgcgctctcaagagattatcgacagaagaagctacgaggtgggcagattcctttgatgtgcttctctctcataagtatggggtggctgcattccgtgccttcttgaagacggagttcagtgaggagaacctggaattctggttggcctgtgaggagttcaagaagaccaggtcaactgcaaaactggtctctaaggcccataggatctttgaggagtttgtggatgtgcaggctccacgggaggtaaacattgacttccagacccgagaagccacgaggaagaacctgcaggagccatccctgacttgctttgaccaagcccaaggaaaagtacacagcctcatggagaaagactcttaccccaggttcctgaggtccaaaatgtacttagatctgctgtcccaaagccagaggaggctcagttag

SEQ ID NO: 174848 - DNA, 859 bp, Homo sapiens
  Payload ID: 14336
  Gene Symbol: RGS8
  Gene Name: regulator of G-protein signaling 8
  Uniprot ID: P57771
  ENST ID: ENST00000367557
  CDS Start-End: 268-810
ggaccacgcttggagaaccactacactagggcaagcaggaagagagtcctccttctggaactgaagcaggcagtgtgaagacccatgtggaacaccttaacccgaagcctctctgaccatccagttggcaaagaccctcaggccatgaggactggccaaagacagtgagaggacgtgcaagggtaaattcctgagccccgcagtcttatttcctgccctgacgtccctgcataccagcccaagggttaaccgtaagctgatgcctgtatggcggccttactgatgccacgcaggaacaaagggatgaggactcgactgggatgcctgtctcacaagtcagactcgtgtagtgatttcacagctattcttccagacaaacccaaccgcgctctcaagagattatcgacagaagaagctacgaggtgggcagattcctttgatgtgcttctctctcataagtatggggtggctgcattccgtgccttcttgaagacggagttcagtgaggagaacctggaattctggttggcctgtgaggagttcaagaagaccaggtcaactgcaaaactggtctctaaggcccataggatctttgaggagtttgtggatgtgcaggctccacgggaggtaaacattgacttccagacccgagaagccacgaggaagaacctgcaggagccatccctgacttgctttgaccaagcccaaggaaaagtacacagcctcatggagaaagactcttaccccaggttcctgaggtccaaaatgtacttagatctgctgtcccaaagccagaggaggctcagttagacctcagaagggaactcctggaaatcaccggctttcccctccacttgct

SEQ ID NO: 174849 - DNA, 1432 bp, Homo sapiens
  Payload ID: 14336
  Gene Symbol: RGS8
  Gene Name: regulator of G-protein signaling 8
  Uniprot ID: P57771
  ENST ID: ENST00000483095
  CDS Start-End: 259-801
gcttcagtatttactggatgtgacaagcagagagaagagctttcagtggggccgcttgctgcctggctcaagtggtgggagaacaccttaacccgaagcctctctgaccatccagttggcaaagaccctcaggccatgaggactggccaaagacagtgagaggacgtgcaagggtaaattcctgagccccgcagtcttatttcctgccctgacgtccctgcataccagcccaagggttaaccgtaagctgatgcctgtatggcggccttactgatgccacgcaggaacaaagggatgaggactcgactgggatgcctgtctcacaagtcagactcgtgtagtgatttcacagctattcttccagacaaacccaaccgcgctctcaagagattatcgacagaagaagctacgaggtgggcagattcctttgatgtgcttctctctcataagtatggggtggctgcattccgtgccttcttgaagacggagttcagtgaggagaacctggaattctggttggcctgtgaggagttcaagaagaccaggtcaactgcaaaactggtctctaaggcccataggatctttgaggagtttgtggatgtgcaggctccacgggaggtaaacattgacttccagacccgagaagccacgaggaagaacctgcaggagccatccctgacttgctttgaccaagcccaaggaaaagtacacagcctcatggagaaagactcttaccccaggttcctgaggtccaaaatgtacttagatctgctgtcccaaagccagaggaggctcagttagacctcagaagggaactcctggaaatcaccggctttcccctccacttgctgccaagatcatattctaatgtgaaatgtcataggtgttcaaaagcggtggcattgggggtgggaggctgggggtgaggagggaatgaagggccattccaaagtatgacccagctgccggagcttggactctattccatttacccatgtttgtgttttggttagtggtagcgccttgccgctgtcacccttttctgggtcagcaacttgcccttcatataatgccttgggtcacctctgctgagagggcagatttgctgtgctaggctaatctgtaaataatgcaaatgcaattcccaccacctccacaccctcctcggttaggattcctgactctccacttgttgtaaatccctgggaggaatagctgaaagacttgggctcaactctgtgatttgtagtggccagctctgctcactgggatctcacagcttaggagagaggtttctgtggaattccaggtttctagttctgtcattgacaggtgacctctcagagaaggagtgaaatccatggagttgtttgtttcttccatttccattggaccagtgtgaaaaactgtgattacttcccatcttggccta

SEQ ID NO: 174850 - DNA, 563 bp, Homo sapiens
  Payload ID: 14336
  Gene Symbol: RGS8
  Gene Name: regulator of G-protein signaling 8
  ENST ID: ENST00000508450
  CDS Start-End: 393-563
ctttacgctccccactcccggtgcagcagccaaccttcagccagcagcggggctcattagaagagggtcccctggacacttgatttttagctcactggtgactggaaagagttaatacctattctttgctgccccccgcacagcctctgggtgcagagggaggcagctgtgggctgtggggacttctccctgagctgcagccagaggagcttcagaacaccttaacccgaagcctctctgaccatccagttggcaaagaccctcaggccatgaggactggccaaagacagtgagaggacgtgcaagggtaaattcctgagccccgcagtcttatttcctgccctgacgtccctgcataccagcccaagggttaaccgtaagctgatgcctgtatggcggccttactgatgccacgcaggaacaaagggatgaggactcgactgggatgcctgtctcacaagtcagactcgtgtagtgatttcacagctattcttccagacaaacccaaccgcgctctcaagagattatcgacagaagaagctacgaggtgggcagattccttt

SEQ ID NO: 174851 - DNA, 2375 bp, Homo sapiens
  Payload ID: 14337
  Gene Symbol: RGS9
  Gene Name: regulator of G-protein signaling 9
  Uniprot ID: O75916
  ENST ID: ENST00000262406
  CDS Start-End: 68-2092
gaacttggggggcttctcctcttgtctcccactggtgctctggctgtgaatccatccaggggccaggatgacaatccgacaccaaggccagcagtacaggccgaggatggcatttctccaaaagattgaagcgctcgtgaaggacatgcagaacccagagacaggggtccgaatgcagaaccagagggtcctggtcaccagcgttcctcatgccatgacaggaagtgatgttctgcaatggatcgtccagcggctttggatctccagtctggaggcacagaacttgggcaactttattgtcaggtatggctacatttaccccctgcaagaccccaagaatctcattctcaagcctgatggcagcctctacagatttcagacaccgtatttctggcccacccagcagtggccagctgaagataccgattacgccatctatctggccaagcgaaatatcaaaaagaaagggattttggaagaatatgaaaaggaaaattacaatttcttgaaccaaaaaatgaactataagtgggactttgtcattatgcaggccaaagagcagtacagggctggaaaggagaggaacaaagcagacagatatgccctggactgccaggagaaggcatactggctggtgcaccgatgccctcctggaatggacaatgtgctggactacggcctggaccgagtgaccaatccgaatgaagtcaaggtaaaccagaaacaaacagtcgttgctgtcaaaaaagagatcatgtattaccaacaggccttgatgaggtccacagtgaagtcttctgtgtccctgggagggattgtgaaatacagtgagcagttctcatccaacgatgccatcatgtcaggctgcctccccagcaacccctggatcaccgatgacacccagttctgggacttaaatgccaaattggtggaaatcccaaccaagatgcgagtggaacgatgggccttcaacttcagcgaattgatccgagaccccaaaggtcgacagagcttccagtacttcctcaagaaagaattcagtggagagaatctgggattctgggaagcctgcgaggatctgaagtatggagatcagtccaaagtcaaggagaaagcagaggagatttacaagctgttcctggccccgggggcgaggcgctggatcaacatagatggcaaaaccatggacatcacagtgaaggggctgaagcacccccaccgctatgtgctggacgccgcacaaacccacatttacatgctcatgaagaaggattcttatgctcgctatttaaaatctccgatctataaggacatgctggccaaagctattgaacctcaggaaaccaccaagaaaagctccaccctcccttttatgcggcgtcacctgcgctccagcccaagccctgtcatcctgagacagctggaagaggaagccaaggcccgagaagcagccaacactgtggacatcacccagccgggccagcacatggctcccagcccccatctgaccgtgtacaccgggacctgcatgcccccgtctccttctagccccttctcctcctcctgccgctcccccaggaagcctttcgcctcacccagccgcttcatccggcgacccagcaccaccatctgcccctcacccatcagagtggccttggagagctcatcgggcttggagcagaaaggggagtgcagcgggtccatggccccccgtgggccctctgtcaccgagagcagcgaggcctccctcgacacctcctggcctcgcagccggcccagggcccctcctaaggcccgcatggctctgtccttcagcaggtttctgagacgaggctgtctggcctcacctgtctttgccaggctctcacccaagtgccctgctgtgtcccacgggagggtgcagcccctgggggacgtgggccagcagctgccacgattgaaatccaagagagtagcaaactttttccagatcaaaatggatgtgcccacggggagcgggacctgcttgatggactcggaggatgctggaacaggagagtcgggtgaccgggccacagaaaaggaggtcatctgcccctgggagagcctgtaaggaaagaggcaggctgagctgggggctctggaccaggaagatgctctgacagatgccatggtatgggccacaggacacacttgctcgagaaccaaagtgcatttgggtgacatttgaagattggggagacaagatggggtagattgtggcaaagaatgctctggctggttaccaggggccaactccttctcctcttcctgaccctccctcccctgggcagaagaaacgcatgtggaccagaagactttccctgctgccttaaaaccaataaaaggttaacttt

SEQ ID NO: 174852 - DNA, 2384 bp, Homo sapiens
  Payload ID: 14337
  Gene Symbol: RGS9
  Gene Name: regulator of G-protein signaling 9
  Uniprot ID: O75916
  ENST ID: ENST00000449996
  CDS Start-End: 73-2088
ctttcgaacttggggggcttctcctcttgtctcccactggtgctctggctgtgaatccatccaggggccaggatgacaatccgacaccaaggccagcagtacaggccgaggatggcatttctccaaaagattgaagcgctcgtgaaggacatgcagaacccagagacaggggtccgaatgcagaaccagagggtcctggtcaccagcgttcctcatgccatgacaggaagtgatgttctgcaatggatcgtccagcggctttggatctccagtctggaggcacagaacttgggcaactttattgtcaggtatggctacatttaccccctgcaagaccccaagaatctcattctcaagcctgatggcagcctctacagatttcagacaccgtatttctggcccacccagcagtggccagctgaagataccgattacgccatctatctggccaagcgaaatatcaaaaagaaagggattttggaagaatatgaaaaggaaaattacaatttcttgaaccaaaaaatgaactataagtgggactttgtcattatgcaggccaaagagcagtacagggctggaaaggagaggaacaaagcagacagatatgccctggactgccaggagaaggcatactggctggtgcaccgatgccctcctggaatggacaatgtgctggactacggcctggaccgagtgaccaatccgaatgaagtcaagaaacaaacagtcgttgctgtcaaaaaagagatcatgtattaccaacaggccttgatgaggtccacagtgaagtcttctgtgtccctgggagggattgtgaaatacagtgagcagttctcatccaacgatgccatcatgtcaggctgcctccccagcaacccctggatcaccgatgacacccagttctgggacttaaatgccaaattggtggaaatcccaaccaagatgcgagtggaacgatgggccttcaacttcagcgaattgatccgagaccccaaaggtcgacagagcttccagtacttcctcaagaaagaattcagtggagagaatctgggattctgggaagcctgcgaggatctgaagtatggagatcagtccaaagtcaaggagaaagcagaggagatttacaagctgttcctggccccgggggcgaggcgctggatcaacatagatggcaaaaccatggacatcacagtgaaggggctgaagcacccccaccgctatgtgctggacgccgcacaaacccacatttacatgctcatgaagaaggattcttatgctcgctatttaaaatctccgatctataaggacatgctggccaaagctattgaacctcaggaaaccaccaagaaaagctccaccctcccttttatgcggcgtcacctgcgctccagcccaagccctgtcatcctgagacagctggaagaggaagccaaggcccgagaagcagccaacactgtggacatcacccagccgggccagcacatggctcccagcccccatctgaccgtgtacaccgggacctgcatgcccccgtctccttctagccccttctcctcctcctgccgctcccccaggaagcctttcgcctcacccagccgcttcatccggcgacccagcaccaccatctgcccctcacccatcagagtggccttggagagctcatcgggcttggagcagaaaggggagtgcagcgggtccatggccccccgtgggccctctgtcaccgagagcagcgaggcctccctcgacacctcctggcctcgcagccggcccagggcccctcctaaggcccgcatggctctgtccttcagcaggtttctgagacgaggctgtctggcctcacctgtctttgccaggctctcacccaagtgccctgctgtgtcccacgggagggtgcagcccctgggggacgtgggccagcagctgccacgattgaaatccaagagagtagcaaactttttccagatcaaaatggatgtgcccacggggagcgggacctgcttgatggactcggaggatgctggaacaggagagtcgggtgaccgggccacagaaaaggaggtcatctgcccctgggagagcctgtaaggaaagaggcaggctgagctgggggctctggaccaggaagatgctctgacagatgccatggtatgggccacaggacacacttgctcgagaaccaaagtgcatttgggtgacatttgaagattggggagacaagatggggtagattgtggcaaagaatgctctggctggttaccaggggccaactccttctcctcttcctgaccctccctcccctgggcagaagaaacgcatgtggaccagaagactttccctgctgccttaaaaccaataaaaggttaactttaagtttcttggaa

SEQ ID NO: 174853 - DNA, 2078 bp, Homo sapiens
  Payload ID: 14337
  Gene Symbol: RGS9
  Gene Name: regulator of G-protein signaling 9
  ENST ID: ENST00000443584
  CDS Start-End: 94-1980
ggctggggcgagccaggctgcctttcgaacttggggggcttctcctcttgtctcccactggtgctctggctgtgaatccatccaggggccaggatgacaatccgacaccaaggccagcagtacaggccgaggatggcatttctccaaaagattgaagcgctcgtgaaggacatgcagaacccagagacaggggtccgaatgcagaaccagagggtcctggtcaccagcgttcctcatgccatgacaggaagtgatgttctgcaatggatcgtccagcggctttggatctccagtctggaggcacagaacttgggcaactttattgtcaggtatggctacatttaccccctgcaagaccccaagaatctcattctcaagcctgatggcagcctctacagatttcagacaccgtatttctggcccacccagcagtggccagctgaagataccgattacgccatctatctggccaagcgaaatatcaaaaagaaagggattttggaagaatatgaaaaggaaaattacaatttcttgaaccaaaaaatgaactataagtgggactttgtcattatgcaggccaaagagcagtacagggctggaaaggagaggaacaaagcagacagatatgccctggactgccaggagaaggcatactggctggtgcaccgatgccctcctggaatggacaatgtgctggactacggcctggaccgagtgaccaatccgaatgaagtcaagaaacaaacagtcgttgctgtcaaaaaagagatcatgtattaccaacaggccttgatgaggtccacagtgaagtcttctgtgtccctgggagggattgtgaaatacagtgagcagttctcatccaacgatgccatcatgtcaggctgcctccccagcaacccctggatcaccgatgacacccagttctgggacttaaatgccaaattggtggaaatcccaaccaagatgcgagtggaacgatgggccttcaacttcagcgaattgatccgagaccccaaaggtcgacagagcttccagtacttcctcaagaaagaattcagtggagagaatctgggattctgggaagcctgcgaggatctgaagtatggagatcagtccaaagtcaaggagaaagcagaggagatttacaagctgttcctggccccgggggcgaggcgctggatcaacatagatggcaaaaccatggacatcacagtgaaggggctgaagcacccccaccgctatgtgctggacgccgcacaaacccacatttacatgctcatgaagaaggattcttatgctcgctatttaaaatctccgatctataaggacatgctggccaaagctattgaacctcaggaaaccaccaagaaaagctccaccctcccttttatgcggcgtcacctgcgctccagcccaagccctgtcatcctgagacagctggaagaggaagccaaggcccgagaagcagccaacactgtggacatcacccagccgggccagcacatggctcccagcccccatctgaccgtgtacaccgggacctgcatgcccccgtctccttctagccccttctcctcctcctgccgctcccccaggaagcctttcgcctcacccagccgcttcatccggcgacccagcaccaccatctgcccctcacccatcagagtggccttggagagctcatcgggcttggagcagaaaggggagtgcagcgggtccatggccccccgtgggccctctgtcaccgagagcagcgaggcctccctcgacacctcctggcctcgcagccggcccagggcccctcctaaggcccgcatggctctgtccttcagcaggtttctgagacgaggctgtctggcctcacctgtctttgccaggctctcacccaagtgccctgctgtgtcccacgggagggtgcagcccctgggggacgtgggccagcagctgccacgattgaaatccaagagagtagcaaagtaagaacccgaaggggacgtgccgtatgcatgggtggctgtgggtgtgcaggcctctgcatgtgaatatgcatgctttgggctggggactgggatgggtga

SEQ ID NO: 174854 - DNA, 2387 bp, Homo sapiens
  Payload ID: 14337
  Gene Symbol: RGS9
  Gene Name: regulator of G-protein signaling 9
  ENST ID: ENST00000584234
  CDS Start-End: 88-1572
ggcgagccaggctgcctttcgaacttggggggcttctcctcttgtctcccactggtgctctggctgtgaatccatccaggggccaggatgacaatccgacaccaaggccagcagtacaggccgaggatggcatttctccaaaagattgaagcgctcgtgaaggacatgcagaacccagagacaggggtccgaatgcagaaccagagggtcctggtcaccagcgttcctcatgccatgacaggaagtgatgttctgcaatggatcgtccagcggctttggatctccagtctggaggcacagaacttgggcaactttattgtcaggtatggctacatttaccccctgcaagaccccaagaatctcattctcaagcctgatggcagcctctacagatttcagacaccgtatttctggcccacccagcagtggccagctgaagataccgattacgccatctatctggccaagcgaaatatcaaaaagaaagggattttggaagaatatgaaaaggaaaattacaatttcttgaaccaaaaaatgaactataagtgggactttgtcattatgcaggccaaagagcagtacagggctggaaaggagaggaacaaagcagacagatatgccctggactgccaggagaaggcatactggctggtgcaccgatgccctcctggaatggacaatgtgctggactacggcctggaccgagtgaccaatccgaatgaagtcaaggtaaaccagaaacaaacagtcgttgctgtcaaaaaagagatcatgtattaccaacaggccttgatgaggtccacagtgaagtcttctgtgtccctgggagggattgtgaaatacagtgagcagttctcatccaacgatgccatcatgtcaggctgcctccccagcaacccctggatcaccgatgacacccagttctgggacttaaatgccaaattggtggaaatcccaaccaagatgcgagtggaacgatgggccttcaacttcagcgaattgatccgagaccccaaaggtcgacagagcttccagtacttcctcaagaaagaattcagtggagagaatctgggattctgggaagcctgcgaggatctgaagtatggagatcagtccaaagtcaaggagaaagcagaggagatttacaagctgttcctggccccgggggcgaggcgctggatcaacatagatggcaaaaccatggacatcacagtgaaggggctgaagcacccccaccgctatgtgctggacgccgcacaaacccacatttacatgctcatgaagaaggattcttatgctcgctatttaaaatctccgatctataaggacatgctggccaaagctattgaacctcaggaaaccaccaagaaaaggcaactccaccctcccttttatgcggcgtcacctgcgctccagcccaagccctgtcatcctgagacagctggaagaggaagccaaggcccgagaagcagccaacactgtggacatcacccagccgggccagcacatggctcccagcccccatctgaccgtgtacaccgggacctgcatgcccccgtctccttctagccccttctcctcctcctgccgctcccccaggaagcctttcgcctcacccagccgcttcatccggcgacccagcaccaccatctgcccctcacccatcagagtggccttggagagctcatcgggcttggagcagaaaggggagtgcagcgggtccatggccccccgtgggccctctgtcaccgagagcagcgaggcctccctcgacacctcctggcctcgcagccggcccagggcccctcctaaggcccgcatggctctgtccttcagcaggtttctgagacgaggctgtctggcctcacctgtctttgccaggctctcacccaagtgccctgctgtgtcccacgggagggtgcagcccctgggggacgtgggccagcagctgccacgattgaaatccaagagagtagcaaactttttccagatcaaaatggatgtgcccacggggagcgggacctgcttgatggactcggaggatgctggaacaggagagtcgggtgaccgggccacagaaaaggaggtcatctgcccctgggagagcctgtaaggaaagaggcaggctgagctgggggctctggaccaggaagatgctctgacagatgccatggtatgggccacaggacacacttgctcgagaaccaaagtgcatttgggtgacatttgaagattggggagacaagatggggtagattgtggcaaagaatgctctggctggttaccaggggccaactccttctcctcttcctgaccctccctcccctgggcagaagaaacgcatgtggaccagaagactttccctgctgccttaaaaccaataa

SEQ ID NO: 174855 - DNA, 2084 bp, Homo sapiens
  Payload ID: 14338
  Gene Symbol: RGSL1
  Gene Name: regulator of G-protein signaling like 1
  ENST ID: ENST00000415960
  CDS Start-End: 1-90
gcccagaaggagatttgcaagatgctcagtccctggtatgatgagtttctagatgaagaggactactggtttctcctttttacgacataactaaaatgtcctttgaggagctttgctacaagaacccaaagatggccatacagaagatcagtgatgactacaaaatatactgtgagaaagcacctaaaatagattttaaaatggaaattatcaaggaaacaaagacagtttcacgctcaaataggaaaatgtccttgctcaaaagaactcttgtaaggaagccatcaatgagacccagaaacttgacagaagtcctcttaaatacacagcacttggagttcttcagggagttcctcaaggaacggaaggctaaaatcccattgcaatttctcacagctgtacagaagatcagtatagagaccaatgaaaagatttgcaagtctctcatagaaaatgtaatcaagactttcttccaaggccaactctctcctgaagaaatgctgcagtgtgatgcccctattatcaaagaaatcgcttccatgcgtcatgtcaccacaagcacactgttaacgctccagggacatgttatgaaatctatagaagaaaagtggtttaaagattatcaagacctgttcccacctcaccatcaggaggtggaagtgcaaagtgaagtacaaatttcgtctaggaagccctcaaagatagtgtcaacttacctacaggaatcccagaagaaaggctggatgagaatgatcagctttatcaggagtttttgcaagtaccgcagatttatgttgaatcctagtaagcgccaggaatttgaagactatcttcaccaggaaatgcaaaatagcaaggaaaatttcaccacagcacacaacacatcgggacgttcagctccaccctccacaaatgtccggagtgcagaccaagagaatggagaaataacccttgtaaagcgtcgtatatttggccacaggattatcactgtcaactttgcgatcaatgatctatatttcttttctgaaatggagaaatttaatgatctggtcagttcagcccacatgctgcaggtcaaccgggcatataatgagaatgatgtgatcctaatgcggtccaaaatgaacattatccaaaaactcttcctgaattctgacatccctccaaagctgagggtgaatgtccctgagttccagaaggatgccatccttgctgccatcacagagggctacctagatcggagcgtcttccatggggctatcatgtctgtcttccccgttgttatgtacttctggaaaaggttttgtttctggaaggcaacccgctcttacttacagtatagggggaagaagttcaaggacagaaaaagccctcctaaatctacggacaagtatcctttctcgagtggaggagacaatgccatcttaaggttcaccttgctcagaggtattgagtggttgcagcctcaacgggaagcaataagttcagttcaaaattcttcatcaagcaaacttactcagccaagactcgtggtatctgccatgcagctgcatcccgtccagggacaaaaattatcctacatcaaaaaagagaagtaatcaagcgagacccccagcagagataaatcatctcttagaggcctcctaacactgacagaaacttttctggtcaaaaatgaaaggtcctggtaccatcttccccagaaacgatcaagaagggcaatgggttgacagcccagatatggcaggaccagactgcaatgggaatctcatacagcccattcagactaaagggtgatggaaagaagcagaggaaagcagaaacagcaagagtgactgagacctgctgtcatctatatagaagcctttctgatacatgtcagagagtgacatgaagtctcccctctttatacacacgtatgaaaatacatctatccctcattttgagagcctccaactgatccaagtgtcatccggaggaggaggtggcccgtatgtgcaggacctcagggtgccagccctcacccatacacctccagggctgcaggtcattagccagaataaaggatgtccacattcacaatc

SEQ ID NO: 174856 - DNA, 767 bp, Homo sapiens
  Payload ID: 14338
  Gene Symbol: RGSL1
  Gene Name: regulator of G-protein signaling like 1
  ENST ID: ENST00000437548
  CDS Start-End: 576-767
actaacatcagatgcaacctaggcaagggttctcttatgttctgctctgggaagcatttgaagtatttcagttgtgagtaccactccagccaatgagagaaccagatggagagaaggccatgtgaggaatgggttgaagaattgcctggtgactagccagtggggttggagagataattggttctacaaatcttataattctgctagaggatgaagtctttgccgattttttcaacacatttctttccctcccggtttttggtcagacaccattttatactgttgaaaattcacagtggagcttgtggccagaaataccttgtaacttgattgccaaatacaaagggttattgacctggttggaaaaatgccgattacctttcttctgtaaaacaaacttgtgtttccattacattctctgtcaggagttcatcagtttcattaagtccccagaaggagaagccagagtgagcctcttaaaaagtaattggtggtggtgctggagggactcccaggaagatgatgaaataggaagcactaggaatctgtttcctcatctagacaacaattccaagatgatgagatggaaaaaggcagaccagtggctactccagaaatgcattggcggggtcagagggatgtggcgcttctattcctacctcacaggcagtgcaggtgaagaattggtggatttctggatccttgctgagaacatcctgagcatagatgagatggacctggaagtgagagactactacctgtccctc

SEQ ID NO: 174857 - DNA, 555 bp, Homo sapiens
  Payload ID: 14338
  Gene Symbol: RGSL1
  Gene Name: regulator of G-protein signaling like 1
  ENST ID: ENST00000447374
  CDS Start-End: 467-555
acactaacatcagatgcaacctaggcaagggttctcttatgttctgctctgggaagcatttgaagtatttcagttgtgagtaccactccagccaatgagagaaccagatggagagaaggccatgtgaggaatgggttgaagaattgcctggtgactagccagtggggttggagagataattggttctacaaatcttataattctgctagaggatgaagtctttgccgattttttcaacacatttctttccctcccggtttttggtcagacaccattttatactgttgaaaattcacagtggagcttgtggccagaaataccttgtaacttgattgccaaatacaaagggttattgacctggttggaaaaatgccgattacctttcttctgtaaaacaaacttgtgtttccattacattctctgtcaggagttcatcagtttcattaagtccccagaaggagccaagatgatgagatggaaaaaggcagaccagtggctactccagaaatgcattggcggggtcagagggatgtggcgcttctattcctacctcac

SEQ ID NO: 174858 - DNA, 731 bp, Homo sapiens
  Payload ID: 14338
  Gene Symbol: RGSL1
  Gene Name: regulator of G-protein signaling like 1
  ENST ID: ENST00000422241
  CDS Start-End: 23-487
gtgtcaggaagagcatggcaacatgagcagtgctgagataattggttctacaaatcttataattctgctagaggatgaagtctttgccgattttttcaacacatttctttccctcccggtttttggtcagacaccattttatactgttgaaaattcacagtggagcttgtggccagaaataccttgtaacttgattgccaaatacaaagggttattgacctggttggaaaaatgccgattacctttcttctgtaaaacaaacttgtgtttccattacattctctgtcaggagttcatcagtttcattaagtccccagaaggagaagccagagtgagcctcttaaaaagtaattggtggtggtgctggagggactcccaggaagatgatgaaataggaagcactaggaatctgtttcctcatctagacaacaattgtactggcagaatctgtatgatatgctcagtccctggtatgatgagtttctagatgaagaggactactggtttctcctttttacgagtcaaccaaagatcagcatggtccctgttgttctaaagctaaacctctcaaggaaaaggactcagtgcataagatgactttgacacagaacaggttcatcagctccagacagcataaaagagaatttataggcaaagaagagaacattcttctttataagaggattcagcagtctctagagttaagccaggctttggctgacatgaaggaa

SEQ ID NO: 174859 - DNA, 3676 bp, Homo sapiens
  Payload ID: 14338
  Gene Symbol: RGSL1
  Gene Name: regulator of G-protein signaling like 1
  ENST ID: ENST00000443996
  CDS Start-End: 21-2975
gtcaggaagagcatggcaacatgagcagtgctgagataattggttctacaaatcttataattctgctagaggatgaagtctttgccgattttttcaacacatttctttccctcccggtttttggtcagacaccattttatactgttgaaaattcacagtggagcttgtggccagaaataccttgtaacttgattgccaaatacaaagggttattgacctggttggaaaaatgccgattacctttcttctgtaaaacaaacttgtgtttccattacattctctgtcaggagttcatcagtttcattaagtccccagaaggagccaagatgatgagatggaaaaaggcagaccagtggctactccagaaatgcattggcggggtcagagggatgtggcgcttctattcctacctcacaggcagtgcaggtgaagaattggtggatttctggatccttgctgagaacatcctgagcatagatgagatggacctggaagtgagagactactacctgtccctcctcctcatgctgagggccactcatctgcaggagggctccagggtggtaaccctctgtaacatgaacatcaagtccctcctgaacctctccatctggcatcccaaccaatcaaccactaggagggagatcctgagccacatgcagaaagtggctctgttcaaactccagagctattggcttcccaacttttacacccacaccaagatgaccatggccaaggaggaagcatgccatggtctgatgcaagagtacgagactcgcttatacagcgtttgctacacccacataggagggctccctctgaacatgagcatcaagaagtgccaccactttcagaaacggtactcaagcaggaaagccaagaggaagatgtggcaattggtagatcctgactcttggtctctggaaatggatctcaagccagatgctattggtatgcccctacaggagacatgtcctcaagagaaggtggttatacaaatgccttccctgaaaatggcttcttcaaaggaaacaagaatcagttccctggaaaaggatatgcattatgcaaaaatatccagcatggagaataaagccaagagccacctccacatggaagccccctttgagacaaaggtctctacccacctgaggactgtcatccccattgtcaatcactcctccaagatgacaattcagaaggccatcaagcaaagcttctccttaggatacatccacttggccttgtgtgctgatgcctgtgcagggaaccctttccgggaccacctgaagaagctgaatttgaaagtggagatccaacttcttgacctctggcaggacttgcagcatttcctcagtgtccttctgaataacaaaaagaatgggaatgcaatctttcgtcacttgctgggtgacagaatctgcgagctctacctgaatgagcagattggtccgtgcttaccactcaaatcccaaaccattcagggcctgaaggaactattgccctctggggatgtgatcccctggattcccaaagcccagaaggagatttgcaagatgctcagtccctggtatgatgagtttctagatgaagaggactactggtttctcctttttacgacacagaacaggttcatcagctccagacagcataaaagagaatttataggcaaagaagagaacattcttctttataagaggattcagcagtctctagagttaagccaggctttggctgacatgaaggaaatggactataggcagtggcgaaagatagctactgaggacctgaagcaaggaggctctctccaggtagagctgacatctccagtgtttctaacagacataactaaaatgtcctttgaggagctttgctacaagaacccaaagatggccatacagaagatcagtgatgactacaaaatatactgtgagaaagcacctaaaatagattttaaaatggaaattatcaaggaaacaaagacagtttcacgctcaaataggaaaatgtccttgctcaaaagaactcttgtaaggaagccatcaatgagacccagaaacttgacagaagtcctcttaaatacacagcacttggagttcttcagggagttcctcaaggaacggaaggctaaaatcccattgcaatttctcacagctgtacagaagatcagtatagagaccaatgaaaagatttgcaagtctctcatagaaaatgtaatcaagactttcttccaaggccaactctctcctgaagaaatgctgcagtgtgatgcccctattatcaaagaaatcgcttccatgcgtcatgtcaccacaagcacactgttaacgctccagggacatgttatgaaatctatagaagaaaagtggtttaaagattatcaagacctgttcccacctcaccatcaggaggtggaagtgcaaagtgaagtacaaatttcgtctaggaagccctcaaagatagtgtcaacttacctacaggaatcccagaagaaaggctggatgagaatgatcagctttatcaggagtttttgcaagtaccgcagatttatgttgaatcctagtaagcgccaggaatttgaagactatcttcaccaggaaatgcaaaatagcaaggaaaatttcaccacagcacacaacacatcgggacgttcagctccaccctccacaaatgtccggagtgcagaccaagagaatggagaaataacccttgtaaagcgtcgtatatttggccacaggattatcactgtcaactttgcgatcaatgatctatatttcttttctgaaatggagaaatttaatgatctggtcagttcagcccacatgctgcaggtcaaccgggcatataatgagaatgatgtgatcctaatgcggtccaaaatgaacattatccaaaaactcttcctgaattctgacatccctccaaagctgagggttttgtttctggaaggcaacccgctcttacttacagtatagggggaagaagttcaaggacagaaaaagccctcctaaatctacggacaagtatcctttctcgagtggaggagacaatgccatcttaaggttcaccttgctcagaggtattgagtggttgcagcctcaacgggaagcaataagttcagttcaaaattcttcatcaagcaaacttactcagccaagactcgtggtatctgccatgcagctgcatcccgtccagggacaaaaattatcctacatcaaaaaagagaagtaatcaagcgagacccccagcagagataaatcatctcttagaggcctcctaacactgacagaaacttttctggtcaaaaatgaaaggtcctggtaccatcttccccagaaacgatcaagaagggcaatgggttgacagcccagatatggcaggaccagactgcaatgggaatctcatacagcccattcagactaaagggtgatggaaagaagcagaggaaagcagaaacagcaagagtgactgagacctgctgtcatctatatagaagcctttctgatacatgtcagagagtgacatgaagtctcccctctttatacacacgtatgaaaatacatctatccctcattttgagagcctccaactgatccaagtgtcatccggaggaggaggtggcccgtatgtgcaggacctcagggtgccagccctcacccatacacctccagggctg

SEQ ID NO: 174860 - DNA, 3696 bp, Homo sapiens
  Payload ID: 14338
  Gene Symbol: RGSL1
  Gene Name: regulator of G-protein signaling like 1
  Uniprot ID: A5PLK6
  ENST ID: ENST00000294854
  CDS Start-End: 21-3251
gtcaggaagagcatggcaacatgagcagtgctgagataattggttctacaaatcttataattctgctagaggatgaagtctttgccgattttttcaacacatttctttccctcccggtttttggtcagacaccattttatactgttgaaaattcacagtggagcttgtggccagaaataccttgtaacttgattgccaaatacaaagggttattgacctggttggaaaaatgccgattacctttcttctgtaaaacaaacttgtgtttccattacattctctgtcaggagttcatcagtttcattaagtccccagaaggaggtgaagaattggtggatttctggatccttgctgagaacatcctgagcatagatgagatggacctggaagtgagagactactacctgtccctcctcctcatgctgagggccactcatctgcaggagggctccagggtggtaaccctctgtaacatgaacatcaagtccctcctgaacctctccatctggcatcccaaccaatcaaccactaggagggagatcctgagccacatgcagaaagtggctctgttcaaactccagagctattggcttcccaacttttacacccacaccaagatgaccatggccaaggaggaagcatgccatggtctgatgcaagagtacgagactcgcttatacagcgtttgctacacccacataggagggctccctctgaacatgagcatcaagaagtgccaccactttcagaaacggtactcaagcaggaaagccaagaggaagatgtggcaattggtagatcctgactcttggtctctggaaatggatctcaagccagatgctattggtatgcccctacaggagacatgtcctcaagagaaggtggttatacaaatgccttccctgaaaatggcttcttcaaaggaaacaagaatcagttccctggaaaaggatatgcattatgcaaaaatatccagcatggagaataaagccaagagccacctccacatggaagccccctttgagacaaaggtctctacccacctgaggactgtcatccccattgtcaatcactcctccaagatgacaattcagaaggccatcaagcaaagcttctccttaggatacatccacttggccttgtgtgctgatgcctgtgcagggaaccctttccgggaccacctgaagaagctgaatttgaaagtggagatccaacttcttgacctctggcaggacttgcagcatttcctcagtgtccttctgaataacaaaaagaatgggaatgcaatctttcgtcacttgctgggtgacagaatctgcgagctctacctgaatgagcagattggtccgtgcttaccactcaaatcccaaaccattcagggcctgaaggaactattgccctctggggatgtgatcccctggattcccaaagcccagaaggagatttgcaagatgctcagtccctggtatgatgagtttctagatgaagaggactactggtttctcctttttacgacacagaacaggttcatcagctccagacagcataaaagagaatttataggcaaagaagagaacattcttctttataagaggattcagcagtctctagagttaagccaggctttggctgacatgaaggaaatggactataggcagtggcgaaagatagctactgaggacctgaagcaaggaggctctctccaggtagagctgacatctccagtgtttctaacagacataactaaaatgtcctttgaggagctttgctacaagaacccaaagatggccatacagaagatcagtgatgactacaaaatatactgtgagaaagcacctaaaatagattttaaaatggaaattatcaaggaaacaaagacagtttcacgctcaaataggaaaatgtccttgctcaaaagaactcttgtaaggaagccatcaatgagacccagaaacttgacagaagtcctcttaaatacacagcacttggagttcttcagggagttcctcaaggaacggaaggctaaaatcccattgcaatttctcacagctgtacagaagatcagtatagagaccaatgaaaagatttgcaagtctctcatagaaaatgtaatcaagactttcttccaaggccaactctctcctgaagaaatgctgcagtgtgatgcccctattatcaaagaaatcgcttccatgcgtcatgtcaccacaagcacactgttaacgctccagggacatgttatgaaatctatagaagaaaagtggtttaaagattatcaagacctgttcccacctcaccatcaggaggtggaagtgcaaagtgaagtacaaatttcgtctaggaagccctcaaagatagtgtcaacttacctacaggaatcccagaagaaaggctggatgagaatgatcagctttatcaggagtttttgcaagtaccgcagatttatgttgaatcctagtaagcgccaggaatttgaagactatcttcaccaggaaatgcaaaatagcaaggaaaatttcaccacagcacacaacacatcgggacgttcagctccaccctccacaaatgtccggagtgcagaccaagagaatggagaaataacccttgtaaagcgtcgtatatttggccacaggattatcactgtcaactttgcgatcaatgatctatatttcttttctgaaatggagaaatttaatgatctggtcagttcagcccacatgctgcaggtcaaccgggcatataatgagaatgatgtgatcctaatgcggtccaaaatgaacattatccaaaaactcttcctgaattctgacatccctccaaagctgagggtgaatgtccctgagttccagaaggatgccatccttgctgccatcacagagggctacctagatcggagcgtcttccatggggctatcatgtctgtcttccccgttgttatgtacttctggaaaaggttttgtttctggaaggcaacccgctcttacttacagtatagggggaagaagttcaaggacagaaaaagccctcctaaatctacggacaagtatcctttctcgagtggaggagacaatgccatcttaaggttcaccttgctcagaggtattgagtggttgcagcctcaacgggaagcaataagttcagttcaaaattcttcatcaagcaaacttactcagccaagactcgtggtatctgccatgcagctgcatcccgtccagggacaaaaattatcctacatcaaaaaagagaagtaatcaagcgagacccccagcagagataaatcatctcttagaggcctcctaacactgacagaaacttttctggtcaaaaatgaaaggtcctggtaccatcttccccagaaacgatcaagaagggcaatgggttgacagcccagatatggcaggaccagactgcaatgggaatctcatacagcccattcagactaaagggtgatggaaagaagcagaggaaagcagaaacagcaagagtgactgagacctgctgtcatctatatagaagcctttctgatacatgtcagagagtgacatgaagtctcccctctttatacacacgtatgaaaatacatctatccctcattttgagagcctccaactgatccaagtgtcatccggaggaggaggtggcccgtatgtgcaggacctcagggtgccagccctcacccatacacctccagggctg

SEQ ID NO: 174861 - DNA, 708 bp, Homo sapiens
  Payload ID: 14338
  Gene Symbol: RGSL1
  Gene Name: regulator of G-protein signaling like 1
  ENST ID: ENST00000416676
  CDS Start-End: 18-500
aggaagagcatggcaacatgagcagtgctgagataattggttctacaaatcttataattctgctagaggatgaagtctttgccgattttttcaacacatttctttccctcccggtttttggtcagacaccattttatactgttgaaaattcacagtggagcttgtggccagaaataccttgtaacttgattgccaaatacaaagggttattgacctggttggaaaaatgccgattacctttcttctgtaaaacaaacttgtgtttccattacattctctgtcaggagttcatcagtttcattaagtccccagaaggaggtgaagaattggtggatttctggatccttgctgagaacatcctgagcatagatgagatggacctggaagtgagagactactacctgtccctcctcctcatgctgagggccactcatctgcaggagggctccagggtggtaaccctctgtaacatgaacatcaatgctcagtccctggtatgatgagtttctagatgaagaggactactggtttctcctttttacgagtcaaccaaagatcagcatggtccctgttgttctaaagctaaacctctcaaggaaaaggactcagtgcataagatgactttgacacagaacaggttcatcagctccagacagcataaaagagaatttataggcaaagaagagaacattcttctttataagagga

SEQ ID NO: 174862 - DNA, 481 bp, Homo sapiens
  Payload ID: 14338
  Gene Symbol: RGSL1
  Gene Name: regulator of G-protein signaling like 1
  ENST ID: ENST00000634758
  CDS Start-End: 238-481
ggactaggttgctctcacacttgagaaattcatggataacctccttgccagggaaaaggagacatttcatttccaagttatggtggcatcgcaattacaccattattgcatggactgaagtgcaagtggaggacaaggggttgggagaggaagtggctttggcaaattgagtccctcctgaacctctccatctggcatcccaaccaatcaaccactaggagggagatcctgagccacatgcagaaagtggctctgttcaaactccagagctattggcttcccaacttttacacccacaccaagatgaccatggccaaggaggaagcatgccatggtctgatgcaagagtacgagactcgcttatacagcgtttgctacacccacataggagggctccctctgaacatgagcatcaagaagtgccaccactttcagaaacggtactcaagcaggaaagccaagaggaagatgtggcaattgg

SEQ ID NO: 174863 - DNA, 551 bp, Homo sapiens
  Payload ID: 14338
  Gene Symbol: RGSL1
  Gene Name: regulator of G-protein signaling like 1
  ENST ID: ENST00000635407
  CDS Start-End: 9-149
atggcaacatgagcagtgctgagataattggttctacaaatcttataattctgctagaggatgaagtctttgccgattttttcaacacatttctttccctcccgctttgttttgcaggtttttggtcagacaccattttatactgttgaaaattcacagtggagcttgtggccagaaataccttgtaacttgattgccaaatacaaagggttattgacctggttggaaaaatgccgattacctttcttctgtaaaacaaacttgtgtttccattacattctctgtcaggagttcatcagtttcattaagtccccagaaggagaagccagagtgagcctcttaaaaagtaattggtggtggtgctggagggactcccaggaagatgatgaaataggaagcactaggaatctgtttcctcatctagacaacaattgtactggcagaatctgtatgatccaagatgatgagatggaaaaaggcagaccagtggctactccagaaatgcattggcggggtcagagggatgtggcgcttctattcctacctcacag

SEQ ID NO: 174864 - DNA, 532 bp, Homo sapiens
  Payload ID: 14338
  Gene Symbol: RGSL1
  Gene Name: regulator of G-protein signaling like 1
  ENST ID: ENST00000634626
  CDS Start-End: 438-532
aaaatgagccatcatggtagaaaatcaggtccctcatccaattttcagccctgagtcagacctagaagctctgaaatttaaaaaaaaaaaaaaaagcattttaccagttaggaagaatcttgtaatattttgcaagtatttacgagataattggttctacaaatcttataattctgctagaggatgaagtctttgccgattttttcaacacatttctttccctcccggtttttggtcagacaccattttatactgttgaaaattcacagtggagcttgtggccagaaataccttgtaacttgattgccaaatacaaagggttattgacctggttggaaaaatgccgattacctttcttctgtaaaacaaacttgtgtttccattacattctctgtcaggagttcatcagtttcattaagtccccagaaggagccaagatgatgagatggaaaaaggcagaccagtggctactccagaaatgcattggcggggtcagagggatgtggcgcttctattcctacctcacaggcag

SEQ ID NO: 174865 - DNA, 723 bp, Homo sapiens
  Payload ID: 14338
  Gene Symbol: RGSL1
  Gene Name: regulator of G-protein signaling like 1
  ENST ID: ENST00000634679
  CDS Start-End: 224-723
actaggttgctctcacacttgagaaattcatggataacctccttgccagggaaaaggagacatttcatttccaagttatggtggcatcgcaattacaccattattgcatggactgaagtgcaagtggaggacaaggggttgggagaggaagtggctttggcaaattggtgaagaattggtggatttctggatccttgctgagaacatcctgagcatagatgagatggacctggaagtgagagactactacctgtccctcctcctcatgctgagggccactcatctgcaggagggctccagggtggtaaccctctgtaacatgaacatcaagtccctcctgaacctctccatctggcatcccaaccaatcaaccactaggagggagatcctgagccacatgcagaaagtggctctgttcaaactccagagctattggcttcccaacttttacacccacaccaagatgaccatggccaaggaggaagcatgccatggtctgatgcaagagtacgagactcgcttatacagcgtttgctacacccacataggagggctccctctgaacatgagcatcaagaagtgccaccactttcagaaacggtactcaagcaggaaagccaagaggaagatgtggcaattggtagatcctgactcttggtctctggaaatggatctcaagccagatgctattggtatgcccctacaggagacatgtcctcaaga

SEQ ID NO: 174866 - DNA, 454 bp, Homo sapiens
  Payload ID: 14338
  Gene Symbol: RGSL1
  Gene Name: regulator of G-protein signaling like 1
  ENST ID: ENST00000634801
  CDS Start-End: 1-173
taaggttcaccttgctcagaggtattgagtggttgcagcctcaacgggaagcaataagttcagttcaaaattcttcatcaagcaaacttactcagccaagactcgtggtatctgccatgcagctgcatcccgtccaggggaatctcatacagcccattcagactaaagggtgatggaaagaagcagaggaaagcagaaacagcaagagtgactgagacctgctgtcatctatatagaagcctttctgatacatgtcagagagtgacatgaagtctcccctctttatacacacgtatgaaaatacatctatccctcattttgagagcctccaactgatccaagtgtcatccggaggaggaggtggcccgtatgtgcaggacctcagggtgccagccctcacccatacacctccagggctgcaggtcattagccagaataaaggatgtccacattc

SEQ ID NO: 174867 - DNA, 577 bp, Homo sapiens
  Payload ID: 14338
  Gene Symbol: RGSL1
  Gene Name: regulator of G-protein signaling like 1
  ENST ID: ENST00000634723
  CDS Start-End: 465-577
agcctaaaatgagccatcatggtagaaaatcaggtccctcatccaattttcagccctgagtcagacctagaagctctgaaatttaaaaaaaaaaaaaaaagcattttaccagttaggaagaatcttgtaatattttgcaagtatttacgaaagtacagcactttttcaaatagataattggttctacaaatcttataattctgctagaggatgaagtctttgccgattttttcaacacatttctttccctcccggtttttggtcagacaccattttatactgttgaaaattcacagtggagcttgtggccagaaataccttgtaacttgattgccaaatacaaagggttattgacctggttggaaaaatgccgattacctttcttctgtaaaacaaacttgtgtttccattacattctctgtcaggagttcatcagtttcattaagtccccagaaggagccaagatgatgagatggaaaaaggcagaccagtggctactccagaaatgcattggcggggtcagagggatgtggcgcttctattcctacctcacaggcagtgcaggtgaagaattggt

SEQ ID NO: 174868 - DNA, 3063 bp, Homo sapiens
  Payload ID: 14339
  Gene Symbol: RMDN1
  Gene Name: regulator of microtubule dynamics 1
  Uniprot ID: Q96DB5
  ENST ID: ENST00000406452
  CDS Start-End: 161-1105
aaaccatgggggcggaagaggtgctgggcaggaggcggaagaggtgctgtgcaggaggcgggcgggcgcggttctttccggaaggattgaatctcctttagccccgcccgcctccgtagctgcctgaagtagtgcagggtcagcccgcaagttgcaggtcatggcgctggctgctcgactgtggcgccttctgcctttccgacgtggagccgccccggggtctcgtctccctgcggggacttcgggcagccgcgggcattgcggcccctgtcgattccgcggcttcgaggtaatgggaaacccaggaactttcaaaagaggccttttactctcagctttgtcgtatttgggttttgaaacttaccaggttatctctcaggctgctgtggttcatgccacagccaaagttgaagaaatacttgaacaagcagactacctgtatgaaagcggagaaacagaaaaactttatcagttgctaacccaatacaaggaaagtgaagatgcagagttactgtggcgtttggcacgggcatcacgtgatgtagctcagcttagcagaacctcagaagaggagaaaaagctattggtgtatgaagccctagagtatgcaaaaagagcactagaaaaaaatgaatcaagttttgcatctcataagtggtatgcaatctgccttagtgatgttggagattatgaaggcatcaaggctaaaattgcaaatgcatatatcatcaaggagcattttgagaaagcaattgaactgaaccctaaagatgctacttcaattcaccttatgggtatttggtgctatacatttgccgaaatgccttggtatcaaagaagaattgctaaaatgctgtttgcaactcctcctagttccacctatgagaaggccttaggctactttcacagggcagaacaagtggatccaaacttctacagcaaaaacttacttcttttaggaaagacatacttgaaactacacaacaaaaagcttgctgctttctggctaatgaaagccaaggactatccagcacacacagaggaggataaacagatacagacagaagctgctcagttgcttacaagtttcagtgagaagaattgagaacttttcagagaagatttatgaaatagctaataaacattgccttttcttttaattctaaacttaatatatgaactataactgttctacggctttttaaatgttgtgaccatttaaccgtgtaaatataaaatattctaggcttcttcacaaataatagggtaaaataaataatcgccataagagtggtagaaataaatctccatggctcaggcaaagagattattttgcatcctggataccagcaatgcaaaatggtatgagatttctaaggattgatcacattgggatgggagatcaagcaaagaaatatttgtagaggaggggaaatggatctataggggatatacagggggatggattttcaaattggattgattctaagttgaaatcttgaagagaaggtgtggtgacagtggttaggatgttgtgggttcctgacataaagtagttaaatgatatatcttggagctaacctgtgtaagtaaagaactaagtaaggagatgactaaaaatggagtagtttccttttttatttttttgagacagagtctcactttgtttcccaggctggtgtgcagtggcacaatctcggcccactgcagcctccgcctcccgggttcaagtgattctcctgccttagcctcctgagtggctgggattacagggttgtaccaccacactcggctaacttttgtatttttggtagagatggggttttgccatgttggctaggctggtctcaaactcctggcctcaagtgatctgcccgccttggcctcccaaattgctgggattacaggcgtgagccaccgcacctggccagtttactttaaatgtggtgtagtctcatggtaaactgaatttgtcatcagatgcaaagttctattccctaatggaatggaaggaacacaaaacttaagagtgaaatggaatactaagatgtttttaaataggcaggactatgctactcacttgaggctggagtgccaccactgcaaaatctttttaagttttgtaaaaaggagcatcttgaatccacttagataaagacagactgtgtgtgtaggtggatttttcccaaaggatttgggaattgtaatgttacaatgaactgtatggatatgtttgtcatgtacattttcaaacaaaaaggaaaactgaaagtagtgatctttgtatacccatctcttagattcagtgattttgctatataggttgtgtatcccttatctgaaatacttgggactagtagaagcatcttggatttgggatgtttttccaaattttggaatacctgcatacacacaataagatatcttggagatgggacccaagtttaaacacaaattcacttgtttcatatataccttatgcacatagcttgaaggtaactttatataacattatttttaataattttgtgcattgagaccaagtttgcataccttgaaccatcagaaagcaaaggtgtcattatctcagccactcatgtgggtaatttgtggttggttgatgtcaccatcattcctgactgaatgtatatgctaccaataagcagttattttcttatacttattcatgcataagtacttaacagtaaaaaatatgacataactcgcacaggaacaaggatggcaaaaaaaaaaatatgacacaccactgatacagtgaaaaaataatgtggtcagggtagctaggcaacagtagcatcaccagaaacctgtatcagctgttaaacggcaacaacaatggcaggctttcagtttcccacttaatgatgctgtattttaaaaggttattgtatactgtaattttatttttgtaggtgaagagaaacagaagcagctgaagggccaggaagtgggtctttctagggatgtggcattctgctggatggctttttaaaatgggttttttcctttagggagaccgaataaactgtgttgtgcacctgc

SEQ ID NO: 174869 - DNA, 1106 bp, Homo sapiens
  Payload ID: 14339
  Gene Symbol: RMDN1
  Gene Name: regulator of microtubule dynamics 1
  Uniprot ID: Q96DB5
  ENST ID: ENST00000430676
  CDS Start-End: 56-910
gcccgcctccgtagctgcctgaagtagtgcagggtcagcccgcaagttgcaggtcatggcgctggctgctcgactgtggcgccttctgcctttccgacgtggagccgccccggggtctcgtctccctgcggggacttcgggcagccgcgggcattgcggcccctgtcgattccgcggcttcgaggtaatgggaaacccaggaactttcaaaagaggccttttactctcagctttgtcgtatttgggttttgaaacttaccaggttatctctcaggctgctgtggttcatgccacagccaaagttgaagaaatacttgaacaagcagactacctgtatgaaagcggagaaacagaaaaactttatcagttgctaacccaatacaaggaaagtgaagatgcagagttactgtggcgtttggcacgggcatcacgtgatgtagctcagcttagcagaacctcagaagaggagaaaaagctattggtgtatgaagccctagagtatgcaaaaagagcactagaaaaaaatgaatcaagttttgcatctcataagaaagcaattgaactgaaccctaaagatgctacttcaattcaccttatgggtatttggtgctatacatttgccgaaatgccttggtatcaaagaagaattgctaaaatgctgtttgcaactcctcctagttccacctatgagaaggccttaggctactttcacagggcagaacaagtggatccaaacttctacagcaaaaacttacttcttttaggaaagacatacttgaaactacacaacaaaaagcttgctgctttctggctaatgaaagccaaggactatccagcacacacagaggaggataaacagatacagacagaagctgctcagttgcttacaagtttcagtgagaagaattgagaacttttcagagaagatttatgaaatagctaataaacattgccttttcttttaattctaaacttaatatatgaactataactgttctacggctttttaaatgttgtgaccatttaaccgtgtaaatataaaatattctaggcttcttcacaaataatagggtaaaataaataatcgccataagagtggtagaaat

SEQ ID NO: 174870 - DNA, 444 bp, Homo sapiens
  Payload ID: 14339
  Gene Symbol: RMDN1
  Gene Name: regulator of microtubule dynamics 1
  ENST ID: ENST00000519247
  CDS Start-End: 1-392
gaaagacatacttgaaactacacaacaaaaagcttgctgctttctggctaatgaaagccaaggactatccagcacacacagaggaggataaacaggagcctgattccccacgtgtcacattggtccgtgacgtttccccactaagggtgagacccattactgagaacaaaccccaggaatcccttacattctccttcccgtgcagcccccacctgattgttcttgtgtggattccagagctgactgctggattgagatgcttatttccccacgtacatgtatatcaaagcttgaaaattaccagagtgttcataataaggatttggaaaaggagtctattcaaccaagcagatctctgcctttctttcgtctttactatgaattctgaataaaatggagaacacactctcaatatgtagaaaaataaaattttggcaaaacaat

SEQ ID NO: 174871 - DNA, 543 bp, Homo sapiens
  Payload ID: 14339
  Gene Symbol: RMDN1
  Gene Name: regulator of microtubule dynamics 1
  ENST ID: ENST00000523370
  CDS Start-End: 120-314
agcccatccgcagggagctgactccgggctgcatgtcagctccttgccagtaggctggcgcttcgaggccattctggaggccagtcgcttactgaaaaggcaaaactgactttaaggtaatgggaaacccaggaactttcaaaagaggccttttactctcagctttgtcgtatttgggttttgaaacttaccaggttatctctcaggctgctgtggttcatgccacagccaaagagtctcgctgtgtcactgagggtagagtgtggaggtgcgatctcagctcactgcaaccactgcctcctgggttcaagtgatcctcccacctcagcctcccaagtagctgggattacaggcatgtgccatgatgcccagttgaagaaatacttgaacaagcagactacctgtatgaaagcggagaaacagaaaaactttatcagttgctaacccaatacaaggaaagtgaagatgcagagttactgtggcgtttggcacgggcatcacgtgatgtagctcagcttagcagaacctcagaagaggagaaaa

SEQ ID NO: 174872 - DNA, 557 bp, Homo sapiens
  Payload ID: 14339
  Gene Symbol: RMDN1
  Gene Name: regulator of microtubule dynamics 1
  ENST ID: ENST00000520719
  CDS Start-End: 1-498
gaggagaaaaagctattggtgtatgaagccctagagtatgcaaaaagagcactagaaaaaaatgaatcaagttttgcatctcataagtggtatgcaatctgccttagtgatgttggagattatgaaggcatcaaggctaaaattgcaaatgcatatatcatcaaggagcattttgagaaagcaattgaactgaaccctaaagatgctacttcaattcaccttatgggtatttggtgctatacatttgccgaaatgccttggtatcaaagaagaattgctaaaatgctgtttgcaactcctcctagttccacctatgagaaggccttaggctactttcacagggcagaacaaggaaagacatacttgaaactacacaacaaaaagcttgctgctttctggctaatgaaagccaaggactatccagcacacacagaggaggataaacagatacagacagaagctgctcagttgcttacaagtttcagtgagaagaattgagaacttttcagagaagatttatgaaatagctaataaacattgccttttcttttaattct

SEQ ID NO: 174873 - DNA, 1164 bp, Homo sapiens
  Payload ID: 14339
  Gene Symbol: RMDN1
  Gene Name: regulator of microtubule dynamics 1
  Uniprot ID: Q96DB5
  ENST ID: ENST00000519966
  CDS Start-End: 62-877
agccccgcccgcctccgtagctgcctgaagtagtgcagggtcagcccgcaagttgcaggtcatggcgctggctgctcgactgtggcgccttctgcctttccgacgtggagccgccccggggtctcgtctccctgcggggacttcgggcagccgcgggcattgcggcccctgtcgattccgcggcttcgaggtaatgggaaacccaggaactttcaaaagaggccttttactctcagctttgtcgtatttgggttttgaaacttaccaggttatctctcaggctgctgtggttcatgccacagccaaagttgaagaaatacttgaacaagcagactacctgtatgaaagcggagaaacagaaaaactttatcagttgctaacccaatacaaggaaagtgaagatgcagagttactgtggcgtttggcacgggcatcacgtgatgtagctcagcttagcagaacctcagaagaggagaaaaagctattggtgtatgaagccctagagtatgcaaaaagagcactagaaaaaaatgaatcaagttttgcatctcataagaaagcaattgaactgaaccctaaagatgctacttcaattcaccttatgggtatttggtgctatacatttgccgaaatgccttggtatcaaagaagaattgctaaaatgctgtttgcaactcctcctagttccacctatgagaaggccttaggctactttcacagggcagaacaaggaaagacatacttgaaactacacaacaaaaagcttgctgctttctggctaatgaaagccaaggactatccagcacacacagaggaggataaacagatacagacagaagctgctcagttgcttacaagtttcagtgagaagaattgagaacttttcagagaagatttatgaaatagctaataaacattgccttttcttttaattctaaacttaatatatgaactataactgttctacggctttttaaatgttgtgaccatttaaccgtgtaaatataaaatattctaggcttcttcacaaataatagggtaaaataaataatcgccataagagtggtagaaataaatctccatggctcaggcaaagagattattttgcatcctggataccagcaatgcaaaatggtatgagatttctaaggattgatcacattg

SEQ ID NO: 174874 - DNA, 602 bp, Homo sapiens
  Payload ID: 14339
  Gene Symbol: RMDN1
  Gene Name: regulator of microtubule dynamics 1
  ENST ID: ENST00000521045
  CDS Start-End: 318-602
aacttaagtggtggcggccccgcgctgcctaaggaatgtggtgaaccgaggaaagaactcggggccactgtgcctggaacgcccggacaggtcccttccattttgcaaacctccactatccttaactggggctgtcagagaaggagtggggtttgcccccacgcgccccagaagctgcctgctacccgcccttcttgtgcgaaatgtaaaacaggacgggaaagaaccttgaccgctgtgaaattattctccctgtaggcgatgacagatacaacagcgcttgaggctgcccctttcagactttgaaaagtgtggtaatgggaaacccaggaactttcaaaagaggccttttactctcagctttgtcgtatttgggttttgaaacttaccaggttatctctcaggctgctgtggttcatgccacagccaaagttgaagaaatacttgaacaagcagactacctgtatgaaagcggagaaacagaaaaactttatcagttgctaacccaatacaaggaaagtgaagatgcagagttactgtggcgtttggcacgggcatcacgtgatgtagctcagcttagcagaacctcagaagaggagaaa

SEQ ID NO: 174875 - DNA, 728 bp, Homo sapiens
  Payload ID: 14339
  Gene Symbol: RMDN1
  Gene Name: regulator of microtubule dynamics 1
  ENST ID: ENST00000519789
  CDS Start-End: 1-676
tttactctcagctttgtcgtatttgggttttgaaacttaccaggttatctctcaggctgctgtggttcatgccacagccaaagttgaagaaatacttgaacaagcagactacctgtatgaaagcggagaaacagaaaaactttatcagttgctaacccaatacaaggaaagtgaagatgcagagttactgtggcgtttggcacgggcatcacgtgatgtagctcagcttagcagaacctcagaagaggagaaaaagctattggtgtatgaagccctagagtatgcaaaaagagcactagaaaaaaatgaatcaagttttgcatctcataagtggtatgcaatctgccttagtgatgttggagattatgaaggcatcaaggctaaaattgcaaatgcatatatcatcaaggagcattttgagaaagcaattgaactgaaccctaaagatgctacttcaattcaccttatgggtatttggtgctatacatttgccgaaatgccttggtatcaaagaagaattgctaaaatgctgtttgcaactcctcctagttccacctatgagaaggccttaggctactttcacagggcagaacaaggtgaagagaaacagaagcagctgaagggccaggaagtgggtctttctagggatgtggcattctgctggatggctttttaaaatgggttttttcctttagggagaccgaataaactgtgttgtgcacctgcat

SEQ ID NO: 174876 - DNA, 810 bp, Homo sapiens
  Payload ID: 14339
  Gene Symbol: RMDN1
  Gene Name: regulator of microtubule dynamics 1
  ENST ID: ENST00000524172
  CDS Start-End: 182-310
agagaaggagtggggtttgcccccacgcgccccagaagctgcctgctacccgcccttcttgtgcgaaatgtaaaacaggacgggaaagaaccttgaccgctgtgaaattattctccctgtaggcgatgacagatacaacagcgcttgaggctgcccctttcagactttgaaaagtgtggtaatgggaaacccaggaactttcaaaagaggccttttactctcagctttgtcgtatttgggttttgaaacttaccaggttatctctcaggctgctgtggttcatgccacagccaaagtgcggcaatattagaacccaaggaaggaaaaactggcaaagttgtcatatgccaagtggccattgcctcctgaaatgaagttgaagaaatacttgaacaagcagactacctgtatgaaagcggagaaacagaaaaactttatcagttgctaacccaatacaaggaaagtgaagatgcagagttactgtggcgtttggcacgggcatcacgtgatgtagctcagcttagcagaacctcagaagaggagaaaaagctattggtgtatgaagccctagagtatgcaaaaagagcactagaaaaaaatgaatcaagttttgcatctcataagtggtatgcaatctgccttagtgatgttggagattatgaaggcatcaaggctaaaattgcaaatgcatatatcatcaaggagcattttgagaaagcaattgaactgaaccctaaagatgctacttcaattcaccttatgggtatttggtgctatacatttgccgaaatgccttggtatcaaagaaga

SEQ ID NO: 174877 - DNA, 898 bp, Homo sapiens
  Payload ID: 14339
  Gene Symbol: RMDN1
  Gene Name: regulator of microtubule dynamics 1
  ENST ID: ENST00000517710
  CDS Start-End: 1-479
ggtgctatacatttgccgaaatgccttggtatcaaagaagaattgctaaaatgctgtttgcaactcctcctagttccacctatgagaaggccttaggctactttcacagggcagaacaagtggatccaaacttctacagcaaaaacttacttcttttaggaaagacatacttgaaactacacaacaaaaagcttgctgctttctggctaatgaaagccaaggactatccagcacacacagaggaggataaacaggagcctgattccccacgtgtcacattggtccgtgacgtttccccactaagggtgagacccattactgagaacaaaccccaggaatcccttacattctccttcccgtgcagcccccacctgattgttcttgtgtggattccagagctgactgctggattgagatgcttatttccccacgtacatgtatatcaaaggttctgtgtagcctcacctagtgcatcgtaatttcttacttgagggagaccagcaccctgaaaacgaactggaaagctgccttcttcagtcaaatctgctaaatcatacctacaatgaatgatattcaataacttctgtcatggcaaaatttatacagcagtggtaccatttgtaattctaatacttaactcttttatggtatacgcagtcctttttgaaggccagtttccctctatcacataacctgtcacatacattagaattttttttttaattctttaggcttgaaaattaccagagtgttcataataaggatttggaaaaggagtctattcaaccaagcagatctctgcctttctttcgtctttactatgaattctgaataaaatggagaacacactctcaatatgtagaaaaataaaattttggcaaaacaataattactgttt

SEQ ID NO: 174878 - DNA, 950 bp, Homo sapiens
  Payload ID: 14339
  Gene Symbol: RMDN1
  Gene Name: regulator of microtubule dynamics 1
  ENST ID: ENST00000523911
  CDS Start-End: 101-847
gactccgggctgcatgtcagctccttgccagtaggctggcgcttcgaggccattctggaggccagtcgcttactgaaaaggcaaaactgactttaaggtaatgggaaacccaggaactttcaaaagaggccttttactctcagctttgtcgtatttgggttttgaaacttaccaggttatctctcaggctgctgtggttcatgccacagccaaagttgaagaaatacttgaacaagcagactacctgtatgaaagcggagaaacagaaaaactttatcagttgctaacccaatacaaggaaagtgaagatgcagagttactgtggcgtttggcacgggcatcacgtgatgtagctcagcttagcagaacctcagaagaggagaaaaagctattggtgtatgaagccctagagtatgcaaaaagagcactagaaaaaaatgaatcaagttttgcatctcataagtggtatgcaatctgccttagtgatgttggagattatgaaggcatcaaggctaaaattgcaaatgcatatatcatcaaggagcattttgagaaagcaattgaactgaaccctaaagatgctacttcaattcaccttatgggtatttggtgctatacatttgccgaaatgccttggtatcaaagaagaattgctaaaatgctgtttgcaactcctcctagttccacctatgagaaggccttaggctactttcacagggcagaacaaggaaagacatacttgaaactacacaacaaaaagcttgctgctttctggctaatgaaagccaaggactatccagcacacacagaggaggataaacaggtgaagagaaacagaagcagctgaagggccaggaagtgggtctttctagggatgtggcattctgctggatggctttttaaaatgggttttttcctttagggagaccgaataaactgtgttgtgcacc

SEQ ID NO: 174879 - DNA, 968 bp, Homo sapiens
  Payload ID: 14339
  Gene Symbol: RMDN1
  Gene Name: regulator of microtubule dynamics 1
  ENST ID: ENST00000522804
  CDS Start-End: 65-391
tttagccccgcccgcctccgtagctgcctgaagtagtgcagggtcagcccgcaagttgcaggtcatggcgctggctgctcgactgtggcgccttctgcctttccgacgtggagccgccccggggtctcgtctccctgcggggacttcgggcagccgcgggcattgcggcccctgtcgattccgcggcttcgaggtaatgggaaacccaggaactttcaaaagaggccttttactctcagctttgtcgtatttgggttttgaaacttaccaggttatctctcaggctgctgtggttcatgccacagccaaagagtctcgctgtgtcactgagggtagagtgtggaggtgcgatctcagctcactgcaaccactgcctcctgggttcaagtgatcctcccacctcagcctcccaagtagctgggattacaggcatgtgccatgatgcccagttgaagaaatacttgaacaagcagactacctgtatgaaagcggagaaacagaaaaactttatcagttgctaacccaatacaaggaaagtgaagatgcagagttactgtggcgtttggcacgggcatcacgtgatgtagctcagcttagcagaacctcagaagaggagaaaaagctattggtgtatgaagccctagagtatgcaaaaagagcactagaaaaaaatgaatcaagttttgcatctcataagtggtatgcaatctgccttagtgatgttggagattatgaaggcatcaaggctaaaattgcaaatgcatatatcatcaaggagcattttgaggtactgatgaattattcaaattcatgaattttaaaagtcatatttttctgaatagatttttgttttcattatctattgctgtatatcaaaccacctatgataacagtggagtagagccatgacagtttgttatttctttttttttttttttttgagacggagtttcgctcttgtcatccgg

SEQ ID NO: 174880 - DNA, 557 bp, Homo sapiens
  Payload ID: 14339
  Gene Symbol: RMDN1
  Gene Name: regulator of microtubule dynamics 1
  ENST ID: ENST00000522942
  CDS Start-End: 1-323
agaaagcaattgaactgaaccctaaagatgctacttcaattcaccttatgggtatttggtgctatacatttgccgaaatgccttggtatcaaagaagaattgctaaaatgctgtttgcaactcctcctagttccacctatgagaaggccttaggctactttcacagggcagaacaagtggatccaaacttctacagcaaaaacttacttcttttaggaaagacatacttgaaactacacaacaaaaagcttgctgctttctggctaatgaaagccaaggactatccagcacacacagaggaggataaacaggaaataatttagttactatcaccaggtggatgttacgggttgcctgctacaatgcagaattattcctgtttgacacacatggcagatcgagttaacatttctaaaacataaaagtcatgggatgtgtactaaagtggaagagctgagagtctcatctggtcactgtcaagacattttattgttataatgtcctatctggtttttggaaactcttagaaaccccactttataaacttaaatttcaca

SEQ ID NO: 174881 - DNA, 562 bp, Homo sapiens
  Payload ID: 14339
  Gene Symbol: RMDN1
  Gene Name: regulator of microtubule dynamics 1
  ENST ID: ENST00000519639
  CDS Start-End: 1-455
aaaaaaatgaatcaagttttgcatctcataagtggtatgcaatctgccttagtgatgttggagattatgaaggcatcaaggctaaaattgcaaatgcatatatcatcaaggagcattttgagaaagcaattgaactgaaccctaaagatgctacttcaattcaccttatgggtatttggtgctatacatttgccgaaatgccttggtatcaaagaagaattgctaaaatgctgtttgcaactcctcctagttccacctatgagaaggccttaggctactttcacagggcagaacaagtggatccaaacttctacagcaaaaacttacttcttttaggaaagacatacttgaaactacacaacaaaaagcttgctgctttctggctaatgaaagccaaggactatccagcacacacagaggaggataaacaggtgaagagaaacagaagcagctgaagggccaggaagtgggtctttctagggatgtggcattctgctggatggctttttaaaatgggttttttcctttagggagaccgaataaactgtgttgtgcacctgca

SEQ ID NO: 174882 - DNA, 1985 bp, Homo sapiens
  Payload ID: 14340
  Gene Symbol: RMDN2
  Gene Name: regulator of microtubule dynamics 2
  ENST ID: ENST00000234195
  CDS Start-End: 117-1838
cacatgcagcttgagcattcagtcttctgacctgttccacctctacagggcattttatggcttaaggatgacggcctagaagggaagggagagacttactttggattaaatttacaatgggaaagtgcttaagctgctgcaaagaggaccagagcttccaacgatgttctccagaagatcaagttagtacagacgcccagcatcgtggagcctcttctatttcacaaccaagtatatctcttggtcataaaacatcttattcccctgtaacacataaagtcaatgcagccaaagcaagtagaaggttattatctgtatcaagtccatctttctctgaaagaagatattctttatttgttggatttcaaaaaagaaatgcttccccttactggcaacaaagtagagctaactttgattctgaagaagacacaggcttcactgatataaaatcttcctcagaccattgtggtagctttatttcccgcagaagacgtttctcatcccgtaaactaagtatagtttcctattacaagagtgccattttttttgatcctcaagcaagtggccagaatgtgtttaatctaaatgaaatcgaaatcttttctaaaacttcaagtaatactgatgctaaaaaacatataaccatctctgctcctgaatataacactaaaaattttaagaattttgaaacaaacactacttctccagcctttgggaacactattgatacagcctcctatcaacaaagcacatcatccttcttttctcttgcaagtgatatttcctctcccgatcaacaaaatggaattgccaatgatattcaacaaaggggccaattatgtaaagatttaaaagatttccttcatcctcgtcctgaaagttacagcacagatcattctccaatcatgattccacagcatccctctcaaagtggaactttcccattcctccataaagctggattttcttcatcttataaaaattctggttgctttatcccacctcaaagcgaattaacttcaggcctgtttgaagatgaagactttgctgtcttgtttcaagatgaagacagatcttcacctattgaaattcctaaaataaggtatattacagctaatactgacacagaagaacagagttttccagtccctaaggcatttaacacacgtgtagaggaattaaatttagatgtccttcttcagaaggtagatcatttacgtatgagtgagtctggcaagtcggagagttttgaactacttcgtgaccacaaagaaaagtttagagatgaaatagagtttatgtggcgatttgctcgtgcttatggagacatgtatgaactatctacaaacacacaagaaaagaaacattatgctaatattggaaaaactttaagtgaaagagctattaatagagcacccatgaatggacattgtcatctgtggtatgcagttttgtgtggctatgtatctgagtttgagggtttacaaaacaaaatcaactatgggcacctcttcaaggaacatctagatatagcaatcaaacttttaccagaggaaccctttctatattacctcaaagggagatactgctatactgtctcaaaactgagctggattgagaaaaaaatggctgctactctgtttggaaaaataccatcttcaactgtacaagaagctttacacaatttccttaaggctgaagaactatgccctggttattctaatcccaattacatgtacttagcaaagtgttatactgatcttgaggaaaaccagaatgctttgaagttctgtaatttggctttattgcttcctactgttaccaaagaggagctgtagtctggaagataaagagcctttggtaccgcaagccctgtcatctgtgagtgtggcacagtgaaggcctggagagtcatgacctaggccctgtgaagtcaagtatttttaccaagtaaaaagattggcaataaaacatttccacatagt

SEQ ID NO: 174883 - DNA, 1381 bp, Homo sapiens
  Payload ID: 14340
  Gene Symbol: RMDN2
  Gene Name: regulator of microtubule dynamics 2
  Uniprot ID: Q96LZ7
  ENST ID: ENST00000354545
  CDS Start-End: 124-1356
gaccttaggacccgcgggctccagggctactgtccgtccgccactgcgcgccagcaggtcctggtctccgctctccaacagctgaaaggccggcgcagtgaacacagaaacgaaaaccaagaaatgccttattccacaaacaaagagttgatacttggcatcatggtgggcactgctggaatcagcttgctgctcttgtggtaccacaaggtccgtaaaccagggatagcaatgaagttacctgaatttctttctctgggtaatacatttaattcaataactttgcaagatgaaatacatgatgaccaaggaacaacagtaatctttcaagaaaggcaacttcagatactggagaagttaaacgaattactgacaaatatggaagaactcaaagaggaaatcagatttcttaaagaagctattccaaagctggaggaatatatacaagatgaacttggagggaaaataactgttcataagataagccctcagcacagagcgagaaaaagaagactccccacaattcaaagttcagcaacaagtaatagttcagaggaagcagaaagtgaaggagggtatattacagctaatactgacacagaagaacagagttttccagtccctaaggcatttaacacacgtgtagaggaattaaatttagatgtccttcttcagaaggtagatcatttacgtatgagtgagtctggcaagtcggagagttttgaactacttcgtgaccacaaagaaaagtttagagatgaaatagagtttatgtggcgatttgctcgtgcttatggagacatgtatgaactatctacaaacacacaagaaaagaaacattatgctaatattggaaaaactttaagtgaaagagctattaatagagcacccatgaatggacattgtcatctgtggtatgcagttttgtgtggctatgtatctgagtttgagggtttacaaaacaaaatcaactatgggcacctcttcaaggaacatctagatatagcaatcaaacttttaccagaggaaccctttctatattacctcaaagggagatactgctatactgtctcaaaactgagctggattgagaaaaaaatggctgctactctgtttggaaaaataccatcttcaactgtacaagaagctttacacaatttccttaaggctgaagaactatgccctggttattctaatcccaattacatgtacttagcaaagtgttatactgatcttgaggaaaaccagaatgctttgaagttctgtaatttggctttattgcttcctactgttaccaaagaggataaagaggcacagaaagagatgcaaaaaataatgacttccttgaagaggtaaataaacgaatttactcttcaacaaa

SEQ ID NO: 174884 - DNA, 2280 bp, Homo sapiens
  Payload ID: 14340
  Gene Symbol: RMDN2
  Gene Name: regulator of microtubule dynamics 2
  ENST ID: ENST00000407257
  CDS Start-End: 148-1863
atcacattctgtgttattgccatgttaactccacatgcagcttgagcattcagtcttctgacctgttccacctctacagggcattttatggcttaaggatgacggcctagaagggaagggagagacttactttggattaaatttacaatgggaaagtgcttaagctgctgcaaagaggaccagagcttccaacgatgttctccagaagatcaagttagtacagacgcccagcatcgtggagcctcttctatttcacaaccaagtatatctcttggtcataaaacatcttattcccctgtaacacataaagtcaatgcagccaaagcaagtagaaggttattatctgtatcaagtccatctttctctgaaagaagatattctttatttgttggatttcaaaaaagaaatgcttccccttactggcaacaaagtagagctaactttgattctgaagaagacacaggcttcactgatataaaatcttcctcagaccattgtggtagctttatttcccgcagaagacgtttctcatcccgtaaactaagtatagtttcctattacaagagtgccattttttttgatcctcaagcaagtggccagaatgtgtttaatctaaatgaaatcgaaatcttttctaaaacttcaagtaatactgatgctaaaaaacatataaccatctctgctcctgaatataacactaaaaattttaagaattttgaaacaaacactacttctccagcctttgggaacactattgatacagcctcctatcaacaaagcacatcatccttcttttctcttgcaagtgatatttcctctcccgatcaacaaaatggaattgccaatgatattcaacaaaggggccaattatgtaaagatttaaaagatttccttcatcctcgtcctgaaagttacagcacagatcattctccaatcatgattccacagcatccctctcaaagtggaactttcccattcctccataaagctggattttcttcatcttataaaaattctggttgctttatcccacctcaaagcgaattaacttcaggcctgtttgaagatgaagactttgctgtcttgtttcaagatgaagacagatcttcacctattgaaattcctaaaataaggtatattacagctaatactgacacagaagaacagagttttccagtccctaaggcatttaacacacgtgtagaggaattaaatttagatgtccttcttcagaaggtagatcatttacgtatgagtgagtctggcaagtcggagagttttgaactacttcgtgaccacaaagaaaagtttagagatgaaatagagtttatgtggcgatttgctcgtgcttatggagacatgtatgaactatctacaaacacacaagaaaagaaacattatgctaatattggaaaaactttaagtgaaagagctattaatagagcacccatgaatggacattgtcatctgtggtatgcagttttgtgtggctatgtatctgagtttgagggtttacaaaacaaaatcaactatgggcacctcttcaaggaacatctagatatagcaatcaaacttttaccagaggaaccctttctatattacctcaaagggagatactgctatactgtctcaaaactgagctggattgagaaaaaaatggctgctactctgtttggaaaaataccatcttcaactgtacaagaagctttacacaatttccttaaggctgaagaactatgccctggttattctaatcccaattacatgtacttagcaaagtgttatactgatcttgaggaaaaccagaatgctttgaagttctgtaatttggctttattgcttcctactgttaccaaagagtgatgtctccatttgtattcttagcaatttttttccaagtagtaaaggataaagaggcacagaaagagatgcaaaaaataatgacttccttgaagaggtaaataaacgaatttactcttcaacaaatcagatgtggtctaccaaaatttaaatgaatcaaagttgtgcttttattatccttcatttttgatgtaagggtattgtgcttagatttgaaggtaaagccatgtttctgcagaatgcattccactagtagcactacaaaattaattatgttatttggagaatctatatactataatgtcaatacataatctataaacatgtatgctttatatttttcttatcaataaactgcagccttaagaatatttctttaaataaaatatttaaatccaataaaatgaattctcatgaata

SEQ ID NO: 174885 - DNA, 1973 bp, Homo sapiens
  Payload ID: 14340
  Gene Symbol: RMDN2
  Gene Name: regulator of microtubule dynamics 2
  ENST ID: ENST00000402091
  CDS Start-End: 79-1155
acctctacagggcattttatggcttaaggatgacggcctagaagggaagggagagacttactttggattaaatttacaatgggaaagtgcttaagctgctgcaaagaggaccagagcttccaacgatgttctccagaagatcaagttagtacagacgcccagcatcgtggagcctcttctatttcacaaccaagtatatctcttggtcataaaacatcttattcccctgtaacacataaagtcaatgcagccaaagcaagtagaaggttattatctgtatcaagtccatctttctctgaaagaagatattctttatttgttggatttcaaaaaagaaatgcttccccttactggcaacaaagtagagctaactttgattctgaagaagacacaggcttcactgatataaaatcttcctcagaccattgtggtagctttatttcccgcagaagacgtttctcatcccgtaaactaagtatagtttcctattacaagagtgccattttttttgatcctcaagcaagtggccagaatgtgtttaatctaaatgaaatcgaaatcttttctaaaacttcaagtaatactgatgctaaaaaacatataaccatctctgctcctgaatataacactaaaaattttaagaattttgaaacaaacactacttctccagcctttgggaacactattgatacagcctcctatcaacaaagcacatcatccttcttttctcttgcaagtgatatttcctctcccgatcaacaaaatggaattgccaatgatattcaacaaaggggccaattatgtaaagatttaaaagatttccttcatcctcgtcctgaaagttacagcacagatcattctccaatcatgattccacagcatccctctcaaagtggaactttcccattcctccataaagctggattttcttcatcttataaaaattctggttgctttatcccacctcaaagcgaattaacttcaggcctgtttgaagatgaagactttgctgtcttgtttcaagatgaagacagatcttcacctattgaaattcctaaaataaggtcacctcagactttaccctctcttagaagggcacctcaaatagttttcccaccagtcactttcatagcctgtagaattcatttctcataactcccctttcctcacaaagcttcactgcattttctgaagaagattcctacattgcagtgtaaatttaattgctgtagttttgaaagttagtttactgatgttattggagtatggaagtcaaagatgattttgtttcaagcttttttcagatttactgcttaaagatgggctaatctcagatttctgagtgactattataatacttttgtggtctgaaaataacatcaagccttgatgtatggactttctaaaagtaatacattctttgagagtttagtatccccttttatcatactctaatcattagaaatagtattcttacataatcattagagctattttcatcaattcacacattttcatatatatcagccttgctagctatatttctcatgcctgatgttccactgacagataatgtttttattaacacaagaatcaaattagaagttaaaaatattatagcggaatatgtagaatatttagaaaccagatattttaactaagtaattttaatacacattcatgtatgtgcaaatctgggcattcaaggaattctgaaatcaggaaaaagtatgtatattagtctcccaaaattttatttttaaaaatgaatatttttcatttttttccgattgtattaacaaagactgttataaagtatttatcaaagtagctaatgaataaaaatgcatgtaagcaattgaaaacatttaagttagaatacaattagattttgtagaggaaaggaatttgcattatttctaattatcctaataaaatgtcccccaaatttatttcatggggctaagatgtta

SEQ ID NO: 174886 - DNA, 1932 bp, Homo sapiens
  Payload ID: 14340
  Gene Symbol: RMDN2
  Gene Name: regulator of microtubule dynamics 2
  Uniprot ID: Q96LZ7
  ENST ID: ENST00000406384
  CDS Start-End: 195-1427
tacttcatcaatttttcttttctttttatggactcttttctgttggcaaaaaaaacctgttatttcttgatcttttggcaccattttcgcacttaataatggcgtaatttctcttctatttgttttctatttgcccatctgttcttttttctccttttcctgccttcttttggaccaaaaacgaaaaccaagaaatgccttattccacaaacaaagagttgatacttggcatcatggtgggcactgctggaatcagcttgctgctcttgtggtaccacaaggtccgtaaaccagggatagcaatgaagttacctgaatttctttctctgggtaatacatttaattcaataactttgcaagatgaaatacatgatgaccaaggaacaacagtaatctttcaagaaaggcaacttcagatactggagaagttaaacgaattactgacaaatatggaagaactcaaagaggaaatcagatttcttaaagaagctattccaaagctggaggaatatatacaagatgaacttggagggaaaataactgttcataagataagccctcagcacagagcgagaaaaagaagactccccacaattcaaagttcagcaacaagtaatagttcagaggaagcagaaagtgaaggagggtatattacagctaatactgacacagaagaacagagttttccagtccctaaggcatttaacacacgtgtagaggaattaaatttagatgtccttcttcagaaggtagatcatttacgtatgagtgagtctggcaagtcggagagttttgaactacttcgtgaccacaaagaaaagtttagagatgaaatagagtttatgtggcgatttgctcgtgcttatggagacatgtatgaactatctacaaacacacaagaaaagaaacattatgctaatattggaaaaactttaagtgaaagagctattaatagagcacccatgaatggacattgtcatctgtggtatgcagttttgtgtggctatgtatctgagtttgagggtttacaaaacaaaatcaactatgggcacctcttcaaggaacatctagatatagcaatcaaacttttaccagaggaaccctttctatattacctcaaagggagatactgctatactgtctcaaaactgagctggattgagaaaaaaatggctgctactctgtttggaaaaataccatcttcaactgtacaagaagctttacacaatttccttaaggctgaagaactatgccctggttattctaatcccaattacatgtacttagcaaagtgttatactgatcttgaggaaaaccagaatgctttgaagttctgtaatttggctttattgcttcctactgttaccaaagaggataaagaggcacagaaagagatgcaaaaaataatgacttccttgaagaggtaaataaacgaatttactcttcaacaaatcagatgtggtctaccaaaatttaaatgaatcaaagttgtgcttttattatccttcatttttgatgtaagggtattgtgcttagatttgaaggtaaagccatgtttctgcagaatgcattccactagtagcactacaaaattaattatgttatttggagaatctatatactataatgtcaatacataatctataaacatgtatgctttatatttttcttatcaataaactgcagccttaagaatatttctttaaataaaatatttaaatccaataaaatgaattctcatgaatattttattgtttcaatggagacttcgtaagacaaaataatttcattaatgtggatgaaaaatggaaaactcagcaaaggacatgaacaagttgttggcagaagaggaaaaacaaacaaatgtagtattgtaactggtaatcaaaagatgtgaataaaattacaataaaatactgttttaccatcaaa

SEQ ID NO: 174887 - DNA, 1426 bp, Homo sapiens
  Payload ID: 14340
  Gene Symbol: RMDN2
  Gene Name: regulator of microtubule dynamics 2
  Uniprot ID: Q96LZ7
  ENST ID: ENST00000417700
  CDS Start-End: 127-924
atgttaactccacatgcagcttgagcattcagtcttctgacctgttccacctctacagggcattttatggcttaaggatgacggcctagaagggaagggagagacttactttggattaaatttacaatgggaaagtgcttaaggtatattacagctaatactgacacagaagaacagagttttccagtccctaaggcatttaacacacgtgtagaggaattaaatttagatgtccttcttcagaaggtagatcatttacgtatgagtgagtctggcaagtcggagagttttgaactacttcgtgaccacaaagaaaagtttagagatgaaatagagtttatgtggcgatttgctcgtgcttatggagacatgtatgaactatctacaaacacacaagaaaagaaacattatgctaatattggaaaaactttaagtgaaagagctattaatagagcacccatgaatggacattgtcatctgtggtatgcagttttgtgtggctatgtatctgagtttgagggtttacaaaacaaaatcaactatgggcacctcttcaaggaacatctagatatagcaatcaaacttttaccagaggaaccctttctatattacctcaaagggagatactgctatactgtctcaaaactgagctggattgagaaaaaaatggctgctactctgtttggaaaaataccatcttcaactgtacaagaagctttacacaatttccttaaggctgaagaactatgccctggttattctaatcccaattacatgtacttagcaaagtgttatactgatcttgaggaaaaccagaatgctttgaagttctgtaatttggctttattgcttcctactgttaccaaagaggataaagaggcacagaaagagatgcaaaaaataatgacttccttgaagaggtaaataaacgaatttactcttcaacaaatcagatgtggtctaccaaaatttaaatgaatcaaagttgtgcttttattatccttcatttttgatgtaagggtattgtgcttagatttgaaggtaaagccatgtttctgcagaatgcattccactagtagcactacaaaattaattatgttatttggagaatctatatactataatgtcaatacataatctataaacatgtatgctttatatttttcttatcaataaactgcagccttaagaatatttctttaaataaaatatttaaatccaataaaatgaattctcatgaatattttattgtttcaatggagacttcgtaagacaaaataatttcattaatgtggatgaaaaatggaaaactcagcaaaggacatgaacaagttgttggcagaagaggaaaaacaaacaaatgtagtattgtaactggtaatcaaaagatgtgaataaaattacaataaaatactgttttaccatc

SEQ ID NO: 174888 - DNA, 724 bp, Homo sapiens
  Payload ID: 14340
  Gene Symbol: RMDN2
  Gene Name: regulator of microtubule dynamics 2
  ENST ID: ENST00000414644
  CDS Start-End: 198-724
agttacagctttgccaaggtcaatggttgtcactgtccctgagtttctacctttcagataatttttactcatcaaggaatagaaacaaatgtattggaaaggagcaagtgtgacatagtctatgtcctgaacctgaagatcaagtcagtatcagctgccatcttcctcttggaatagactgaaacgaaaaccaagaaatgccttattccacaaacaaagagttgatacttggcatcatggtgggcactgctggaatcagcttgctgctcttgtggtaccacaaggtccgtaaaccagggatagcaatgaagttacctgaatttctttctctgggtaatacatttaattcaataactttgcaagatgaaatacatgatgaccaaggaacaacagtaatctttcaagaaaggcaacttcagatactggagaagttaaacgaattactgacaaatatggaagaactcaaagaggaaatcagatttcttaaagaagctattccaaagctggaggaatatatacaagatgaacttggagggaaaataactgttcataagataagccctcagcacagagcgagaaaaagaagactccccacaattcaaagttcagcaacaagtaatagttcagaggaagcagaaagtgaaggagggtatattacagctaatactgacacagaagaacagagttttccagtccctaaggcatttaacacacgtgtagagga

SEQ ID NO: 174889 - DNA, 2073 bp, Homo sapiens
  Payload ID: 14340
  Gene Symbol: RMDN2
  Gene Name: regulator of microtubule dynamics 2
  ENST ID: ENST00000440353
  CDS Start-End: 96-578
actgtccgtccgccactgcgcgccagcaggtcctggtctccgctctccaacagctgaaaggccggcgcagtgaacacagaaacgaaaaccaagaaatgccttattccacaaacaaagagttgatacttggcatcatggtgggcactgctggaatcagcttgctgctcttgtggtaccacaaggtccgtaaaccagggatagcaatgaagttacctgaatttctttctctgggtaatacatttaattcaataactttgcaagatgaaatacatgatgaccaaggaacaacagtaatctttcaagaaaggcaacttcagatactggagaagttaaacgaattactgacaaatatggaagaactcaaagaggaaatcagatttcttaaagaagctattccaaagctggaggaatatatacaagatgaacttggagggaaaataactgttcataagataagccctcagcacagagcgagaaaaagaagactccccacaattcaaagttcagcaacaagtaatagttcagaggaagcagaaagtgaaggaggggcattttatggcttaaggatgacggcctagaagggaagggagagacttactttggattaaatttacaatgggaaagtgcttaaggtatattacagctaatactgacacagaagaacagagttttccagtccctaaggcatttaacacacgtgtagaggaattaaatttagatgtccttcttcagaaggtagatcatttacgtatgagtgagtctggcaagtcggagagttttgaactacttcgtgaccacaaagaaaagtttagagatgaaatagagtttatgtggcgatttgctcgtgcttatggagacatgtatgaactatctacaaacacacaagaaaagaaacattatgctaatattggaaaaactttaagtgaaagagctattaatagagcacccatgaatggacattgtcatctgtggtatgcagttttgtgtggctatgtatctgagtttgagggtttacaaaacaaaatcaactatgggcacctcttcaaggaacatctagatatagcaatcaaacttttaccagaggaaccctttctatattacctcaaagggagatactgctatactgtctcaaaactgagctggattgagaaaaaaatggctgctactctgtttggaaaaataccatcttcaactgtacaagaagctttacacaatttccttaaggtacattttgtgtatccattattttagtgtcagactgattaccatctgcaccaatccctgctgccgttgtcaaggaaatcttttctccatgtggagcctcagtttgaatcctggttttggcatgttctgttttaagcccctcataatgcaagttattaatatgttttaagtctaaactccttagaacaactagttatgccctaggttctaggaattacaaactactttttaaaaataacccagcagcctaaatgaaggtttaggtttgacagctcttactgctaagtccaagaacagctctctgagtcacttgagcatgtgcagaaacagtcacgccctgatggttaaacttagtcccagtcctcctgattagcctaacatagaaccagtttaatcttaaggaaataaaagtgctaaaggaagagttattttaaaagctaactcctaaagttgcagacatttctctggaagattcttggggtatcagaccaaatcagtattctcaatcctgtcttaaaatgtataatcgctgtactatacaactctaagcagtaatatatgtgtgtgtgagctcacatgtaaatgtataatatagccacccatataatcaacttcctgtgggggtaataatccctttacctttctctggaaccagtttcaaaattttatagttactaaatgtgttttccttcccaacctacctacttcaagtttacaaaaatacagacaaggctgcatgcagtggctcacctctgtaatcccaacactttggaaggccgaggtaggaggattgcttgaggccaggagtttgagaccagcctgggcaacatagcaacatgccatctctac

SEQ ID NO: 174890 - DNA, 582 bp, Homo sapiens
  Payload ID: 14340
  Gene Symbol: RMDN2
  Gene Name: regulator of microtubule dynamics 2
  ENST ID: ENST00000425641
  CDS Start-End: 1-451
agttttgtgtggctatgtatctgagtttgagggtttacaaaacaaaatcaactatgggcacctcttcaaggaacatctagatatagcaatcaaacttttaccagaggaaccctttctatattacctcaaagggagatactgctatactgtctcaaaactgagctggattgagaaaaaaatggctgctactctgtttggaaaaataccatcttcaactgtacaagaagctttacacaatttccttaaggctgaagaactatgccctggttattctaatcccaattacatgtacttagcaaagtgttatactgatcttgaggaaaaccagaatgctttgaagttctgtaatttggctttattgcttcctactgttaccaaagaggataaagaggcacagaaagagatgcaaaaaataatgacttccttgaagagacttcgtaagacaaaataatttcattaatgtggatgaaaaatggaaaactcagcaaaggacatgaacaagttgttggcagaagaggaaaaacaaacaaatgtagtattgtaactggtaatcaaaagatgtgaataaaattacaataaaat

SEQ ID NO: 174891 - DNA, 830 bp, Homo sapiens
  Payload ID: 14340
  Gene Symbol: RMDN2
  Gene Name: regulator of microtubule dynamics 2
  ENST ID: ENST00000442857
  CDS Start-End: 116-830
acatgcagcttgagcattcagtcttctgacctgttccacctctacagggcattttatggcttaaggatgacggcctagaagggaagggagagacttactttggattaaatttacaatgggaaagtgcttaaggtatattacagctaatactgacacagaagaacagagttttccagtccctaaggcatttaacacacgtgtagaggaattaaatttagatgtccttcttcagaaggtagatcatttacgtatgagtgagtctggcaagtcggagagttttgaactacttcgtgaccacaaagaaaagtttagagatgaaatagagtttatgtggcgatttgctcgtgcttatggagacatgtatgaactatctacaaacacacaagaaaagaaacattatgctaatattggaaaaactttaagtgaaagagctattaatagagcacccatgaatggacattgtcatctgtggtatgcagttttgtgtggctatgtatctgagtttgagggtttacaaaacaaaatcaactatgggcacctcttcaaggaacatctagatatagcaatcaaacttttaccagaggaaccctttctatattacctcaaagggagatactgctatactgtctcaaaactgagctggattgagaaaaaaatggctgctactctgtttggaaaaataccatcttcaactgtacaagaagctttacacaatttccttaaggctgaagaactatgccctggttattctaatcccaattacatgtacttagcaaagtgttatactgatcttgaggaaaaccagaatgctttgaagttctgtaatttgg

SEQ ID NO: 174892 - DNA, 3138 bp, Homo sapiens
  Payload ID: 14341
  Gene Symbol: RMDN3
  Gene Name: regulator of microtubule dynamics 3
  Uniprot ID: Q96TC7
  ENST ID: ENST00000260385
  CDS Start-End: 1069-2481
tgttatcatagtccataaaatcggtctttttagttgccacaattataagaagttgcatacaattacaagagtaaaacagaattataagacagcacgttaggtttaagatttatggccgggtgcggcggctcacgcactttgggagcccgaggcgggcggatcgcactttgagagaccaggagagcgggacccagtctctacaaaataaaaataaaaataaaatgtggggagagcgtgacgttttccaggtacagaggggaggtccaggcagaagcgcaggtagaaagtgtgaatatgctgagcgtattccgggagcagcaagttaagccggtgtgaccggagggaaatggaggcctggctgccggacggtgagggtgactgcgcgagcgtccgcccaagaagtctccctgccttcccgcctttcccctgtcttgggccccttcttgctttcctttcgcgctctgtgctgactccgcccctccggcggcgcccgtggccccgcccctgagggaaacagacaaggggcggggccggcgcggtcatctctctgcgccttcccgcagggcgccgagcacctggcgccgcctgcctgacgtcacggtcactgacagcgtgagcccgcggcggctgctgccatggtggctggcggccgggtaagggtctgagtggatctcctgccaggccagagcgccttcgggggccgcggcggaaggccaggagtttgcagccagggcgccgggtttgtggtctgcagtgtcgtgaggctgaggtgggggttgaaggcccagaagccggactctgtgacccgggtcggggggtgtactggaggggcggctacgtccaggctgggtgagaagagaggcagtggggcccaggaggctggaggaagccttagggttcagactggggtgcacgtagtcgagagctcagggtttgggcaaggggatacctgccggggttcagccttgagggtgggtttaccgggttcacgaatctctctctctccttacccccgcccgcccgcccgcctgcctgctcccggtgacttctgctggccgcaggtgcagcatgtctagactgggagccctgggtggtgcccgtgccgggctgggactgttgctgggtaccgccgccggccttggattcctgtgcctcctttacagccagcgatggaaacggacccagcgtcatggccgcagccagagcctgcccaactccctggactatacgcagacttcagatcccggacgccacgtgatgctcctgcgggctgtcccaggtggggctggagatgcctcagtgctgcccagccttccacgggaaggacaggagaaggtgctggaccgcctggactttgtgctgaccagccttgtggcgctgcggcgggaggtggaggagctgagaagcagcctgcgagggcttgcgggggagattgttggggaggtccgatgccacatggaagagaaccagagagtggctcggcggcgaaggtttccgtttgtccgggagaggagtgactccactggctccagctctgtctacttcacggcctcctcgggagccacgttcacagatgctgagagtgaagggggttacacaacagccaatgcggagtctgacaatgagcgggactctgacaaagaaagtgaggacggggaagatgaagtgagctgtgagactgtgaagatggggagaaaggattctcttgacttggaggaagaggcagcttcaggtgcctccagtgccctggaggctggaggttcctcaggcttggaggatgtgctgcccctcctgcagcaggccgacgagctgcacaggggtgatgagcaaggcaagcgggagggcttccagctgctgctcaacaacaagctggtgtatggaagccggcaggactttctctggcgcctggcccgagcctacagtgacatgtgtgagctcactgaggaggtgagcgagaagaagtcatatgccctagatggaaaagaagaagcagaggctgctctggagaagggggatgagagtgctgactgtcacctgtggtatgcggtgctttgtggtcagctggctgagcatgagagcatccagaggcgcatccagagtggctttagcttcaaggagcatgtggacaaagccattgctctccagccagaaaaccccatggctcactttcttcttggcaggtggtgctatcaggtctctcacctgagctggctagaaaaaaaaactgctacagccttgcttgaaagccctctcagtgccactgtggaagatgccctccagagcttcctaaaggctgaagaactacagccaggattttccaaagcaggaagggtatatatttccaagtgctacagagaactagggaaaaactctgaagctagatggtggatgaagttggccctggagctgccagatgtcacgaaggaggatttggctatccagaaggacctggaagaactggaagtcattttacgagactaaccacgtttcactggccttcatgacttgatgccactatttaaggtgggggggcggggaggcttttttccttagaccttgctgagatcaggaaaccacacaaatctgtctcctgggtctgactgctacccactaccactccccattagttaatttattctaacctctaacctaatctagaattggggcagtactcatggcttccgtttctgttgttctctcccttgagtaatctcttaaaaaaatcaagattcacacctgccccaggattacacatgggtagagcctgcaagacctgagaccttccaattgctggtgaggtggatgaacttcaaagctataggaacaaagcacataacttgtcactttaatctttttcactgactaataggactcagtacatatagtcttaagatcataccttacctaccaaggtaaaaagagggatcagagtggcccacagacattgctttcttatcacctatcatgtgaattctacctgtattcctgggctggaccacttgataacttccagtgtcctggcagcttttggaatgacagcagtggtatggggtttatgatgctataaaacaatgtctgaaaagttgcctagaatatattttgttacaaacttgaaataaaccaaatttgatgttatca

SEQ ID NO: 174893 - DNA, 2251 bp, Homo sapiens
  Payload ID: 14341
  Gene Symbol: RMDN3
  Gene Name: regulator of microtubule dynamics 3
  Uniprot ID: Q96TC7
  ENST ID: ENST00000338376
  CDS Start-End: 186-1598
gacgtcacggtcactgacagcgtgagcccgcggcggctgctgccatggtggctggcggccgggtaagggtctgagtggatctcctgccaggccagagcgccttcgggggccgcggcggaaggccaggagtttgcagccagggcgccgggtttgtggtctgcagtgtcgtgaggctgaggtgcagcatgtctagactgggagccctgggtggtgcccgtgccgggctgggactgttgctgggtaccgccgccggccttggattcctgtgcctcctttacagccagcgatggaaacggacccagcgtcatggccgcagccagagcctgcccaactccctggactatacgcagacttcagatcccggacgccacgtgatgctcctgcgggctgtcccaggtggggctggagatgcctcagtgctgcccagccttccacgggaaggacaggagaaggtgctggaccgcctggactttgtgctgaccagccttgtggcgctgcggcgggaggtggaggagctgagaagcagcctgcgagggcttgcgggggagattgttggggaggtccgatgccacatggaagagaaccagagagtggctcggcggcgaaggtttccgtttgtccgggagaggagtgactccactggctccagctctgtctacttcacggcctcctcgggagccacgttcacagatgctgagagtgaagggggttacacaacagccaatgcggagtctgacaatgagcgggactctgacaaagaaagtgaggacggggaagatgaagtgagctgtgagactgtgaagatggggagaaaggattctcttgacttggaggaagaggcagcttcaggtgcctccagtgccctggaggctggaggttcctcaggcttggaggatgtgctgcccctcctgcagcaggccgacgagctgcacaggggtgatgagcaaggcaagcgggagggcttccagctgctgctcaacaacaagctggtgtatggaagccggcaggactttctctggcgcctggcccgagcctacagtgacatgtgtgagctcactgaggaggtgagcgagaagaagtcatatgccctagatggaaaagaagaagcagaggctgctctggagaagggggatgagagtgctgactgtcacctgtggtatgcggtgctttgtggtcagctggctgagcatgagagcatccagaggcgcatccagagtggctttagcttcaaggagcatgtggacaaagccattgctctccagccagaaaaccccatggctcactttcttcttggcaggtggtgctatcaggtctctcacctgagctggctagaaaaaaaaactgctacagccttgcttgaaagccctctcagtgccactgtggaagatgccctccagagcttcctaaaggctgaagaactacagccaggattttccaaagcaggaagggtatatatttccaagtgctacagagaactagggaaaaactctgaagctagatggtggatgaagttggccctggagctgccagatgtcacgaaggaggatttggctatccagaaggacctggaagaactggaagtcattttacgagactaaccacgtttcactggccttcatgacttgatgccactatttaaggtgggggggcggggaggcttttttccttagaccttgctgagatcaggaaaccacacaaatctgtctcctgggtctgactgctacccactaccactccccattagttaatttattctaacctctaacctaatctagaattggggcagtactcatggcttccgtttctgttgttctctcccttgagtaatctcttaaaaaaatcaagattcacacctgccccaggattacacatgggtagagcctgcaagacctgagaccttccaattgctggtgaggtggatgaacttcaaagctataggaacaaagcacataacttgtcactttaatctttttcactgactaataggactcagtacatatagtcttaagatcataccttacctaccaaggtaaaaagagggatcagagtggcccacagacattgctttcttatcacctatcatgtgaattctacctgtattcctgggctggaccacttgataacttccagtgtcctggcagcttttggaatgacagcagtggtatggggtttatgatgctataaaacaatgtctgaaaagttgcctagaatatattttgttacaaacttgaaataaaccaaatttgatgtt

SEQ ID NO: 174894 - DNA, 1008 bp, Homo sapiens
  Payload ID: 14341
  Gene Symbol: RMDN3
  Gene Name: regulator of microtubule dynamics 3
  ENST ID: ENST00000560905
  CDS Start-End: 146-1008
agacaaggggcggggccggcgcggtcatctctctgcgccttcccgcagggcgccgagcacctggcgccgcctgcctgacgtcacggtcactgacagcgtgagcccgcggcggctgctgccatggtggctggcggccgggtgcagcatgtctagactgggagccctgggtggtgcccgtgccgggctgggactgttgctgggtaccgccgccggccttggattcctgtgcctcctttacagccagcgatggaaacggacccagcgtcatggccgcagccagagcctgcccaactccctggactatacgcagacttcagatcccggacgccacgtgatgctcctgcgggctgtcccaggtggggctggagatgcctcagtgctgcccagccttccacgggaaggacaggagaaggtgctggaccgcctggactttgtgctgaccagccttgtggcgctgcggcgggaggtggaggagctgagaagcagcctgcgagggcttgcgggggagattgttggggaggtccgatgccacatggaagagaaccagagagtggctcggcggcgaaggtttccgtttgtccgggagaggagtgactccactggctccagctctgtctacttcacggcctcctcgggagccacgttcacagatgctgagagtgaagggggttacacaacagccaatgcggagtctgacaatgagcgggactctgacaaagaaagtgaggacggggaagatgaagtgagctgtgagactgtgaagatggggagaaaggattctcttgacttggaggaagaggcagcttcaggtgcctccagtgccctggaggctggaggttcctcaggcttggaggatgtgctgcccctcctgcagcaggccgacgagctgcacaggggtgatgagcaaggcaagcgggagggcttccagctgctgctcaacaacaagctggtgtatggaagccggcaggactttctctggcgcctggcccgagcctacagtgacatgtg

SEQ ID NO: 174895 - DNA, 2139 bp, Homo sapiens
  Payload ID: 14341
  Gene Symbol: RMDN3
  Gene Name: regulator of microtubule dynamics 3
  ENST ID: ENST00000558777
  CDS Start-End: 172-522
tgacagcgtgagcccgcggcggctgctgccatggtggctggcggccgggtaagggtctgagtggatctcctgccaggccagagcgccttcgggggccgcggcggaaggccaggagtttgcagccagggcgccgggtttgtggtctgcagtgtcgtgaggctgaggtgcagcatgtctagactgggagccctgggtggtgcccgtgccgggctgggactgttgctgggactatacgcagacttcagatcccggacgccacgtgatgctcctgcgggctgtcccaggtggggctggagatgcctcagtgctgcccagccttccacgggaaggacaggagaaggtgctggaccgcctggactttgtgctgaccagccttgtggcgctgcggcgggaggtggaggagctgagaagcagcctgcgagggcttgcgggggagattgttggggaggtccgatgccacatggaagagaaccagagagtggctcggcggcgaaggtttccgtttgtccgggagaggagtgactccactggctccagctctgtctacttcacggcctcctcgggagccacgttcacagatgctgagagtgaagggggttacacaacagccaatgcggagtctgacaatgagcgggactctgacaaagaaagtgaggacggggaagatgaagtgagctgtgagactgtgaagatggggagaaaggattctcttgacttggaggaagaggcagcttcaggtgcctccagtgccctggaggctggaggttcctcaggcttggaggatgtgctgcccctcctgcagcaggccgacgagctgcacaggggtgatgagcaaggcaagcgggagggcttccagctgctgctcaacaacaagctggtgtatggaagccggcaggactttctctggcgcctggcccgagcctacagtgacatgtgtgagctcactgaggaggtgagcgagaagaagtcatatgccctagatggaaaagaagaagcagaggctgctctggagaagggggatgagagtgctgactgtcacctgtggtatgcggtgctttgtggtcagctggctgagcatgagagcatccagaggcgcatccagagtggctttagcttcaaggagcatgtggacaaagccattgctctccagccagaaaaccccatggctcactttcttcttggcaggtggtgctatcaggtctctcacctgagctggctagaaaaaaaaactgctacagccttgcttgaaagccctctcagtgccactgtggaagatgccctccagagcttcctaaaggctgaagaactacagccaggattttccaaagcaggaagggtatatatttccaagtgctacagagaactagggaaaaactctgaagctagatggtggatgaagttggccctggagctgccagatgtcacgaaggaggatttggctatccagaaggacctggaagaactggaagtcattttacgagactaaccacgtttcactggccttcatgacttgatgccactatttaaggtgggggggcggggaggcttttttccttagaccttgctgagatcaggaaaccacacaaatctgtctcctgggtctgactgctacccactaccactccccattagttaatttattctaacctctaacctaatctagaattggggcagtactcatggcttccgtttctgttgttctctcccttgagtaatctcttaaaaaaatcaagattcacacctgccccaggattacacatgggtagagcctgcaagacctgagaccttccaattgctggtgaggtggatgaacttcaaagctataggaacaaagcacataacttgtcactttaatctttttcactgactaataggactcagtacatatagtcttaagatcataccttacctaccaaggtaaaaagagggatcagagtggcccacagacattgctttcttatcacctatcatgtgaattctacctgtattcctgggctggaccacttgataacttccagtgtcctggcagcttttggaatgacagcagtggtatggggtttatgatgctataaaacaatgtctgaaaagttgcctagaatatattttgttacaaacttgaaataaaccaaatttgatgtt

SEQ ID NO: 174896 - DNA, 1033 bp, Homo sapiens
  Payload ID: 14341
  Gene Symbol: RMDN3
  Gene Name: regulator of microtubule dynamics 3
  ENST ID: ENST00000558232
  CDS Start-End: 1-919
agaaagtgaggacggggaagatgaagtgagctgtgagactgtgaagatggggagaaaggattctcttgacttggaggaagaggcagcttcaggtgcctccagtgccctggaggctggaggttcctcaggcttggaggatgtgctgcccctcctgcagcaggccgacgagctgcacaggggtgatgagcaaggcaagcgggagggcttccagctgctgctcaacaacaagctggtgggtgtgggggaaggccaaggcccccattctccacagttgaggaaaaaggggcctcacccgtttctgtctggtctgcagtatggaagccggcaggactttctctggcgcctggcccgagcctacagtgacatgtgtgagctcactgaggaggtgagcgagaagaagtcatatgccctagatggaaaagaagaagcagaggctgctctggagaagggggatgagagtgctgactgtcacctgtggtatgcggtgctttgtggtcagctggctgagcatgagagcatccagaggcgcatccagagtggctttagcttcaaggagcatgtggacaaagccattgctctccagccagaaaaccccatggctcactttcttcttggcaggtggtgctatcaggtctctcacctgagctggctagaaaaaaaaactgctacagccttgcttgaaagccctctcagtgccactgtggaagatgccctccagagcttcctaaaggctgaagaactacagccaggattttccaaagcaggaagggtatatatttccaagtgctacagagaactagggaaaaactctgaagctagatggtggatgaagttggccctggagctgccagatgtcacgaaggaggatttggctatccagaaggacctggaagaactggaagtcattttacgagactaaccacgtttcactggccttcatgacttgatgccactatttaaggtgggggggcggggaggcttttttccttagaccttgctgagatcaggaaaccacacaaatctgtctcctggg

SEQ ID NO: 174897 - DNA, 931 bp, Homo sapiens
  Payload ID: 14341
  Gene Symbol: RMDN3
  Gene Name: regulator of microtubule dynamics 3
  ENST ID: ENST00000560460
  CDS Start-End: 179-931
cggtcactgacagcgtgagcccgcggcggctgctgccatggtggctggcggccgggtaagggtctgagtggatctcctgccaggccagagcgccttcgggggccgcggcggaaggccaggagtttgcagccagggcgccgggtttgtggtctgcagtgtcgtgaggctgaggtgcagcatgtctagactgggagccctgggtggtgcccgtgccgggctgggactgttgctgggtaccgccgccggccttggattcctgtgcctcctttacagccagcgatggaaacggacccagcgtcatggccgcagccagagcctgcccaactccctggactatacgcagacttcagatcccggacgccacgtgatgctcctgcgggctgtcccaggtggggctggagatgcctcagtgctgcccagccttccacgggaaggacaggagaaggtgctggaccgcctggactttgtgctgaccagccttgtggcgctgcggcgggaggtggaggagctgagaagcagcctgcgagggcttgcgggggagattgttggggaggtccgccctttaatgaggagcagtagtaagaggcaccccatggtgagcagaaagacaagctggatgggacctaatggtacccttcgggatggggcctgctttccagatgccacatggaagagaaccagagagtggctcggcggcgaaggtttccgtttgtccgggagaggagtgactccactggctccagctctgtctacttcacggcctcctcgggagccacgttcacagatgctgagagtgaaggggggaaaagaagaagcagaggctgctctggagaagggggatgagagtgctgactgtcacctgtggtatgcggtgctttgtggtcagctggctgagcatgagagcatccagaggcgcatccagagtggcttt

SEQ ID NO: 174898 - DNA, 4676 bp, Homo sapiens
  Payload ID: 14342
  Gene Symbol: RTEL1
  Gene Name: regulator of telomere elongation helicase 1
  Uniprot ID: Q9NZ71
  ENST ID: ENST00000318100
  CDS Start-End: 1218-4208
agtcagccctgctgccagccagtgccgggtgctggggactcagggaggcccgccgggaccactgcgggacagtgagccgagcagaagctggaacgcaggagaggaaggagagggggcggtcagggctctcaggagccgggtcctgggcaaggcgcagccgttttcaaattttcaggaaagcggtcggctcacactcgagcagtaaaaagatgcctctggggaggaggcccgtgcagctctccgggcaatggtggtggctcggcctagagaggcggtagtggaacgcagaccctggtgggggaatgacatcaagggaggagacgggcgggaccccagatttctgcctgtgggcgatggaagtgaggttcactggccagcggagccggacacagaacgcgcaaaacgccgtgtaggcctggaggagccgaagagcaggcggaccccctccgcgggggaacagtttccgccgggagcacaaagcaacggaccggaagtggggggcggaagtgcagtgggctcagcgccgactgcgcgcctctgcccgcgaaaactctgagctggctgacagctggggacgggtggcggccctcgactggagtcggttgagttcctgagggaccccggttctggaaggttcgccgcggagacaaaaggtgaatggcatcctggagagccctacgggtacagggaagacgctgtgcctgctgtgcaccacgctggcctggcgagaacacctccgagacggcatctctgcccgcaagattgccgagagggcgcaaggagagcttttcccggatcgggccttgtcatcctggggcaacgctgctgctgctgctggagaccccatagcttgctacacggacatcccaaagattatttacgcctccaggacccactcgcaactcacacaggtcatcaacgagcttcggaacacctcctaccggcctaaggtgtgtgtgctgggctcccgggagcagctgtgcatccatcctgaggtgaagaaacaagagagtaaccatctacagatccacttgtgccgtaagaaggtggcaagtcgctcctgtcatttctacaacaacgtagaagaaaaaagcctggagcaggagctggccagccccatcctggacattgaggacttggtcaagagcggaagcaagcacagggtgtgcccttactacctgtcccggaacctgaagcagcaagccgacatcatattcatgccgtacaattacttgttggatgccaagagccgcagagcacacaacattgacctgaaggggacagtcgtgatctttgacgaagctcacaacgtggagaagatgtgtgaagaatcggcatcctttgacctgactccccatgacctggcttcaggactggacgtcatagaccaggtgctggaggagcagaccaaggcagcgcagcagggtgagccccacccggagttcagcgcggactcccccagcccagggctgaacatggagctggaagacattgcaaagctgaagatgatcctgctgcgcctggagggggccatcgatgctgttgagctgcctggagacgacagcggtgtcaccaagccagggagctacatctttgagctgtttgctgaagcccagatcacgtttcagaccaagggctgcatcctggactcgctggaccagatcatccagcacctggcaggacgtgctggagtgttcaccaacacggccggactgcagaagctggcggacattatccagattgtgttcagtgtggacccctccgagggcagccctggttccccagcagggctgggggccttacagtcctataaggtgcacatccatcctgatgctggtcaccggaggacggctcagcggtctgatgcctggagcaccactgcagccagaaagcgagggaaggtgctgagctactggtgcttcagtcccggccacagcatgcacgagctggtccgccagggcgtccgctccctcatccttaccagcggcacgctggccccggtgtcctcctttgctctggagatgcagatccctttcccagtctgcctggagaacccacacatcatcgacaagcaccagatctgggtgggggtcgtccccagaggccccgatggagcccagttgagctccgcgtttgacagacggttttccgaggagtgcttatcctccctggggaaggctctgggcaacatcgcccgcgtggtgccctatgggctcctgatcttcttcccttcctatcctgtcatggagaagagcctggagttctggcgggcccgcgacttggccaggaagatggaggcgctgaagccgctgtttgtggagcccaggagcaaaggcagcttctccgagaccatcagtgcttactatgcaagggttgccgcccctgggtccaccggcgccaccttcctggcggtctgccggggcaaggccagcgaggggctggacttctcagacacgaatggccgtggtgtgattgtcacgggcctcccgtaccccccacgcatggacccccgggttgtcctcaagatgcagttcctggatgagatgaagggccagggtggggctgggggccagttcctctctgggcaggagtggtaccggcagcaggcgtccagggctgtgaaccaggccatcgggcgagtgatccggcaccgccaggactacggagctgtcttcctctgtgaccacaggttcgcctttgccgacgcaagagcccaactgccctcctgggtgcgtccccacgtcagggtgtatgacaactttggccatgtcatccgagacgtggcccagttcttccgtgttgccgagcgaactatgccagcgccggccccccgggctacagcacccagtgtgcgtggagaagatgctgtcagcgaggccaagtcgcctggccccttcttctccaccaggaaagctaagagtctggacctgcatgtccccagcctgaagcagaggtcctcagggtcaccagctgccggggaccccgagagtagcctgtgtgtggagtatgagcaggagccagttcctgcccggcagaggcccagggggctgctggccgccctggagcacagcgaacagcgggcggggagccctggcgaggagcaggcccacagctgctccaccctgtccctcctgtctgagaagaggccggcagaagaaccgcgaggagggaggaagaagatccggctggtcagccacccggaggagcccgtggctggtgcacagacggacagggccaagctcttcatggtggccgtgaagcaggagttgagccaagccaactttgccaccttcacccaggccctgcaggactacaagggttccgatgacttcgccgccctggccgcctgtctcggccccctctttgctgaggaccccaagaagcacaacctgctccaaggcttctaccagtttgtgcggccccaccataagcagcagtttgaggaggtctgtatccagctgacaggacgaggctgtggctatcggcctgagcacagcattccccgaaggcagcgggcacagccggtcctggaccccactggaagaacggcgccggatcccaagctgaccgtgtccacggctgcagcccagcagctggacccccaagagcacctgaaccagggcaggccccacctgtcgcccaggccacccccaacaggagaccctggcagccaaccacagtgggggtctggagtgcccagagcagggaagcagggccagcacgccgtgagcgcctacctggctgatgcccgcagggccctggggtccgcgggctgtagccaactcttggcagcgctgacagcctataagcaagacgacgacctcgacaaggtgctggctgtgttggccgccctgaccactgcaaagccagaggacttccccctgctgcacaggttcagcatgtttgtgcgtccacaccacaagcagcgcttctcacagacgtgcacagacctgaccggccggccctacccgggcatggagccaccgggaccccaggaggagaggcttgccgtgcctcctgtgcttacccacagggctccccaaccaggcccctcacggtccgagaagaccgggaagacccagagcaagatctcgtccttccttagacagaggccagcagggactgtgggggcgggcggtgaggatgcaggtcccagccagtcctcaggacctccccacgggcctgcagcatctgagtggggcctctaggatgtgcccagcctgccacaccgcctccaggaagcagagcgtcatgcaggtcttctggccagagccccagtgagtgcccacggaggcccccagcacacccaacgtggcttgatcacctgcctgtccagctctggtgggccaagaacccacccaacagaataggccagcccatgccagccggcttggcccgctgcaggcctcaggcaggcggggcccatggttggtccctgcggtgggaccggatctgggcctgcctctgagaagccctgagctaccttggggtctggggtgggtttctgggaaagtgcttccccagaacttccctggctcctggcctgtgagtggtgccacaggggcaccccagctgagcccctcaccgggaaggaggagacccccgtgggcacgtgtccacttttaatcaggggacagggctctctaataaagctgctggcagtgcccaggacggtg

SEQ ID NO: 174899 - DNA, 1339 bp, Homo sapiens
  Payload ID: 14342
  Gene Symbol: RTEL1
  Gene Name: regulator of telomere elongation helicase 1
  ENST ID: ENST00000356810
  CDS Start-End: 271-1339
ctctgagctggctgacagctggggacgggtggcggccctcgactggagtcggttgagttcctgagggaccccggttctggaaggttcgccgcggagacaagtctgtgccatagggattctcgaagagaacagcgttgtgtcccagtgcacatgctcgcatcgcttaccaggagtgcccgagaccctaagatgttcggagtggttttttcgcacagacccgaatagcctgcccctcagccacgctctgtgcccttctgagaacaggctgatatgcccaagatagtcctgaatggtgtgaccgtagacttccctttccagccctacaaatgccaacaggagtacatgaccaaggtcctggaatgtctgcagcagaaggtgaatggcatcctggagagccctacgggtacagggaagacgctgtgcctgctgtgcaccacgctggcctggcgagaacacctccgagacggcatctctgcccgcaagattgccgagagggcgcaaggagagcttttcccggatcgggccttgtcatcctggggcaacgctgctgctgctgctggagaccccatagcttgctacacggacatcccaaagattatttacgcctccaggacccactcgcaactcacacaggtcatcaacgagcttcggaacacctcctaccgctccctcctacgcccgggccacgtttcagttatgctcacttcctctgaccgccgaggctcctgcgtgtctccatacagctcacgctgcagggccacgctgtgggtgttggagacagctcctcctcgacccacggtgctctctcccaccaggcctaaggtgtgtgtgctgggctcccgggagcagctgtgcatccatcctgaggtgaagaaacaagagagtaaccatctacagatccacttgtgccgtaagaaggtggcaagtcgctcctgtcatttctacaacaacgtagaagaaaaaagcctggagcaggagctggccagccccatcctggacattgaggacttggtcaagagcggaagcaagcacagggtgtgcccttactacctgtcccggaacctgaagcagcaagccgacatcatattcatgccgtacaattacttgttggatgccaagagccgcagagcacacaacattgacctgaaggggacagtcgtgatctttgacgaagctcacaacgtggagaagatgtgtgaagaatcggcatcctttgacctgactccccatgacctggcttcaggactggacgtcatagaccaggtgctggaggagcagaccaaggcagcgcagcagggtgagccccacccggagttcagcgcggactcccccagcccag

SEQ ID NO: 174900 - DNA, 4623 bp, Homo sapiens
  Payload ID: 14342
  Gene Symbol: RTEL1
  Gene Name: regulator of telomere elongation helicase 1
  Uniprot ID: Q9NZ71
  ENST ID: ENST00000360203
  CDS Start-End: 326-4228
ggaagtgcagtgggctcagcgccgactgcgcgcctctgcccgcgaaaactctgagctggctgacagctggggacgggtggcggccctcgactggagtcggttgagttcctgagggaccccggttctggaaggttcgccgcggagacaagtgagcagtctgtgccatagggattctcgaagagaacagcgttgtgtcccagtgcacatgctcgcatcgcttaccaggagtgcccgagaccctaagatgttcggagtggttttttcgcacagacccgaatagcctgcccctcagccacgctctgtgcccttctgagaacaggctgatatgcccaagatagtcctgaatggtgtgaccgtagacttccctttccagccctacaaatgccaacaggagtacatgaccaaggtcctggaatgtctgcagcagaaggtgaatggcatcctggagagccctacgggtacagggaagacgctgtgcctgctgtgcaccacgctggcctggcgagaacacctccgagacggcatctctgcccgcaagattgccgagagggcgcaaggagagcttttcccggatcgggccttgtcatcctggggcaacgctgctgctgctgctggagaccccatagcttgctacacggacatcccaaagattatttacgcctccaggacccactcgcaactcacacaggtcatcaacgagcttcggaacacctcctaccggcctaaggtgtgtgtgctgggctcccgggagcagctgtgcatccatcctgaggtgaagaaacaagagagtaaccatctacagatccacttgtgccgtaagaaggtggcaagtcgctcctgtcatttctacaacaacgtagaagaaaaaagcctggagcaggagctggccagccccatcctggacattgaggacttggtcaagagcggaagcaagcacagggtgtgcccttactacctgtcccggaacctgaagcagcaagccgacatcatattcatgccgtacaattacttgttggatgccaagagccgcagagcacacaacattgacctgaaggggacagtcgtgatctttgacgaagctcacaacgtggagaagatgtgtgaagaatcggcatcctttgacctgactccccatgacctggcttcaggactggacgtcatagaccaggtgctggaggagcagaccaaggcagcgcagcagggtgagccccacccggagttcagcgcggactcccccagcccagggctgaacatggagctggaagacattgcaaagctgaagatgatcctgctgcgcctggagggggccatcgatgctgttgagctgcctggagacgacagcggtgtcaccaagccagggagctacatctttgagctgtttgctgaagcccagatcacgtttcagaccaagggctgcatcctggactcgctggaccagatcatccagcacctggcaggacgtgctggagtgttcaccaacacggccggactgcagaagctggcggacattatccagattgtgttcagtgtggacccctccgagggcagccctggttccccagcagggctgggggccttacagtcctataaggtgcacatccatcctgatgctggtcaccggaggacggctcagcggtctgatgcctggagcaccactgcagccagaaagcgagggaaggtgctgagctactggtgcttcagtcccggccacagcatgcacgagctggtccgccagggcgtccgctccctcatccttaccagcggcacgctggccccggtgtcctcctttgctctggagatgcagatccctttcccagtctgcctggagaacccacacatcatcgacaagcaccagatctgggtgggggtcgtccccagaggccccgatggagcccagttgagctccgcgtttgacagacggttttccgaggagtgcttatcctccctggggaaggctctgggcaacatcgcccgcgtggtgccctatgggctcctgatcttcttcccttcctatcctgtcatggagaagagcctggagttctggcgggcccgcgacttggccaggaagatggaggcgctgaagccgctgtttgtggagcccaggagcaaaggcagcttctccgagaccatcagtgcttactatgcaagggttgccgcccctgggtccaccggcgccaccttcctggcggtctgccggggcaaggccagcgaggggctggacttctcagacacgaatggccgtggtgtgattgtcacgggcctcccgtaccccccacgcatggacccccgggttgtcctcaagatgcagttcctggatgagatgaagggccagggtggggctgggggccagttcctctctgggcaggagtggtaccggcagcaggcgtccagggctgtgaaccaggccatcgggcgagtgatccggcaccgccaggactacggagctgtcttcctctgtgaccacaggttcgcctttgccgacgcaagagcccaactgccctcctgggtgcgtccccacgtcagggtgtatgacaactttggccatgtcatccgagacgtggcccagttcttccgtgttgccgagcgaactatgccagcgccggccccccgggctacagcacccagtgtgcgtggagaagatgctgtcagcgaggccaagtcgcctggccccttcttctccaccaggaaagctaagagtctggacctgcatgtccccagcctgaagcagaggtcctcagggtcaccagctgccggggaccccgagagtagcctgtgtgtggagtatgagcaggagccagttcctgcccggcagaggcccagggggctgctggccgccctggagcacagcgaacagcgggcggggagccctggcgaggagcaggcccacagctgctccaccctgtccctcctgtctgagaagaggccggcagaagaaccgcgaggagggaggaagaagatccggctggtcagccacccggaggagcccgtggctggtgcacagacggacagggccaagctcttcatggtggccgtgaagcaggagttgagccaagccaactttgccaccttcacccaggccctgcaggactacaagggttccgatgacttcgccgccctggccgcctgtctcggccccctctttgctgaggaccccaagaagcacaacctgctccaaggcttctaccagtttgtgcggccccaccataagcagcagtttgaggaggtctgtatccagctgacaggacgaggctgtggctatcggcctgagcacagcattccccgaaggcagcgggcacagccggtcctggaccccactggaagaacggcgccggatcccaagctgaccgtgtccacggctgcagcccagcagctggacccccaagagcacctgaaccagggcaggccccacctgtcgcccaggccacccccaacaggagaccctggcagccaaccacagtgggggtctggagtgcccagagcagggaagcagggccagcacgccgtgagcgcctacctggctgatgcccgcagggccctggggtccgcgggctgtagccaactcttggcagcgctgacagcctataagcaagacgacgacctcgacaaggtgctggctgtgttggccgccctgaccactgcaaagccagaggacttccccctgctgcacaggttcagcatgtttgtgcgtccacaccacaagcagcgcttctcacagacgtgcacagacctgaccggccggccctacccgggcatggagccaccgggaccccaggaggagaggcttgccgtgcctcctgtgcttacccacagggctccccaaccaggcccctcacggtccgagaagaccgggaagacccagagcaagatctcgtccttccttagacagaggccagcagggactgtgggggcgggcggtgaggatgcaggtcccagccagtcctcaggacctccccacgggcctgcagcatctgagtggggtgagcctcatgggagagacatcgctgggcagcaggccacgggagctccgggcgggcccctctcagcaggctgtgtgtgccagggctgtggggcagaggacgtggtgcccttccagtgccctgcctgtgacttccagcgctgccaagcctgctggcaacggcaccttcaggcctctaggatgtgcccagcctgccacaccgcctccaggaagcagagcgtcatgcaggtcttctggccagagccccagtgagtgcccacggaggcccccagcacacccaacgtggcttgatcacctgcctgtccagctctggtgggccaagaacccacccaacagaataggccagcccatgccagccggcttggcccgctgcaggcctcaggcaggcggggcccatggttggtccctgcggtgggaccggatctgggcctgcctctgagaagccctgagctaccttggggtctggggtgggtttctgggaaagtgcttccccagaacttccctggctcctggcctgtgagtggtgccacaggggcaccccagctgagcccctcaccgggaaggaggagacccccgtgggcacgtgtccacttttaatcaggggacagggctctctaataaagctgctggcagtgcccaggacggtg

SEQ ID NO: 174901 - DNA, 2273 bp, Homo sapiens
  Payload ID: 14342
  Gene Symbol: RTEL1
  Gene Name: regulator of telomere elongation helicase 1
  Uniprot ID: Q9NZ71
  ENST ID: ENST00000370003
  CDS Start-End: 246-1883
agcctctccggctactcggggtcagcgtggggcccctgcagcagatgagggtcttcacttcggtgaactgaacccttgaagcggctgtgggcagggcagcagggctatggccaccccccaggttcgcctttgccgacgcaagagcccaactgccctcctgggtgcgtccccacgtcagggtgtatgacaactttggccatgtcatccgagacgtggcccagttcttccgtgttgccgagcgaactatgccagcgccggccccccgggctacagcacccagtgtgcgtggagaagatgctgtcagcgaggccaagtcgcctggccccttcttctccaccaggaaagctaagagtctggacctgcatgtccccagcctgaagcagaggtcctcagggtcaccagctgccggggaccccgagagtagcctgtgtgtggagtatgagcaggagccagttcctgcccggcagaggcccagggggctgctggccgccctggagcacagcgaacagcgggcggggagccctggcgaggagcaggcccacagctgctccaccctgtccctcctgtctgagaagaggccggcagaagaaccgcgaggagggaggaagaagatccggctggtcagccacccggaggagcccgtggctggtgcacagacggacagggccaagctcttcatggtggccgtgaagcaggagttgagccaagccaactttgccaccttcacccaggccctgcaggactacaagggttccgatgacttcgccgccctggccgcctgtctcggccccctctttgctgaggaccccaagaagcacaacctgctccaaggcttctaccagtttgtgcggccccaccataagcagcagtttgaggaggtctgtatccagctgacaggacgaggctgtggctatcggcctgagcacagcattccccgaaggcagcgggcacagccggtcctggaccccactggaagaacggcgccggatcccaagctgaccgtgtccacggctgcagcccagcagctggacccccaagagcacctgaaccagggcaggccccacctgtcgcccaggccacccccaacaggagaccctggcagccaaccacagtgggggtctggagtgcccagagcagggaagcagggccagcacgccgtgagcgcctacctggctgatgcccgcagggccctggggtccgcgggctgtagccaactcttggcagcgctgacagcctataagcaagacgacgacctcgacaaggtgctggctgtgttggccgccctgaccactgcaaagccagaggacttccccctgctgcacaggttcagcatgtttgtgcgtccacaccacaagcagcgcttctcacagacgtgcacagacctgaccggccggccctacccgggcatggagccaccgggaccccaggaggagaggcttgccgtgcctcctgtgcttacccacagggctccccaaccaggcccctcacggtccgagaagaccgggaagacccagagcaagatctcgtccttccttagacagaggccagcagggactgtgggggcgggcggtgaggatgcaggtcccagccagtcctcaggacctccccacgggcctgcagcatctgagtggggtgagcctcatgggagagacatcgctgggcagcaggccacgggagctccgggcgggcccctctcagcaggctgtgtgtgccagggctgtggggcagaggacgtggtgcccttccagtgccctgcctgtgacttccagcgctgccaagcctgctggcaacggcaccttcaggcctctaggatgtgcccagcctgccacaccgcctccaggaagcagagcgtcatgcaggtcttctggccagagccccagtgagtgcccacggaggcccccagcacacccaacgtggcttgatcacctgcctgtccagctctggtgggccaagaacccacccaacagaataggccagcccatgccagccggcttggcccgctgcaggcctcaggcaggcggggcccatggttggtccctgcggtgggaccggatctgggcctgcctctgagaagccctgagctaccttggggtctggggtgggtttctgggaaagtgcttccccagaacttccctggctcctggcctgtgagtggtgccacaggggcaccccagctgagcccctcaccgggaaggaggagacccccgtgggcacgtgtccacttttaatcaggggacagggctctctaataaagctgctggcagtgcccagga

SEQ ID NO: 174902 - DNA, 4955 bp, Homo sapiens
  Payload ID: 14342
  Gene Symbol: RTEL1
  Gene Name: regulator of telomere elongation helicase 1
  Uniprot ID: Q9NZ71
  ENST ID: ENST00000370018
  CDS Start-End: 828-4487
agtcagccctgctgccagccagtgccgggtgctggggactcagggaggcccgccgggaccactgcgggacagtgagccgagcagaagctggaacgcaggagaggaaggagagggggcggtcagggctctcaggagccgggtcctgggcaaggcgcagccgttttcaaattttcaggaaagcggtcggctcacactcgagcagtaaaaagatgcctctggggaggaggcccgtgcagctctccgggcaatggtggtggctcggcctagagaggcggtagtggaacgcagaccctggtgggggaatgacatcaagggaggagacgggcgggaccccagatttctgcctgtgggcgatggaagtgaggttcactggccagcggagccggacacagaacgcgcaaaacgccgtgtaggcctggaggagccgaagagcaggcggaccccctccgcgggggaacagtttccgccgggagcacaaagcaacggaccggaagtggggggcggaagtgcagtgggctcagcgccgactgcgcgcctctgcccgcgaaaactctgagctggctgacagctggggacgggtggcggccctcgactggagtcggttgagttcctgagggaccccggttctggaaggttcgccgcggagacaagtgagcagtctgtgccatagggattctcgaagagaacagcgttgtgtcccagtgcacatgctcgcatcgcttaccaggagtgcccgagaccctaagatgttcggagtggttttttcgcacagacccgaatagcctgcccctcagccacgctctgtgcccttctgagaacaggctgatatgcccaagatagtcctgaatggtgtgaccgtagacttccctttccagccctacaaatgccaacaggagtacatgaccaaggtcctggaatgtctgcagcagaaggtgaatggcatcctggagagccctacgggtacagggaagacgctgtgcctgctgtgcaccacgctggcctggcgagaacacctccgagacggcatctctgcccgcaagattgccgagagggcgcaaggagagcttttcccggatcgggccttgtcatcctggggcaacgctgctgctgctgctggagaccccatagcttgctacacggacatcccaaagattatttacgcctccaggacccactcgcaactcacacaggtcatcaacgagcttcggaacacctcctaccggcctaaggtgtgtgtgctgggctcccgggagcagctgtgcatccatcctgaggtgaagaaacaagagagtaaccatctacagatccacttgtgccgtaagaaggtggcaagtcgctcctgtcatttctacaacaacgtagaagaaaaaagcctggagcaggagctggccagccccatcctggacattgaggacttggtcaagagcggaagcaagcacagggtgtgcccttactacctgtcccggaacctgaagcagcaagccgacatcatattcatgccgtacaattacttgttggatgccaagagccgcagagcacacaacattgacctgaaggggacagtcgtgatctttgacgaagctcacaacgtggagaagatgtgtgaagaatcggcatcctttgacctgactccccatgacctggcttcaggactggacgtcatagaccaggtgctggaggagcagaccaaggcagcgcagcagggtgagccccacccggagttcagcgcggactcccccagcccagggctgaacatggagctggaagacattgcaaagctgaagatgatcctgctgcgcctggagggggccatcgatgctgttgagctgcctggagacgacagcggtgtcaccaagccagggagctacatctttgagctgtttgctgaagcccagatcacgtttcagaccaagggctgcatcctggactcgctggaccagatcatccagcacctggcaggacgtgctggagtgttcaccaacacggccggactgcagaagctggcggacattatccagattgtgttcagtgtggacccctccgagggcagccctggttccccagcagggctgggggccttacagtcctataaggtgcacatccatcctgatgctggtcaccggaggacggctcagcggtctgatgcctggagcaccactgcagccagaaagcgagggaaggtgctgagctactggtgcttcagtcccggccacagcatgcacgagctggtccgccagggcgtccgctccctcatccttaccagcggcacgctggccccggtgtcctcctttgctctggagatgcagatccctttcccagtctgcctggagaacccacacatcatcgacaagcaccagatctgggtgggggtcgtccccagaggccccgatggagcccagttgagctccgcgtttgacagacggttttccgaggagtgcttatcctccctggggaaggctctgggcaacatcgcccgcgtggtgccctatgggctcctgatcttcttcccttcctatcctgtcatggagaagagcctggagttctggcgggcccgcgacttggccaggaagatggaggcgctgaagccgctgtttgtggagcccaggagcaaaggcagcttctccgagaccatcagtgcttactatgcaagggttgccgcccctgggtccaccggcgccaccttcctggcggtctgccggggcaaggccagcgaggggctggacttctcagacacgaatggccgtggtgtgattgtcacgggcctcccgtaccccccacgcatggacccccgggttgtcctcaagatgcagttcctggatgagatgaagggccagggtggggctgggggccagttcctctctgggcaggagtggtaccggcagcaggcgtccagggctgtgaaccaggccatcgggcgagtgatccggcaccgccaggactacggagctgtcttcctctgtgaccacaggttcgcctttgccgacgcaagagcccaactgccctcctgggtgcgtccccacgtcagggtgtatgacaactttggccatgtcatccgagacgtggcccagttcttccgtgttgccgagcgaactatgccagcgccggccccccgggctacagcacccagtgtgcgtggagaagatgctgtcagcgaggccaagtcgcctggccccttcttctccaccaggaaagctaagagtctggacctgcatgtccccagcctgaagcagaggtcctcagggtcaccagctgccggggaccccgagagtagcctgtgtgtggagtatgagcaggagccagttcctgcccggcagaggcccagggggctgctggccgccctggagcacagcgaacagcgggcggggagccctggcgaggagcaggcccacagctgctccaccctgtccctcctgtctgagaagaggccggcagaagaaccgcgaggagggaggaagaagatccggctggtcagccacccggaggagcccgtggctggtgcacagacggacagggccaagctcttcatggtggccgtgaagcaggagttgagccaagccaactttgccaccttcacccaggccctgcaggactacaagggttccgatgacttcgccgccctggccgcctgtctcggccccctctttgctgaggaccccaagaagcacaacctgctccaaggcttctaccagtttgtgcggccccaccataagcagcagtttgaggaggtctgtatccagctgacaggacgaggctgtggctatcggcctgagcacagcattccccgaaggcagcgggcacagccggtcctggaccccactggaagaacggcgccggatcccaagctgaccgtgtccacggctgcagcccagcagctggacccccaagagcacctgaaccagggcaggccccacctgtcgcccaggccacccccaacaggagaccctggcagccaaccacagtgggggtctggagtgcccagagcagggaagcagggccagcacgccgtgagcgcctacctggctgatgcccgcagggccctggggtccgcgggctgtagccaactcttggcagcgctgacagcctataagcaagacgacgacctcgacaaggtgctggctgtgttggccgccctgaccactgcaaagccagaggacttccccctgctgcacaggttcagcatgtttgtgcgtccacaccacaagcagcgcttctcacagacgtgcacagacctgaccggccggccctacccgggcatggagccaccgggaccccaggaggagaggcttgccgtgcctcctgtgcttacccacagggctccccaaccaggcccctcacggtccgagaagaccgggaagacccagagcaagatctcgtccttccttagacagaggccagcagggactgtgggggcgggcggtgaggatgcaggtcccagccagtcctcaggacctccccacgggcctgcagcatctgagtggggcctctaggatgtgcccagcctgccacaccgcctccaggaagcagagcgtcatgcaggtcttctggccagagccccagtgagtgcccacggaggcccccagcacacccaacgtggcttgatcacctgcctgtccagctctggtgggccaagaacccacccaacagaataggccagcccatgccagccggcttggcccgctgcaggcctcaggcaggcggggcccatggttggtccctgcggtgggaccggatctgggcctgcctctgagaagccctgagctaccttggggtctggggtgggtttctgggaaagtgcttccccagaacttccctggctcctggcctgtgagtggtgccacaggggcaccccagctgagcccctcaccgggaaggaggagacccccgtgggcacgtgtccacttttaatcaggggacagggctctctaataaagctgctggcagtgcccaggacggtg

SEQ ID NO: 174903 - DNA, 664 bp, Homo sapiens
  Payload ID: 14342
  Gene Symbol: RTEL1
  Gene Name: regulator of telomere elongation helicase 1
  ENST ID: ENST00000425905
  CDS Start-End: 1-664
ttcttcccttcctatcctgtcatggagaagagcctggagttctggcgggcccgcgacttggccaggaagatggaggcgctgaagccgctgtttgtggagcccaggagcaaaggcagcttctccgagaccatcagtgcttactatgcaagggttgccgcccctgggtccaccggcgccaccttcctggcggtctgccggggcaagttcctctctgggcaggagtggtaccggcagcaggcgtccagggctgtgaaccaggccatcgggcgagtgatccggcaccgccaggactacggagctgtcttcctctgtgaccacaggttcgcctttgccgacgcaagagcccaactgccctcctgggtgcgtccccacgtcagggtgtatgacaactttggccatgtcatccgagacgtggcccagttcttccgtgttgccgagcgaactatgccagcgccggccccccgggctacagcacccagtgtgcgtggagaagatgctgtcagcgaggccaagtcgcctggccccttcttctccaccaggaaagctaagagtctggacctgcatgtccccagcctgaagcagaggtcctcagggtcaccagctgccggggaccccgagagtagcctgtgtgtggagtatgagcaggagccagttcctgcccggc

SEQ ID NO: 174904 - DNA, 4273 bp, Homo sapiens
  Payload ID: 14342
  Gene Symbol: RTEL1
  Gene Name: regulator of telomere elongation helicase 1
  Uniprot ID: Q9NZ71
  ENST ID: ENST00000508582
  CDS Start-End: 347-4078
aacggaccggaagtggggggcggaagtgcagtgggctcagcgccgactgcgcgcctctgcccgcgaaaactctgagctggctgacagctggggacgggtggcggccctcgactggagtcggttgagttcctgagggaccccggttctggaaggttcgccgcggagacaagtgagcagtctgtgccatagggattctcgaagagaacagcgttgtgtcccagtgcacatgctcgcatcgcttaccaggagtgcccgagaccctaagatgttcggagtggttttttcgcacagacccgaatagcctgcccctcagccacgctctgtgcccttctgagaacaggctgatatgcccaagatagtcctgaatggtgtgaccgtagacttccctttccagccctacaaatgccaacaggagtacatgaccaaggtcctggaatgtctgcagcagaaggtgaatggcatcctggagagccctacgggtacagggaagacgctgtgcctgctgtgcaccacgctggcctggcgagaacacctccgagacggcatctctgcccgcaagattgccgagagggcgcaaggagagcttttcccggatcgggccttgtcatcctggggcaacgctgctgctgctgctggagaccccatagcttgctacacggacatcccaaagattatttacgcctccaggacccactcgcaactcacacaggtcatcaacgagcttcggaacacctcctaccgctcacgctgcagggccacgctgtgggtgttggagacagctcctcctcgacccacggtgctctctcccaccaggcctaaggtgtgtgtgctgggctcccgggagcagctgtgcatccatcctgaggtgaagaaacaagagagtaaccatctacagatccacttgtgccgtaagaaggtggcaagtcgctcctgtcatttctacaacaacgtagaagaaaaaagcctggagcaggagctggccagccccatcctggacattgaggacttggtcaagagcggaagcaagcacagggtgtgcccttactacctgtcccggaacctgaagcagcaagccgacatcatattcatgccgtacaattacttgttggatgccaagagccgcagagcacacaacattgacctgaaggggacagtcgtgatctttgacgaagctcacaacgtggagaagatgtgtgaagaatcggcatcctttgacctgactccccatgacctggcttcaggactggacgtcatagaccaggtgctggaggagcagaccaaggcagcgcagcagggtgagccccacccggagttcagcgcggactcccccagcccagggctgaacatggagctggaagacattgcaaagctgaagatgatcctgctgcgcctggagggggccatcgatgctgttgagctgcctggagacgacagcggtgtcaccaagccagggagctacatctttgagctgtttgctgaagcccagatcacgtttcagaccaagggctgcatcctggactcgctggaccagatcatccagcacctggcaggacgtgctggagtgttcaccaacacggccggactgcagaagctggcggacattatccagattgtgttcagtgtggacccctccgagggcagccctggttccccagcagggctgggggccttacagtcctataaggtgcacatccatcctgatgctggtcaccggaggacggctcagcggtctgatgcctggagcaccactgcagccagaaagcgagggaaggtgctgagctactggtgcttcagtcccggccacagcatgcacgagctggtccgccagggcgtccgctccctcatccttaccagcggcacgctggccccggtgtcctcctttgctctggagatgcagatccctttcccagtctgcctggagaacccacacatcatcgacaagcaccagatctgggtgggggtcgtccccagaggccccgatggagcccagttgagctccgcgtttgacagacggttttccgaggagtgcttatcctccctggggaaggctctgggcaacatcgcccgcgtggtgccctatgggctcctgatcttcttcccttcctatcctgtcatggagaagagcctggagttctggcgggcccgcgacttggccaggaagatggaggcgctgaagccgctgtttgtggagcccaggagcaaaggcagcttctccgagaccatcagtgcttactatgcaagggttgccgcccctgggtccaccggcgccaccttcctggcggtctgccggggcaaggccagcgaggggctggacttctcagacacgaatggccgtggtgtgattgtcacgggcctcccgtaccccccacgcatggacccccgggttgtcctcaagatgcagttcctggatgagatgaagggccagggtggggctgggggccagttcctctctgggcaggagtggtaccggcagcaggcgtccagggctgtgaaccaggccatcgggcgagtgatccggcaccgccaggactacggagctgtcttcctctgtgaccacaggttcgcctttgccgacgcaagagcccaactgccctcctgggtgcgtccccacgtcagggtgtatgacaactttggccatgtcatccgagacgtggcccagttcttccgtgttgccgagcgaactatgccagcgccggccccccgggctacagcacccagtgtgcgtggagaagatgctgtcagcgaggccaagtcgcctggccccttcttctccaccaggaaagctaagagtctggacctgcatgtccccagcctgaagcagaggtcctcagggtcaccagctgccggggaccccgagagtagcctgtgtgtggagtatgagcaggagccagttcctgcccggcagaggcccagggggctgctggccgccctggagcacagcgaacagcgggcggggagccctggcgaggagcaggcccacagctgctccaccctgtccctcctgtctgagaagaggccggcagaagaaccgcgaggagggaggaagaagatccggctggtcagccacccggaggagcccgtggctggtgcacagacggacagggccaagctcttcatggtggccgtgaagcaggagttgagccaagccaactttgccaccttcacccaggccctgcaggactacaagggttccgatgacttcgccgccctggccgcctgtctcggccccctctttgctgaggaccccaagaagcacaacctgctccaaggcttctaccagtttgtgcggccccaccataagcagcagtttgaggaggtctgtatccagctgacaggacgaggctgtggctatcggcctgagcacagcattccccgaaggcagcgggcacagccggtcctggaccccactggaagaacggcgccggatcccaagctgaccgtgtccacggctgcagcccagcagctggacccccaagagcacctgaaccagggcaggccccacctgtcgcccaggccacccccaacaggagaccctggcagccaaccacagtgggggtctggagtgcccagagcagggaagcagggccagcacgccgtgagcgcctacctggctgatgcccgcagggccctggggtccgcgggctgtagccaactcttggcagcgctgacagcctataagcaagacgacgacctcgacaaggtgctggctgtgttggccgccctgaccactgcaaagccagaggacttccccctgctgcacaggttcagcatgtttgtgcgtccacaccacaagcagcgcttctcacagacgtgcacagacctgaccggccggccctacccgggcatggagccaccgggaccccaggaggagaggcttgccgtgcctcctgtgcttacccacagggctccccaaccaggcccctcacggtccgagaagaccgggaagacccagagcaagatctcgtccttccttagacagaggccagcagggactgtgggggcgggcggtgaggatgcaggtcccagccagtcctcaggacctccccacgggcctgcagcatctgagtggggcctctaggatgtgcccagcctgccacaccgcctccaggaagcagagcgtcatgcaggtcttctggccagagccccagtgagtgcccacggaggcccccagcacacccaacgtggcttgatcacctgcctgtccagctctggtgggccaagaacccacccaacagaataggccagcccatgccagccggcttggcccgctgca

SEQ ID NO: 174905 - DNA, 2222 bp, Homo sapiens
  Payload ID: 14342
  Gene Symbol: RTEL1
  Gene Name: regulator of telomere elongation helicase 1
  ENST ID: ENST00000496816
  CDS Start-End: 1-951
gtcttcctctgtgaccacaggttcgcctttgccgacgcaagagcccaactgccctcctgggtgcgtccccacgtcagggtgtatgacaactttggccatgtcatccgagacgtggcccagttcttccgtgttgccgagcgaactatgccagcgccggccccccgggctacagcacccagtgtgcgtggagaagatgctgtcagcgaggccaagtcgcctggccccttcttctccaccaggaaagctaagagtctggacctgcatgtccccagcctgaagcagaggtcctcagggtcaccagctgccggggaccccgagagtagcctgtgtgtggagtatgagcaggagccagttcctgcccggcagaggcccagggggctgctggccgccctggagcacagcgaacagcgggcggggagccctggcgaggagcaggcccacagctgctccaccctgtccctcctgtctgagaagaggccggcagaagaaccgcgaggagggaggaagaagatccggctggtcagccacccggaggagcccgtggctggtgcacagacggacagggccaagctcttcatggtggccgtgaagcaggagttgagccaagccaactttgccaccttcacccaggccctgcaggactacaagggttccgatgacttcgccgccctggccgcctgtctcggccccctctttgctgaggaccccaagaagcacaacctgctccaaggcttctaccagtttgtgcggccccaccataagcagcagtttgaggaggtctgtatccagctgacaggacgaggctgtggctatcggcctgagcacagcattccccgaaggcagcgggcacagccggtcctggaccccactgggaactttccagatgctctcgaccagctttgtggctctacatctcttcatcaggaagaacggcgccggatcccaagctgaccgtgtccacggctgcagcccagcagctggacccccaagagcacctgaaccagggcaggccccacctgtcgcccaggccacccccaacaggagaccctggcagccaaccacagtgggggtctggagtgcccagagcagggaagcagggccagcacgccgtgagcgcctacctggctgatgcccgcagggccctggggtccgcgggctgtagccaactcttggcagcgctgacagcctataagcaagacgacgacctcgacaaggtgctggctgtgttggccgccctgaccactgcaaagccagaggacttccccctgctgcacaggttcagcatgtttgtgcgtccacaccacaagcagcgcttctcacagacgtgcacagacctgaccggccggccctacccgggcatggagccaccgggaccccaggaggagaggcttgccgtgcctcctgtgcttacccacagggctccccaaccaggcccctcacggtccgagaagaccgggaagacccagagcaagatctcgtccttccttagacagaggccagcagggactgtgggggcgggcggtgaggatgcaggtcccagccagtcctcaggacctccccacgggcctgcagcatctgagtggggtgagcctcatgggagagacatcgctgggcagcaggccacgggagctccgggcgggcccctctcagcaggctgtgtgtgccagggctgtggggcagaggacgtggtgcccttccagtgccctgcctgtgacttccagcgctgccaagcctgctggcaacggcaccttcaggcctctaggatgtgcccagcctgccacaccgcctccaggaagcagagcgtcatgcaggtcttctggccagagccccagtgagtgcccacggaggcccccagcacacccaacgtggcttgatcacctgcctgtccagctctggtgggccaagaacccacccaacagaataggccagcccatgccagccggcttggcccgctgcaggcctcaggcaggcggggcccatggttggtccctgcggtgggaccggatctgggcctgcctctgagaagccctgagctaccttggggtctggggtgggtttctgggaaagtgcttccccagaacttccctggctcctggcctgtgagtggtgccacaggggcaccccagctgagcccctcaccgggaaggaggagacccccgtgggcacgtgtccacttttaatcaggggacagggctctctaataaagctgctggcagtgccca

SEQ ID NO: 174906 - DNA, 6408 bp, Homo sapiens
  Payload ID: 14343
  Gene Symbol: RPTOR
  Gene Name: regulatory associated protein of MTOR, complex 1
  Uniprot ID: Q8N122
  ENST ID: ENST00000306801
  CDS Start-End: 363-4370
gagagcagggtcatcgtgaggcctgaagtctcttacgcttttggcagctcccctcgcagcccctctggaaacgtacagcctcaggagcagccagtggcttgggacctggggtggtgtgtgtctgcggagcttcttgggctgccccatttcctagcggcccccacctccccacttcccgctcagagttagagataaggatctcagacttttgcctgagtaagggtctccgcactctttatccatttggttttcgatttcccgtttttgtttcttatttcaccaattctggtacacgctagtttttaaggctggaggttctcgagcgcttgctgccaaggactcccccaccccctcccccactgatggagtccgaaatgctgcaatcgcctcttctgggcctgggggaggaagatgaggctgatcttacagactggaacctacctttggcttttatgaaaaagaggcactgtgagaaaattgaaggctccaaatccttagctcagagctggaggatgaaggatcggatgaagacagtcagtgttgccttagttttgtgcctgaatgttggtgtggaccctcccgatgtggtgaagaccacgccctgtgcacgcttggaatgctggatcgatcctctgtcgatgggtcctcagaaagctctggaaaccatcggtgcaaatttacagaagcagtacgagaactggcagccaagggcccggtacaagcagagccttgacccaactgtggatgaagtcaagaagctctgcacgtccttacgtcgcaacgccaaggaggagcgagtcctctttcactacaatggccacggggtgccccggcccacagtcaacggggaggtctgggtcttcaacaagaactacacgcagtacatccctctgtccatatatgacctgcagacgtggatgggcagcccgtcgatcttcgtctacgactgctccaatgctggcttgatcgtcaagtccttcaagcagttcgcactacagcgggagcaggagctggaggtagctgcaatcaacccaaatcaccctcttgctcagatgcctttgcctccgtcgatgaaaaactgcatccagctggcagcctgcgaggccaccgagctgctgcccatgatccccgacctcccggctgacctattcacctcctgcctcaccacccccatcaagatcgccctgcgctggttttgcatgcagaaatgtgtcagtctggtgcctggcgtcacactggatttgatagaaaagatccctggccgcctgaacgacaggaggacgcccctgggtgaactgaactggatcttcacagccatcacagacaccatcgcgtggaacgtgctcccccgggatctcttccaaaagctcttcagacaggacttgctggtggctagtctgtttcgaaattttttattggcggaaaggattatgaggtcgtataactgcactcccgtcagcagcccgcgtctgccgcccacgtacatgcacgccatgtggcaagcctgggacctggctgttgacatctgtctgtctcagctgccgacgatcatcgaggaaggcactgcgtttcggcacagcccgttcttcgccgagcagctgaccgcattccaggtgtggctcaccatgggcgtggagaaccgaaacccacccgaacagctgcccatcgtcctgcaggtgctgttaagccaagtgcaccggctgagagcattggacttgcttggaagatttttggacctgggtccctgggcagtgagcctggccttgtctgtcggcatcttcccctacgtgctgaagctgctccagagctcggcccgagagctgcggccacttctcgttttcatctgggccaagatcctcgcagtggacagctcgtgccaagcggacctcgtgaaggacaacggccacaagtacttcctgtcggtcctggcggacccctacatgccagctgaacaccggaccatgacggctttcattctcgccgtgatcgtcaacagctatcacacggggcaggaagcctgccttcagggaaacctcattgccatctgcctggagcagctcaacgacccgcaccccttgctgcgccagtgggtggccatctgcctcggcaggatctggcagaacttcgactcggcgaggtggtgcggcgtgagggacagcgctcatgagaagctctacagcctcctctccgaccccattcccgaggtccgctgcgcagcggtcttcgcccttggcacgttcgtgggcaactctgcagagaggacggaccactccaccaccatcgaccacaacgtggccatgatgctggcccagctggtcagcgacgggagccccatggtccggaaggagctggtggtggctctgagtcatcttgtggttcagtatgaaagcaatttctgcaccgtggccctgcagttcatagaagaggaaaagaactacgccttgccttctccagcaaccacagagggagggagtttgaccccagtgcgagacagcccgtgcacccccagacttcgttctgtgagctcctatggaaacatccgtgctgtcgccacagccaggagcctcaacaaatctttgcagaacctgagtttgacagaggaatctggtggcgcggtggcgttctcccccggaaacctcagcaccagcagcagcgccagcagcaccctgggcagccccgagaatgaggagcatatcctgtccttcgagaccatcgacaagatgcgccgcgccagctcctactcctccctcaactccctcatcggagtttcctttaacagtgtttacactcagatttggagagtcctgctgcacctggctgctgacccctatccagaggtctcggacgtggccatgaaagtactcaacagcatcgcctacaaggccaccgtgaacgcccggccgcagcgcgtcctggacacctcctccctcacgcagtcggcccccgccagccccaccaacaagggcgtgcacatccaccaggcggggggctcccctccggcgtccagcaccagcagctccagcctgaccaacgatgtggccaagcagccggtcagccgagacttgccttctggccggccgggcaccacaggccccgctggggcgcagtacacccctcactcccaccagttcccccggacacggaagatgttcgacaagggcccagagcagactgcggacgacgcggacgatgctgctggacacaaaagtttcatctccgccacggtgcagacggggttctgcgactggagcgcccgctattttgcccagcccgtcatgaagatcccagaagagcacgacctggagagtcagatccgcaaggagcgggagtggcggttcctgcgaaacagccgtgtcaggaggcaggcccagcaagtcattcagaagggcattacgagattggacgaccaaatatttctgaacaggaaccccggcgtcccctctgtggtgaaattccaccccttcacgccgtgcatcgccgtagccgacaaggacagcatctgcttttgggactgggagaaaggggagaagctggattatttccacaatgggaaccctcggtacacgagggtcactgccatggagtatctgaacggccaggactgctcgcttctgctgacggccacagacgatggtgccatcagggtctggaagaattttgctgatttggaaaagaacccagagatggtgaccgcgtggcaggggctctcggacatgctgccaacgacgcgaggagctgggatggtggtggactgggagcaggagaccggcctcctcatgagctcaggagacgtgcggatcgtccggatctgggacacagaccgtgagatgaaggtgcaggacatccctacgggcgcagacagctgtgtgacgagtctgtcctgtgattcccaccgctcactcatcgtggctggcctcggtgacggctccatccgcgtctacgacagaaggatggcactcagcgaatgccgcgtcatgacgtaccgggagcacacagcctgggtggtgaaggcctccctgcagaagcgtcccgacggccacatcgtgagtgtgagcgtcaatggagatgtgcgcatctttgatccccggatgcctgagtcggtaaatgtgcttcagatcgtgaaggggctgacggccctggacatccacccccaggcggacctgatcgcatgtggctccgtcaatcagttcaccgccatctacaacagcagcggagagctcatcaacaacatcaagtactacgacggcttcatgggccagcgggtcggcgccatcagctgcctggccttccacccgcactggcctcacctggccgtgggaagcaacgactactacatctccgtgtactcggtggagaagcgtgtcagatagcggcgtgacccgggcccaccaggccacggccgcctgctgtacatagtgaagctgtcactcgccggggcacggggcgtcggctgctgcggccccgcagtgtgaacgttggctgctgccttagctgctgatgacggcaggagggccctgctactcgcttttgtctgtcttcgctgtcgtgtctggaatgtcagggaaggggagggctcgggttgacggtggcttcccactgagcaccagcatccaggtgcacccccgcggccacggcgcctctgtccctctcctgttctgtgtttctctgagacgctgaaaggggaaacacctcactttatttccatgtaatcagagcattagctgcagaaaaaccccccgacagagccctggcggagaggcaggcgctggggctcctacgggtccctggggcagctgtccccatcaggccaagagcgagcgagaggcgctgccccagccaggcccaccacctctcacagtcagtgcacgcaagcagggacatttcctagccagctgggggacactggaaattcgggaaaccaagagagaggaagaaggagacgcccctccaactggcgggtgtgaaggaagccgcccaggggtccgggctgtccttggccgctggcagcatcactgagcaggaagcgcacagcccaccctccccgcacctccaggtctctggactccagttttggcccctctcacacagagctgtcagcaggggccgctgtggcggtgcacaggggaggcaggtccttggcgaggtagcccctgccttaatccacggggctcctttccctccgaagggctgctcttccccacaggcgcggggacagcagcccgacctgtggtctccatgcctgtgccctcacacaggtgtagcacacgcatgtgcagatggcaccacggccggcacctgggggcacacacatgcaggcggcgtggtctccctgctctgtccccacacgttcctcacatacaggcaagaggcactgccgggtcccggacggctccgggtgacaccagccccgtctccagccttgagccgcccatgctgatgcgacctcggctgacagctgggcctgtggtgcagacaggagctgtgtggacagtcccgcccaggaggggccgcagggcgtgtatgagcagttttgcaaacagaacacaaccacaatgatggtattttgaaaagtgttctttccgtgttcgtcgggaatcaggattattgagaggtgaaggagccaggtggcttcattctggcggtgagaggcccacgaccacgggagtgagagctggtgtggcgaggcccggctctcctgcggtgtggctggtggcctgccgtggccaagagcatcttctgggtggatggaaccctgcctggtcacatttggccagagacacacctggccctcagggggctgagctggagactgagctggggctggccgggacgtgacaaggcaggacagaggcggcccctccgctgctcctttttggaatgcgagctcccaccagaagaaggttccggcacgaatcccatccccacgtctgggccgagaaagcagcccgggtccggaaggtgtagagagtcccggcctcactcagctcacagggcgtgccaggcggcaacaccagaatcttccagaagcccagctccacccgcacacgcagcttcccatccagtccttcaactcaattcttacccaacacgcgtttctgtttgttttgagacaaaatcaccacctgtcaaaaggcaggtggctccagaggggtcaagacccccccccgcccccgctccaccctggagcccacccccatgggcaccgcgtgccgcctgcacgtgggctgtcttcacaggtctgatgtgaaaattcaatcacgacgttaaccggctcgagagagcgccggcctagaggctcattatctatttattttaccaaacgcgaattgagacggactttgacaaaacacgaaatggtaatgtgaagctaagagcagagagtgaccaacagtaaacaacacgcgcaga

SEQ ID NO: 174907 - DNA, 5734 bp, Homo sapiens
  Payload ID: 14343
  Gene Symbol: RPTOR
  Gene Name: regulatory associated protein of MTOR, complex 1
  Uniprot ID: Q8N122
  ENST ID: ENST00000544334
  CDS Start-End: 163-3696
tcagacttttgcctgagtaagggtctccgcactctttatccatttggttttcgatttcccgtttttgtttcttatttcaccaattctggtacacgctagtttttaaggctggaggttctcgagcgcttgctgccaaggactcccccaccccctcccccactgatggagtccgaaatgctgcaatcgcctcttctgggcctgggggaggaagatgaggctgatcttacagactggaacctacctttggcttttatgaaaaagaggcactgtgagaaaattgaaggctccaaatccttagctcagagctggaggatgaaggatcggatgaagacagtcagtgttgccttagttttgtgcctgaatgttggtgtggaccctcccgatgtggtgaagaccacgccctgtgcacgcttggaatgctggatcgatcctctgtcgatgggtcctcagaaagctctggaaaccatcggtgcaaatttacagaagcagtacgagaactggcagccaagggcccggtacaagcagagccttgacccaactgtggatgaagtcaagaagctctgcacgtccttacgtcgcaacgccaaggaggagcgagtcctctttcactacaatggccacggggtgccccggcccacagtcaacggggaggtctgggtcttcaacaagaactacacgcagtacatccctctgtccatatatgacctgcagacgtggatgggcagcccgtcgatcttcgtctacgactgctccaatgctggcttgatcgtcaagtccttcaagcagttcgcactacagcgggagcaggagctggaggtagctgcaatcaacccaaatcaccctcttgctcagatgcctttgcctccgtcgatgaaaaactgcatccagctggcagcctgcgaggccaccgagctgctgcccatgatccccgacctcccggctgacctattcacctcctgcctcaccacccccatcaagatcgccctgcgctggttttgcatgcagaaatgtgtcagtctggtgcctggcgtcacactggatttgatagaaaagatccctggccgcctgaacgacaggaggacgcccctgggtgaactgaactggatcttcacagccatcacagacaccatcgcgtggaacgtgctcccccgggatctcttccaaaagctcttcagacaggacttgctggtggctagtctgtttcgaaattttttattggcggaaaggattatgaggtcgtataactgcactcccgtcagcagcccgcgtctgccgcccacgtacatgcacgccatgtggcaagcctgggacctggctgttgacatctgtctgtctcagctgccgacgatcatcgaggaaggcactgcgtttcggcacagcccgttcttcgccgagcagctgaccgcattccaggtgtggctcaccatgggcgtggagaaccgaaacccacccgaacagctgcccatcgtcctgcaggtgctgttaagccaagtgcaccggctgagagcattggacttgcttggaagatttttggacctgggtccctgggcagtgagcctggccttgtctgtcggcatcttcccctacgtgctgaagctgctccagagctcggcccgagagctgcggccacttctcgttttcatctgggccaagatcctcgcagtggacagcgagctggtggtggctctgagtcatcttgtggttcagtatgaaagcaatttctgcaccgtggccctgcagttcatagaagaggaaaagaactacgccttgccttctccagcaaccacagagggagggagtttgaccccagtgcgagacagcccgtgcacccccagacttcgttctgtgagctcctatggaaacatccgtgctgtcgccacagccaggagcctcaacaaatctttgcagaacctgagtttgacagaggaatctggtggcgcggtggcgttctcccccggaaacctcagcaccagcagcagcgccagcagcaccctgggcagccccgagaatgaggagcatatcctgtccttcgagaccatcgacaagatgcgccgcgccagctcctactcctccctcaactccctcatcggagtttcctttaacagtgtttacactcagatttggagagtcctgctgcacctggctgctgacccctatccagaggtctcggacgtggccatgaaagtactcaacagcatcgcctacaaggccaccgtgaacgcccggccgcagcgcgtcctggacacctcctccctcacgcagtcggcccccgccagccccaccaacaagggcgtgcacatccaccaggcggggggctcccctccggcgtccagcaccagcagctccagcctgaccaacgatgtggccaagcagccggtcagccgagacttgccttctggccggccgggcaccacaggccccgctggggcgcagtacacccctcactcccaccagttcccccggacacggaagatgttcgacaagggcccagagcagactgcggacgacgcggacgatgctgctggacacaaaagtttcatctccgccacggtgcagacggggttctgcgactggagcgcccgctattttgcccagcccgtcatgaagatcccagaagagcacgacctggagagtcagatccgcaaggagcgggagtggcggttcctgcgaaacagccgtgtcaggaggcaggcccagcaagtcattcagaagggcattacgagattggacgaccaaatatttctgaacaggaaccccggcgtcccctctgtggtgaaattccaccccttcacgccgtgcatcgccgtagccgacaaggacagcatctgcttttgggactgggagaaaggggagaagctggattatttccacaatgggaaccctcggtacacgagggtcactgccatggagtatctgaacggccaggactgctcgcttctgctgacggccacagacgatggtgccatcagggtctggaagaattttgctgatttggaaaagaacccagagatggtgaccgcgtggcaggggctctcggacatgctgccaacgacgcgaggagctgggatggtggtggactgggagcaggagaccggcctcctcatgagctcaggagacgtgcggatcgtccggatctgggacacagaccgtgagatgaaggtgcaggacatccctacgggcgcagacagctgtgtgacgagtctgtcctgtgattcccaccgctcactcatcgtggctggcctcggtgacggctccatccgcgtctacgacagaaggatggcactcagcgaatgccgcgtcatgacgtaccgggagcacacagcctgggtggtgaaggcctccctgcagaagcgtcccgacggccacatcgtgagtgtgagcgtcaatggagatgtgcgcatctttgatccccggatgcctgagtcggtaaatgtgcttcagatcgtgaaggggctgacggccctggacatccacccccaggcggacctgatcgcatgtggctccgtcaatcagttcaccgccatctacaacagcagcggagagctcatcaacaacatcaagtactacgacggcttcatgggccagcgggtcggcgccatcagctgcctggccttccacccgcactggcctcacctggccgtgggaagcaacgactactacatctccgtgtactcggtggagaagcgtgtcagatagcggcgtgacccgggcccaccaggccacggccgcctgctgtacatagtgaagctgtcactcgccggggcacggggcgtcggctgctgcggccccgcagtgtgaacgttggctgctgccttagctgctgatgacggcaggagggccctgctactcgcttttgtctgtcttcgctgtcgtgtctggaatgtcagggaaggggagggctcgggttgacggtggcttcccactgagcaccagcatccaggtgcacccccgcggccacggcgcctctgtccctctcctgttctgtgtttctctgagacgctgaaaggggaaacacctcactttatttccatgtaatcagagcattagctgcagaaaaaccccccgacagagccctggcggagaggcaggcgctggggctcctacgggtccctggggcagctgtccccatcaggccaagagcgagcgagaggcgctgccccagccaggcccaccacctctcacagtcagtgcacgcaagcagggacatttcctagccagctgggggacactggaaattcgggaaaccaagagagaggaagaaggagacgcccctccaactggcgggtgtgaaggaagccgcccaggggtccgggctgtccttggccgctggcagcatcactgagcaggaagcgcacagcccaccctccccgcacctccaggtctctggactccagttttggcccctctcacacagagctgtcagcaggggccgctgtggcggtgcacaggggaggcaggtccttggcgaggtagcccctgccttaatccacggggctcctttccctccgaagggctgctcttccccacaggcgcggggacagcagcccgacctgtggtctccatgcctgtgccctcacacaggtgtagcacacgcatgtgcagatggcaccacggccggcacctgggggcacacacatgcaggcggcgtggtctccctgctctgtccccacacgttcctcacatacaggcaagaggcactgccgggtcccggacggctccgggtgacaccagccccgtctccagccttgagccgcccatgctgatgcgacctcggctgacagctgggcctgtggtgcagacaggagctgtgtggacagtcccgcccaggaggggccgcagggcgtgtatgagcagttttgcaaacagaacacaaccacaatgatggtattttgaaaagtgttctttccgtgttcgtcgggaatcaggattattgagaggtgaaggagccaggtggcttcattctggcggtgagaggcccacgaccacgggagtgagagctggtgtggcgaggcccggctctcctgcggtgtggctggtggcctgccgtggccaagagcatcttctgggtggatggaaccctgcctggtcacatttggccagagacacacctggccctcagggggctgagctggagactgagctggggctggccgggacgtgacaaggcaggacagaggcggcccctccgctgctcctttttggaatgcgagctcccaccagaagaaggttccggcacgaatcccatccccacgtctgggccgagaaagcagcccgggtccggaaggtgtagagagtcccggcctcactcagctcacagggcgtgccaggcggcaacaccagaatcttccagaagcccagctccacccgcacacgcagcttcccatccagtccttcaactcaattcttacccaacacgcgtttctgtttgttttgagacaaaatcaccacctgtcaaaaggcaggtggctccagaggggtcaagacccccccccgcccccgctccaccctggagcccacccccatgggcaccgcgtgccgcctgcacgtgggctgtcttcacaggtctgatgtgaaaattcaatcacgacgttaaccggctcgagagagcgccggcctagaggctcattatctatttattttaccaaacgcgaattgagacggactttgacaaaacacgaaatggtaatgtgaagctaagagcagagagtgaccaacagtaaacaacacgcgcaga

SEQ ID NO: 174908 - DNA, 2461 bp, Homo sapiens
  Payload ID: 14343
  Gene Symbol: RPTOR
  Gene Name: regulatory associated protein of MTOR, complex 1
  ENST ID: ENST00000574767
  CDS Start-End: 812-1099
aggccgcggtgcattctgggtcctggcaatatggcgtcctccttgatgggctgatgagatgagtttcactgtagctccaaaccagagggcaaagctcccatgacccaataagcccacattgtccctttcctccgtggttccgtgtcgcccgtttctcaggactcgttctcaggcaggagagagcctcggggctgaaggccaggaccagccaggccgcgcggacctgaggttgaggaaccgggtgcaggcgagcacgatgggccggtcgtggctctggttgcagcagctcagacgagtgcgggacccgcagggctgagagtggctggaggagacccagggccctttgaacccgatcccttggccggagacctcagcccagtcggcccagtgggcgaaccggcaccaagagcggcctgcctgtcttcggaactgctgaggcggtggaggccgagagcagggtcatcgtgaggcctgaagtctcttacgcttttggcagctcccctcgcagcccctctggaaacgtacagcctcaggagcagccagtggcttgggacctggggtggtgtgtgtctgcggagcttcttgggctgccccatttcctagcggcccccacctccccacttcccgctcagagttagagataaggatctcagacttttgcctgagtaagggtctccgcactctttatccatttggttttcgatttcccgtttttgtttcttatttcaccaattctggtacacgctagtttttaaggctggaggttctcgagcgcttgctgccaaggactcccccaccccctcccccactgatggagtccgaaatgctgcaatcgcctcttctgggcctgggggaggaagatgaggctgatcttacagactggaacctacctttggcttttatgaaaaagaggcactgtgagaaaattgaaggctccaaatccttagctcagagctggaggatgaaggatcggatgaagacagtcagtgttgccttagttttgtgcctgaatgttggtgtggaccctcccgatgtggtgaagaccacgccctgtgcacgcttggaatgctggatcggcccggtacaagcagagccttgacccaactgtggatgaagtcaagaagctctgcacgtccttacgtcgcaacgccaaggaggagcgagtcctctttcactacaatggccacggggtgccccggcccacagtcaacggggaggtctgggtcttcaacaagaactacacgcagtacatccctctgtccatatatgacctgcagacgtggatgggcagcccgtcgatcttcgtctacgactgctccaatgctggcttgatcgtcaagtccttcaagcagttcgcactacagcgggagcaggagctggaggtagctgcaatcaacccaaatcaccctcttgctcagatgcctttgcctccgtcgatgaaaaactgcatccagctggcagcctgcgaggccaccgagctgctgcccatgatccccgacctcccggctgacctattcacctcctgcctcaccacccccatcaagatcgccctgcgctggttttgcatgcagaaatgtgtcagtctggtgcctggcgtcacactggatttgatagaaaagatccctggccgcctgaacgacaggaggacgcccctgggtgaactgaactggatcttcacagccatcacagacaccatcgcgtggaacgtgctcccccgggatctcttccaaaagctcttcagacaggacttgctggtggctagtctgtttcgaaattttttattggcggaaaggattatgaggtcgtataactgcactcccgtcagcagcccgcgtctgccgcccacgtacatgcacgccatgtggcaagcctgggacctggctgttgacatctgtctgtctcagctgccgacgatcatcgaggaaggcactgcgtttcggcacagcccgttcttcgccgagcagctgaccgcattccaggtgtggctcaccatgggcgtggagaaccgaaacccacccgaacagctgcccatcgtcctgcaggtgctgttaagccaagtgcaccggctgagagcattggacttgcttggaagatttttggacctgggtccctgggcagtgagcctggccttgtctgtcggcatcttcccctacgtgctgaagctgctccagagctcggcccgagagctgcggccacttctcgttttcatctgggccaagatcctcgcagtggacagcgtgagtatccccgccctcctccccagagtgatgtgaacctgccggcccttctggggatgccgagccctgcgtttccagcctgccctttctccagcctcgctccctctccaggcaccgccgttcccttcctctcttctggggtaaagtgggacgcgcccgcctcggcagccacctctgggtcgtgggggctgtcacctacctgtcctgtccctggccttcccctg

SEQ ID NO: 174909 - DNA, 2286 bp, Homo sapiens
  Payload ID: 14343
  Gene Symbol: RPTOR
  Gene Name: regulatory associated protein of MTOR, complex 1
  Uniprot ID: Q8N122
  ENST ID: ENST00000570891
  CDS Start-End: 754-1893
atgagtttcactgtagctccaaaccagagggcaaagctcccatgacccaataagcccacattgtccctttcctccgtggttccgtgtcgcccgtttctcaggactcgttctcaggcaggagagagcctcggggctgaaggccaggaccagccaggccgcgcggacctgaggttgaggaaccgggtgcaggcgagcacgatgggccggtcgtggctctggttgcagcagctcagacgagtgcgggacccgcagggctgagagtggctggaggagacccagggccctttgaacccgatcccttggccggagacctcagcccagtcggcccagtgggcgaaccggcaccaagagcggcctgcctgtcttcggaactgctgaggcggtggaggccgagagcagggtcatcgtgaggcctgaagtctcttacgcttttggcagctcccctcgcagcccctctggaaacgtacagcctcaggagcagccagtggcttgggacctggggtggtgtgtgtctgcggagcttcttgggctgccccatttcctagcggcccccacctccccacttcccgctcagagttagagataaggatctcagacttttgcctgagtaagggtctccgcactctttatccatttggttttcgatttcccgtttttgtttcttatttcaccaattctggtacacgctagtttttaaggctggaggttctcgagcgcttgctgccaaggactcccccaccccctcccccactgatggagtccgaaatgctgcaatcgcctcttctgggcctgggggaggaagatgaggctgatcttacagactggaacctacctttggcttttatgaaaaagaggcactgtgagaaaattgaaggctccaaatccttagctcagagctggaggatgaaggatcggatgaagacagtcagtgttgccttagttttgtgcctgaatgttggtgtggaccctcccgatgtggtgaagaccacgccctgtgcacgcttggaatgctggatcgatcctctgtcgatgggtcctcagaaagctctggaaaccatcggtgcaaatttacagaagcagtacgagaactggcagccaagggcccggtacaagcagagccttgacccaactgtggatgaagtcaagaagctctgcacgtccttacgtcgcaacgccaaggaggagcgagtcctctttcactacaatggccacggggtgccccggcccacagtcaacggggaggtctgggtcttcaacaagaactacacgcagtacatccctctgtccatatatgacctgcagacgtggatgggcagcccgtcgatcttcgtctacgactgctccaatgctggcttgatcgtcaagtccttcaagcagttcgcactacagcgggagcaggagctggaggtagctgcaatcaacccaaatcaccctcttgctcagatgcctttgcctccgtcgatgaaaaactgcatccagctggcagcctgcgaggccaccgagctgctgcccatgatccccgacctcccggctgacctattcacctcctgcctcaccacccccatcaagatcgccctgcgctggttttgcatgcagaaatgtgtcagtctggtgcctggcgtcacactggatttgatagaaaagatccctggccgcctgaacgacaggaggacgcccctgggtgaactgaactggatcttcacagccatcacagacaccatcgcgtggaacgtgctcccccgggatctcttccaaaagctcttcagacaggacttgctggtggctagtctgtttcgaaattttttattggcggaaaggattatgaggtcgtataactgcactcccgtcagcagcccgcgtctgccgcccacgtacatgcacgccatgtggtgagtgtttcaggatcctccaggtgccgtgctcccccgccctccgtggcactgtgatgtcatggaattgcacggagctgggcagggaggccccacacctaacttggggaccccgtgtagcattaacaagtgaagctaaatgcagggctcccagagatctccacacagaggagtgggggtctccttcagagggcagaagccttggagggccttttaggactgcacgggagcagcggccggctgaagcctcacagctctgcaactcgggagggtagcactttgcaagagagtttctaaccttttagaaaccagtagtgagaaaataacttgctgacttgaatttatgaagcacatgcaagatcgctctggagaattaaactgttgggctcatgatcaa

SEQ ID NO: 174910 - DNA, 787 bp, Homo sapiens
  Payload ID: 14343
  Gene Symbol: RPTOR
  Gene Name: regulatory associated protein of MTOR, complex 1
  ENST ID: ENST00000576366
  CDS Start-End: 1-708
gccaccgtgaacgcccggccgcagcgcgtcctggacacctcctccctcacgcagtcggcccccgccagccccaccaacaagggcgtgcacatccaccaggcggggggctcccctccggcgtccagcaccagcagctccagcctgaccaacgatgtggccaagcagccggtcagccgagacttgccttctggccggccgggcaccacaggccccgctggggcgcagtacacccctcactcccaccagttcccccggacacggaagatgttcgacaagggcccagagcaggtacgggagcccggctgcctggtgatctggacactgagagcgttgcttctcagatgggggctcatggcctcagcctcaggctgctcacatcaccatgggatggggcaggacccaccctgccgtcctgggtctgtgggccactctctgcctttgcagacccgggtgctggtcctcactcgtgcacccctctgcctgcactccttaggagcactgctgggtgtgtcccggtccctctgcctgcactctttaggagcactgctgggtgtgtcccggttctccgcccctggttctggtttcaccattctgggcagcttccatgtaacgaaacaggagcacggagttacctggctctgcccttcctgggcacacagcactctgcgtccgcttgggggcagctgcactgcagagcatttgttctgaatgtgttgtcttttctgtgaacatccaagtacgctgcataaataggtacactctctttgcctttaactaagttgaaaaa

SEQ ID NO: 174911 - DNA, 4332 bp, Homo sapiens
  Payload ID: 14344
  Gene Symbol: RFX1
  Gene Name: regulatory factor X, 1 (influences HLA class II expression)
  Uniprot ID: P22670
  ENST ID: ENST00000254325
  CDS Start-End: 236-3175
cacggtagtcgtggcgaccaagcaacccggcaacgcgagtcaacaacaacaaccgcccggccgacccccacccccaccccccaggcccggcccggggaccccagcacgtcccgtccccttcccaacatcgactccgagacctccgaaaagcgtttccgcagacagaagtggggagaagcggaggaattaaaaaaaaaaaaaagccttatttattatcattttccccaccgttggcatggcaacacaggcgtatactgagctacaggcagccccgccaccatcccagccgccacaggccccgccacaagcccagccccagccgccaccgccaccacccccagcggcaccccagcccccgcagccacccaccgctgctgccacccctcagccccaatatgtcaccgagctgcagagcccccagccccaggcacagccaccgggtggccagaagcagtacgtgacggagctcccggctgtacccgcaccctcgcagccaaccggtgcacccaccccttcgcctgcaccccagcagtacatcgtggtcactgtctctgaaggtgccatgcgggccagcgagacagtgtcggaggccagccccggctccaccgccagccagaccggcgttcctactcaggtggttcagcaggtgcagggcacccagcagcggctgctggtccagacgagcgtgcaggccaagccaggccacgtgtcgcccctccagctgaccaacatccaagtgccccagcaggctcttcccacgcagcgtctggtggtgcagagcgcagccccaggcagcaaaggtggccaggtctccctgacggtccatggtacccagcaggtgcactcgcccccagagcagtcgccggtgcaggccaacagctcttccagcaagacagccggggcccccacgggcacagtgccacagcagctgcaggtccacggcgtccagcagagtgtccccgtcacccaagagagatctgtggtccaggccactccacaagcgcccaaacccggcccggtgcagccgctgaccgtgcagggcctccagccagtccacgtggctcaagaggtgcagcagctccagcaggtgcccgtcccacacgtgtactccagccaggtgcagtatgtggagggcggcgatgccagctacacggccagtgccatccgttccagcacctactcctatcccgagacgccgctgtacacgcagacggcaagcaccagctactacgaggccgcaggcacggccacccaggtcagcacccccgccacctcccaggcggtggccagcagtggctccatgcccatgtacgtgtccggcagccaggtcgtcgccagctccaccagcactggggctggggccagcaacagcagcggaggtggtggcagtggtggtggcggcggcggcgggggaggcggtggcgggggtggcagtggcagcaccggaggcggcggcagcggagcaggcacctacgtgatccaaggcggctacatgctgggcagtgccagccagtcttactctcacaccacccgtgcctcgccagccacggtccagtggctcctggacaactatgagacggctgagggcgtgagtctgccacggagcaccctctactgccactacttactgcactgccaggagcagaagctggagcccgtcaacgccgcctccttcggcaagctcatccgctccgtcttcatgggcctgcgaacccgccgtctgggcaccaggggcaactccaagtaccactactatggcctgcgcatcaaggccagctcacccctgctgcggctgatggaggaccagcagcacatggccatgcggggccagcccttctcgcagaagcagaggctcaagcccatccagaagatggaaggcatgaccaacggcgtggcggtggggcagcagccgagcacggggctgtcggacatcagcgcccaggtgcagcagtaccagcaatttttggatgcctctcggagcctccctgacttcacagagctcgacctccagggcaaggtgctgcctgagggcgtcgggcccggggacatcaaagccttccaggtcctgtaccgggaacactgtgaggccattgtcgacgtcatggtgaacctgcagttcaccctggtggagacgctgtggaagaccttctggaggtacaacctcagccagcccagtgaggcgccaccgctggctgtacatgacgaggccgagaagcgactgcccaaagccatcctggtgctcctctccaagttcgagcccgtgctccaatggaccaagcactgtgacaacgtgctgtaccagggcctggtggaaatcctcattcccgacgtgctgcggcccatccccagtgccttgacccaagcgatccggaactttgccaagagcctggagagctggctcacccacgccatggtcaacatccccgaggagatgctgcgggtgaaggtggccgcggctggcgccttcgcgcagacactgcggcgctacacgtcgctcaaccacctggcgcaggcggcgcgcgctgtgctgcagaacaccgcacagatcaaccagatgctgagcgacctcaaccgcgtggacttcgccaacgtgcaggagcaggcctcgtgggtgtgccgctgcgaggaccgcgtggtgcagcggctggagcaggacttcaaggtgacgctgcagcagcagaactcgctggagcagtgggcggcctggctggacggcgtggtgagccaggtgctcaagccctaccagggcagcgccggcttccccaaggccgccaagctcttcctcctcaagtggtccttctacagctccatggtgatccgggacctgaccctgcgcagcgccgccagcttcggttccttccacctcatccggctgctctacgacgagtacatgtactacctgatcgagcaccgcgtagcccaggccaagggcgagacccccatcgccgtcatgggcgagttcgccaatctggccacctccctgaaccccctggaccccgacaaagacgaggaggaagaagaggaggaggagagcgaggacgagctgccgcaggacatctcactggcggctggcggcgagtcacccgcgctgggcccggagaccctggagccgccggccaagctggcgcggactgacgcgcgcggcctcttcgtgcaggcgctgccctccagctaagcccttggcctccccgccccacccgcccccgccacccctccacgccagggtccctcaaagcttctgtggcttcgtggtcactgctccagcctcagccagggcagggagggggactccgagacagggaagaccggggccctcctcccttatggggccggcacaatcagtgggctgggcggagccgcagctgcaaactctgacacaaaagacgtgccttaaggaacccgccgcgtgcccaggtgccccgcggggcatccagctcggccccttggccgcccccctcccaggccccagcgtcttctccccagccccgtcctcccaccaccccagggggcaggcaggcaggccccctcccgtgcgaaactgttaacttattcagctcgctggctttgcacagcctgtcctgggcccagccctgagccccgggccggcgcaggtgggcgtcacctggggactccccactgtcagcagcagccccgggacaccctacccccagcaaccccactgcttccccttcttggtattaagtgcaattaaagccgtgggtgtcgcatcttctccagcgctgggccctcccttgcccccaagctcaagaagggggcactgcccggcccggctgtgaggagggcggcagggggcacggcctccagcttccaaagagcagcgagccgcggagccggggagtgcccacagaccccagcccccgcgcccccgccctccgccgctggtttgtaatggaaccttttctgtgcccctatcttcccggagaccacgcttctcctccgtgccgtgcgacccccaccccatgactattgtgcgattcgtgagcgccgcccgagcggagttggtaacttgttgggtttttttccaaccatcatggccttatctgttccagttttctcagtgttttcagcctgtgagatagatgtttatggcaagaaaaaggaaaaaaaaatggaaatctgacctattgtataaaaatcactattttgtgtgctccgcgtgctatagcttttggggcggccctgcccagtccccgtgcccacggggctccctctcccggtggtgaaagtgtccacacgtgtggtagtctagtgtgccgagctgttttctacctttttgtagtctttcttaaaacaataaattccgctgtgata

SEQ ID NO: 174912 - DNA, 886 bp, Homo sapiens
  Payload ID: 14344
  Gene Symbol: RFX1
  Gene Name: regulatory factor X, 1 (influences HLA class II expression)
  ENST ID: ENST00000588885
  CDS Start-End: 413-886
aacccggcaacgcgagtcaacaacaacaaccgcccggccgacccccacccccaccccccaggcccggcccggggaccccagcacgtcccgtccccttcccaacatcgactccgagacctccgaaaagcgtttccgcagacagaagtggggagaagcggagagacggggtttcgccatgttggccagactggtctcgaactcctgacctcagctgatccacctgcctaggcctcacaaagtgctggaattataggtgtgagccaccgtgcccggcctgatctcattggatctttgcagcaatttgatgaattgggtgttctcgttatccccaggtgacaggcaactgaggcccagaagaaggaattaaaaaaaaaaaaaagccttatttattatcattttccccaccgttggcatggcaacacaggcgtatactgagctacaggcagccccgccaccatcccagccgccacaggccccgccacaagcccagccccagccgccaccgccaccacccccagcggcaccccagcccccgcagccacccaccgctgctgccacccctcagccccaatatgtcaccgagctgcagagcccccagccccaggcacagccaccgggtggccagaagcagtacgtgacggagctcccggctgtacccgcaccctcgcagccaaccggtgcacccaccccttcgcctgcaccccagcagtacatcgtggtcactgtctctgaaggtgccatgcgggccagcgagacagtgtcggaggccagccccggctccaccgccagccagaccggcgttcctactcaggtggttcagcaggtgcagggcacccagcagatgtgcacagcagccgcccgccacccaaccacgccaggcctccct

SEQ ID NO: 174913 - DNA, 3993 bp, Homo sapiens
  Payload ID: 14345
  Gene Symbol: RFX2
  Gene Name: regulatory factor X, 2 (influences HLA class II expression)
  Uniprot ID: P48378
  ENST ID: ENST00000303657
  CDS Start-End: 151-2322
aggaggagcggccgccgccgccaccgccgccgccatagagactgtagccgtggagactgttacttaccaacggggaccaacacgcagcagccgctgccgccgccgcgggagccgctgcccgaactcccggcccgaactccagacctgagcatgcagaattccgagggtggagcggattcgccagcgtccgtggctctgcgtccctcggcggcagccccgcctgtgccagcctccccgcagagggtgttggtccaggcagccagctccaatcccaaaggggcccagatgcagccgatctccctccccagagttcagcaggtaccccagcaggtgcagccggtgcagcacgtgtatcctgcccaggtgcagtacgtggaagggggagacgccgtctacaccaatggagccatacgaacagcctacacctacaaccccgagcctcagatgtacgcccccagcagcacggcttcttacttcgaggccccaggcggtgcccaggtgaccgtggcagcctcgtccccgccagcggtcccctcccacagcatggtgggcatcaccatggatgtcggggggagccccatcgtctccagcgcgggagcctatctcatccacggggggatggacagcaccagacactccctggcccacacctcccgctcatcgcccgccacgcttgaaatggcgattgaaaacctccaaaaaagcgaaggaatcacatcacacaaaagcggtttactcaacagccatctccagtggctgttggataattatgaaacagcggaaggtgtgagtctccccagaagttctctttacaaccactaccttcggcactgccaggagcacaagctagacccagtgaacgccgcctccttcgggaaactgatccgttctgtgtttatggggctgagaacgcggcggctgggcaccaggggcaactcgaagtaccattactatgggattcgtctgaagccggactcaccactgaaccggctgcaggaggacacgcagtacatggccatgcggcagcagcccatgcaccagaagcccaggtaccggccagcccagaagacggacagcctcggggacagcggctcccacagcggcctgcacagcactccggaacagaccatggccgtgcagagccagcaccaccagcagtacatagatgtctcccacgtcttccccgagttcccagcgcccgacctgggcagcttcctgctgcaggacggcgtcacactgcacgacgtcaaggccctgcagctggtgtacagacggcactgcgaggcaactgtagatgtggtgatgaacctccagttccactacatcgagaagctgtggctctccttctggaactctaaggcctcctccagcgacggccccacctctcttcctgccagtgacgaagaccccgagggcgccgtcctgcccaaggacaagcttatctccctgtgtcagtgcgaccccatcctcaggtggatgaggagctgcgaccacatcctctaccaggcgctggtggagattctcatccccgacgtgctgaggccggtccccagtaccttgacacaggccatccgtaactttgccaagagcttggaaggctggttgacaaatgccatgagtgacttcccacaacaggtcatccagaccaaggtgggcgtcgtcagtgccttcgcccagacgctgcggcgctacacgtccctcaaccacctggcgcaggcggcccgggcggtgctgcagaacacgtcccagatcaaccagatgctcagcgacctcaaccgcgtggactttgccaacgtgcaggagcaggcctcgtgggtgtgccagtgcgaggagagtgtggtgcagcggctggagcaggatttcaagctgaccctgcagcagcagagctccctggaccagtgggccagctggctggacagtgtggtcacccaggtcctgaagcagcatgccggcagccccagcttccccaaggccgcccggcagttcttgctgaaatggtccttttacagctccatggtgatccgggacctgaccctgcgcagcgctgccagcttcggctccttccacctcatccgcctgctctacgacgagtacatgttctacctggtggagcaccgcgtcgcggaggccaccggagagacgccgatcgctgtgatgggagagttcaacgatctcgcctctctgtcgctgacgctgctcgacaaagatgacatgggcgatgagcagcgtggcagcgaggcgggcccagacgcccgcagcctgggtgagcccctggtaaagcgggagcgcagtgaccccaaccactccctgcagggcatctagcagccccggccggcgcctcctcgaggttccaaaagatgccgcctggtcactctgggaacctggatttcaccggctccaccaaattagtgcctcttagatgatgtgatgtttactttgactcaagcgggggctcccggggtcagtgttcaagaaggaaagcagttgttgaagctacagaagcccaggccagggctcccactggctgtagctgtgctctgggtccccaggtccctgcgcagccaccagggccccaccagaccatgggttccttattctggacaaaccctcctctgctggaaccctggactttggccccagtccctttaagagctgaaagggctgtgctgagagcactggcctctgcactcaactggaaccaattttcaccatgattttaaaaattaaaaaaacctggcagagcccgactagaaagggacggcctctcccctcctacctgccaccgctggggaggcacagagctcgccagcgtccctggagtcccctcaggaatggaaagtggagtgcccttgtctggtagcaccatgtgggagggacccagctgggcgcagcgccctgtggccttttagatccagacctccctgccggatgccccgaggcgggaggccggctgtgctgcaggaacccatctccagatgccaaaggacttgaggggcagctgacaatcgctgtgtcccggcagatccgcagctcgaaaaagaacaagccacagaaacgggctcgctcgtgccaggacacagcagtgtctttcaaaaaatcaaaaccagaagttttatcagcagcaggaaggatgtgggactctgtccaagttcaccgtcaccatcaagccactggctgtggaaggagtttgtccaacagggtcagtgtcacagccacaacttcagaaagcagccatcccgcgtgtcgtccaaacagcagtgcctgcgtcccgctccacggagtcttccagaacacctccctctgaactaatcccggagcaccccacccccagcgagtcccacctggacctcttcaaagtcaaaactcttctctcgggacaaacaaatattcgggactttcgaagccctgaacttgagacaccaagtttgtctccatggaaacacgtagccgctgcagttggacagctgcgtgctggagttctgtccccaaaccaactgcagagaagaaagacgagcctcggcccaggacgcgatttctaacgaaatgcaatagttttctctttttggaaaaatgtttataccaatagttttgtgcgctaattgttattagaacgtttcttatgaatgtgtacattgcagtatattcagtcccaaatgttttgttctcattcacacagaaggtactaatgtcagctcacgtggcctttaaaaacctacttccccgcccgcaggagctcagagcatcgctgggcctgcgccagagtgaggggtgcaggaagacaaagacgcgtgctcactttagaaacgaaaagctgggaataatcacactgtttgtctggtcgtatagcccaaaccttagttgaaatcagacagaaagaatgtctttaaaatatacatctcctctccttggagacactgaagctcacagttaacggattgtaatgcccggcttttcctcactcctggtaaccaatacaagctggtttctgcctta

SEQ ID NO: 174914 - DNA, 3595 bp, Homo sapiens
  Payload ID: 14345
  Gene Symbol: RFX2
  Gene Name: regulatory factor X, 2 (influences HLA class II expression)
  Uniprot ID: P48378
  ENST ID: ENST00000359161
  CDS Start-End: 106-2277
agacgggaacagcatggtggatggtgtgcaaatgactgatttaaacatttaaaggaaactgtaaatacaagcagcttgtaacagaaaaattccaaagacctgagcatgcagaattccgagggtggagcggattcgccagcgtccgtggctctgcgtccctcggcggcagccccgcctgtgccagcctccccgcagagggtgttggtccaggcagccagctccaatcccaaaggggcccagatgcagccgatctccctccccagagttcagcaggtaccccagcaggtgcagccggtgcagcacgtgtatcctgcccaggtgcagtacgtggaagggggagacgccgtctacaccaatggagccatacgaacagcctacacctacaaccccgagcctcagatgtacgcccccagcagcacggcttcttacttcgaggccccaggcggtgcccaggtgaccgtggcagcctcgtccccgccagcggtcccctcccacagcatggtgggcatcaccatggatgtcggggggagccccatcgtctccagcgcgggagcctatctcatccacggggggatggacagcaccagacactccctggcccacacctcccgctcatcgcccgccacgcttgaaatggcgattgaaaacctccaaaaaagcgaaggaatcacatcacacaaaagcggtttactcaacagccatctccagtggctgttggataattatgaaacagcggaaggtgtgagtctccccagaagttctctttacaaccactaccttcggcactgccaggagcacaagctagacccagtgaacgccgcctccttcgggaaactgatccgttctgtgtttatggggctgagaacgcggcggctgggcaccaggggcaactcgaagtaccattactatgggattcgtctgaagccggactcaccactgaaccggctgcaggaggacacgcagtacatggccatgcggcagcagcccatgcaccagaagcccaggtaccggccagcccagaagacggacagcctcggggacagcggctcccacagcggcctgcacagcactccggaacagaccatggccgtgcagagccagcaccaccagcagtacatagatgtctcccacgtcttccccgagttcccagcgcccgacctgggcagcttcctgctgcaggacggcgtcacactgcacgacgtcaaggccctgcagctggtgtacagacggcactgcgaggcaactgtagatgtggtgatgaacctccagttccactacatcgagaagctgtggctctccttctggaactctaaggcctcctccagcgacggccccacctctcttcctgccagtgacgaagaccccgagggcgccgtcctgcccaaggacaagcttatctccctgtgtcagtgcgaccccatcctcaggtggatgaggagctgcgaccacatcctctaccaggcgctggtggagattctcatccccgacgtgctgaggccggtccccagtaccttgacacaggccatccgtaactttgccaagagcttggaaggctggttgacaaatgccatgagtgacttcccacaacaggtcatccagaccaaggtgggcgtcgtcagtgccttcgcccagacgctgcggcgctacacgtccctcaaccacctggcgcaggcggcccgggcggtgctgcagaacacgtcccagatcaaccagatgctcagcgacctcaaccgcgtggactttgccaacgtgcaggagcaggcctcgtgggtgtgccagtgcgaggagagtgtggtgcagcggctggagcaggatttcaagctgaccctgcagcagcagagctccctggaccagtgggccagctggctggacagtgtggtcacccaggtcctgaagcagcatgccggcagccccagcttccccaaggccgcccggcagttcttgctgaaatggtccttttacagctccatggtgatccgggacctgaccctgcgcagcgctgccagcttcggctccttccacctcatccgcctgctctacgacgagtacatgttctacctggtggagcaccgcgtcgcggaggccaccggagagacgccgatcgctgtgatgggagagttcaacgatctcgcctctctgtcgctgacgctgctcgacaaagatgacatgggcgatgagcagcgtggcagcgaggcgggcccagacgcccgcagcctgggtgagcccctggtaaagcgggagcgcagtgaccccaaccactccctgcagggcatctagcagccccggccggcgcctcctcgaggttccaaaagatgccgcctggtcactctgggaacctggatttcaccggctccaccaaattagtgcctcttagatgatgtgatgtttactttgactcaagcgggggctcccggggtcagtgttcaagaaggaaagcagttgttgaagctacagaagcccaggccagggctcccactggctgtagctgtgctctgggtccccaggtccctgcgcagccaccagggccccaccagaccatgggttccttattctggacaaaccctcctctgctggaaccctggactttggccccagtccctttaagagctgaaagggctgtgctgagagcactggcctctgcactcaactggaaccaattttcaccatgattttaaaaattaaaaaaacctggcagagcccgactagaaagggacggcctctcccctcctacctgccaccgctggggaggcacagagctcgccagcgtccctggagtcccctcaggaatggaaagtggagtgcccttgtctggtagcaccatgtgggagggacccagctgggcgcagcgccctgtggccttttagatccagacctccctgccggatgccccgaggcgggaggccggctgtgctgcaggaacccatctccagatgccaaaggacttgaggggcagctgacaatcgctgtgtcccggcagatccgcagctcgaaaaagaacaagccacagaaacgggctcgctcgtgccaggacacagcagtgtctttcaaaaaatcaaaaccagaagttttatcagcagcaggaaggatgtgggactctgtccaagttcaccgtcaccatcaagccactggctgtggaaggagtttgtccaacagggtcagtgtcacagccacaacttcagaaagcagccatcccgcgtgtcgtccaaacagcagtgcctgcgtcccgctccacggagtcttccagaacacctccctctgaactaatcccggagcaccccacccccagcgagtcccacctggacctcttcaaagtcaaaactcttctctcgggacaaacaaatattcgggactttcgaagccctgaacttgagacaccaagtttgtctccatggaaacacgtagccgctgcagttggacagctgcgtgctggagttctgtccccaaaccaactgcagagaagaaagacgagcctcggcccaggacgcgatttctaacgaaatgcaatagttttctctttttggaaaaatgtttataccaatagttttgtgcgctaattgttattagaacgtttcttatgaatgtgtacattgcagta

SEQ ID NO: 174915 - DNA, 589 bp, Homo sapiens
  Payload ID: 14345
  Gene Symbol: RFX2
  Gene Name: regulatory factor X, 2 (influences HLA class II expression)
  ENST ID: ENST00000592883
  CDS Start-End: 162-589
actttgaagaaagacttctcgacgccgagacactgctggtggtactcgatgtaggggtgactggcaaccatgccgtgaagacactcaagcaattctgtggagaaggccatggaatgaggagctgagacttcctgccaacaaccagtcatctagacctgagcatgcagaattccgagggtggagcggattcgccagcgtccgtggctctgcgtccctcggcggcagccccgcctgtgccagcctccccgcagagggtgttggtccaggcagccagctccaatcccaaaggggcccagatgcagccgatctccctccccagagttcagcaggtaccccagcaggtgcagccggtgcagcacgtgtatcctgcccaggtgcagtacgtggaagggggagacgccgtctacaccaatggagccatacgaacagcctacacctacaaccccgagcctcagatgtacgcccccagcagcacggcttcttacttcgaggccccaggcggtgcccaggtgaccgtggcagcctcgtccccgccagcggtcccctcccacagcatggtgggcatcaccatggatgtcggggggagccc

SEQ ID NO: 174916 - DNA, 337 bp, Homo sapiens
  Payload ID: 14345
  Gene Symbol: RFX2
  Gene Name: regulatory factor X, 2 (influences HLA class II expression)
  ENST ID: ENST00000587321
  CDS Start-End: 239-337
gactgttacttaccaacggggaccaacacgcagcagccgctgccgccgccgcgggagccgctgcccgaactcccggcccgaactccagctccagtggctgttggataattatgaaacagcggaaggtgtgagtctccccagaagttctctttacaaccactaccttcggcactgccaggagcacaagctagacccagtgaacgccgcctccttcgggaaactgatccgttctgtgtttatggggctgagaacgcggcggctgggcaccaggggcaactcgaagtaccattactatgggattcgtctgaagccggactcaccactgaaccggctgcag

SEQ ID NO: 174917 - DNA, 534 bp, Homo sapiens
  Payload ID: 14345
  Gene Symbol: RFX2
  Gene Name: regulatory factor X, 2 (influences HLA class II expression)
  ENST ID: ENST00000587181
  CDS Start-End: 236-534
gttacttaccaacggggaccaacacgcagcagccgctgccgccgccgcgggagccgctgcccgaactcccggcccgaactccaggcggagttagaacattccatttttttatccaaaattatcttttgctcggatttgggaactgacttaatacggagctgggaatggagacaccaaaaacagaaccagacaaagctgagggtttgttctcgcccctcctggacagcacctgagcatgcagaattccgagggtggagcggattcgccagcgtccgtggctctgcgtccctcggcggcagccccgcctgtgccagcctccccgcagagggtgttggtccaggcagccagctccaatcccaaaggggcccagatgcagccgatctccctccccagagttcagcaggtaccccagcaggtgcagccggtgcagcacgtgtatcctgcccaggtgcagtacgtggaagggggagacgccgtctacaccaatggagccatacgaacagcctacacctacaaccccgagcctcagatgta

SEQ ID NO: 174918 - DNA, 538 bp, Homo sapiens
  Payload ID: 14345
  Gene Symbol: RFX2
  Gene Name: regulatory factor X, 2 (influences HLA class II expression)
  ENST ID: ENST00000589340
  CDS Start-End: 1-538
agatgtctcccacgtcttccccgagttcccagcgcccgacctgggcagcttcctgctgcaggacggcgtcacactgcacgacgtcaaggccctgcagctggtgtacagacggcactgcgaggcaactgtagatgtggtgatgaacctccagttccactacatcgagaagctgtggctctccttctggaactctaaggcctcctccagcgacggccccacctctcttcctgccagtgacgaagaccccgagggcgccgtcctgcccaaggacaagcttatctccctgtgtcagtgcgaccccatcctcaggtggatgaggagctgcgaccacatcctctaccaggcgctggtggagattctcatccccgacgtgctgaggccggtccccagtgggcgtcgtcagtgccttcgcccagacgctgcggcgctacacgtccctcaaccacctggcgcaggcggcccgggcggtgctgcagaacacgtcccagatcaaccagatgctcagcgacctcaaccgcgtggactttgccaacgtgca

SEQ ID NO: 174919 - DNA, 565 bp, Homo sapiens
  Payload ID: 14345
  Gene Symbol: RFX2
  Gene Name: regulatory factor X, 2 (influences HLA class II expression)
  ENST ID: ENST00000589742
  CDS Start-End: 271-565
accgccgccgccatagagactgtagccgtggagactgttacttaccaacggggaccaacacgcagcagccgctgccgccgccgcgggagccgctgcccgaactcccggcccgaactccagctccagtggctgttggataattatgaaacagcggaaggtgtgagtctccccagaagttctctttacaaccactaccttcggcactgccaggagcacaagctagacccagtgaacgccgcctccttcgggaaactgatccgttctgtgtttatggggctgagaacgcggcggctgggcaccaggtaccggccagcccagaagacggacagcctcggggacagcggctcccacagcggcctgcacagcactccggaacagaccatggccgtgcagagccagcaccaccagcagtacatagatgtctcccacgtcttccccgagttcccagcgcccgacctgggcagcttcctgctgcaggacggcgtcacactgcacgacgtcaaggccctgcagctggtgtacagacggcactgcgaggcaactgtagatgtggtgatgaacctcc

SEQ ID NO: 174920 - DNA, 535 bp, Homo sapiens
  Payload ID: 14345
  Gene Symbol: RFX2
  Gene Name: regulatory factor X, 2 (influences HLA class II expression)
  ENST ID: ENST00000593241
  CDS Start-End: 255-535
gccggtaacaacgccccgccccgtcgggcgggcgggctgcgcgaggctggctggcggcgggagccggaggaggagcggccgccgccgccaccgccgccgccatagagactgtagccgtggagactgttacttaccaacggggaccaacacgcagcagccgctgccgccgccgcgggagccgctgcccgaactcccggcccgaactccagagggtgttggtccaggcagccagctccaatcccaaaggggcccagatgcagccgatctccctccccagagttcagcaggtaccccagcaggtgcagccggtgcagcacgtgtatcctgcccaggtgcagtacgtggaagggggagacgccgtctacaccaatggagccatacgaacagcctacacctacaaccccgagcctcagatgtacgcccccagcagcacggcttcttacttcgaggccccaggcggtgcccaggtgaccgtggcagcctcgtccccgccagcggtcccctcccacagcatggtgggcatcaccatggatgt

SEQ ID NO: 174921 - DNA, 2578 bp, Homo sapiens
  Payload ID: 14345
  Gene Symbol: RFX2
  Gene Name: regulatory factor X, 2 (influences HLA class II expression)
  Uniprot ID: P48378
  ENST ID: ENST00000592546
  CDS Start-End: 149-2245
gaggagcggccgccgccgccaccgccgccgccatagagactgtagccgtggagactgttacttaccaacggggaccaacacgcagcagccgctgccgccgccgcgggagccgctgcccgaactcccggcccgaactccagacctgagcatgcagaattccgagggtggagcggattcgccagcgtccgtggctctgcgtccctcggcggcagccccgcctgtgccagcctccccgcagagggtgttggtccaggcagccagctccaatcccaaaggggcccagatgcagccgatctccctccccagagttcagcaggtaccccagcaggtgcagccggtgcagcacgtgtatcctgcccaggtgcagtacgtggaagggggagacgccgtctacaccaatggagccatacgaacagcctacacctacaaccccgagcctcagatgtacgcccccagcagcacggcttcttacttcgaggccccaggcggtgcccaggtgaccgtggcagcctcgtccccgccagcggtcccctcccacagcatggtgggcatcaccatggatgtcggggggagccccatcgtctccagcgcgggagcctatctcatccacggggggatggacagcaccagacactccctggcccacacctcccgctcatcgcccgccacgctccagtggctgttggataattatgaaacagcggaaggtgtgagtctccccagaagttctctttacaaccactaccttcggcactgccaggagcacaagctagacccagtgaacgccgcctccttcgggaaactgatccgttctgtgtttatggggctgagaacgcggcggctgggcaccaggggcaactcgaagtaccattactatgggattcgtctgaagccggactcaccactgaaccggctgcaggaggacacgcagtacatggccatgcggcagcagcccatgcaccagaagcccaggtaccggccagcccagaagacggacagcctcggggacagcggctcccacagcggcctgcacagcactccggaacagaccatggccgtgcagagccagcaccaccagcagtacatagatgtctcccacgtcttccccgagttcccagcgcccgacctgggcagcttcctgctgcaggacggcgtcacactgcacgacgtcaaggccctgcagctggtgtacagacggcactgcgaggcaactgtagatgtggtgatgaacctccagttccactacatcgagaagctgtggctctccttctggaactctaaggcctcctccagcgacggccccacctctcttcctgccagtgacgaagaccccgagggcgccgtcctgcccaaggacaagcttatctccctgtgtcagtgcgaccccatcctcaggtggatgaggagctgcgaccacatcctctaccaggcgctggtggagattctcatccccgacgtgctgaggccggtccccagtaccttgacacaggccatccgtaactttgccaagagcttggaaggctggttgacaaatgccatgagtgacttcccacaacaggtcatccagaccaaggtgggcgtcgtcagtgccttcgcccagacgctgcggcgctacacgtccctcaaccacctggcgcaggcggcccgggcggtgctgcagaacacgtcccagatcaaccagatgctcagcgacctcaaccgcgtggactttgccaacgtgcaggagcaggcctcgtgggtgtgccagtgcgaggagagtgtggtgcagcggctggagcaggatttcaagctgaccctgcagcagcagagctccctggaccagtgggccagctggctggacagtgtggtcacccaggtcctgaagcagcatgccggcagccccagcttccccaaggccgcccggcagttcttgctgaaatggtccttttacagctccatggtgatccgggacctgaccctgcgcagcgctgccagcttcggctccttccacctcatccgcctgctctacgacgagtacatgttctacctggtggagcaccgcgtcgcggaggccaccggagagacgccgatcgctgtgatgggagagttcaacgatctcgcctctctgtcgctgacgctgctcgacaaagatgacatgggcgatgagcagcgtggcagcgaggcgggcccagacgcccgcagcctgggtgagcccctggtaaagcgggagcgcagtgaccccaaccactccctgcagggcatctagcagccccggccggcgcctcctcgaggttccaaaagatgccgcctggtcactctgggaacctggatttcaccggctccaccaaattagtgcctcttagatgatgtgatgtttactttgactcaagcgggggctcccggggtcagtgttcaagaaggaaagcagttgttgaagctacagaagcccaggccagggctcccactggctgtagctgtgctctgggtccccaggtccctgcgcagccaccagggccccaccagaccatgggttccttattctggacaaaccctcctctgctggaaccctggactttggccccagtccctttaagagctg

SEQ ID NO: 174922 - DNA, 537 bp, Homo sapiens
  Payload ID: 14345
  Gene Symbol: RFX2
  Gene Name: regulatory factor X, 2 (influences HLA class II expression)
  ENST ID: ENST00000586806
  CDS Start-End: 97-537
gagactgttacttaccaacggggaccaacacgcagcagccgctgccgccgccgcgggagccgctgcccgaactcccggcccgaactccagcttgaaatggcgattgaaaacctccaaaaaagcgaaggaatcacatcacacaaaagcggtttactcaacagccatctccagtggctgttggataattatgaaacagcggaaggtgtgagtctccccagaagttctctttacaaccactaccttcggcactgccaggagcacaagctagacccagtgaacgccgcctccttcgggaaactgatccgttctgtgtttatggggctgagaacgcggcggctgggcaccaggggcaactcgaagtaccattactatgggattcgtctgaagccggactcaccactgaaccggctgcaggaggacacgcagtacatggccatgcggcagcagcccatgcaccagaagcccaggtaccggccagcccagaagacggacagcctcggggacagcggctcccacagcggcctgcacagcactccg

SEQ ID NO: 174923 - DNA, 569 bp, Homo sapiens
  Payload ID: 14345
  Gene Symbol: RFX2
  Gene Name: regulatory factor X, 2 (influences HLA class II expression)
  ENST ID: ENST00000586302
  CDS Start-End: 63-569
agccgctgccgccgccgcgggagccgctgcccgaactcccggcccgaactccagacctgagcatgcagaattccgagggtggagcggattcgccagcgtccgtggctctgcgtccctcggcggcagccccgcctgtgccagcctccccgcaggtgcagccggtgcagcacgtgtatcctgcccaggtgcagtacgtggaagggggagacgccgtctacaccaatggagccatacgaacagcctacacctacaaccccgagcctcagatgtacgcccccagcagcacggcttcttacttcgaggccccaggcggtgcccaggtgaccgtggcagcctcgtccccgccagcggtcccctcccacagcatggtgggcatcaccatggatgtcggggggagccccatcgtctccagcgcgggagcctatctcatccacggggggatggacagcaccagacactccctggcccacacctcccgctcatcgcccgccacgcttgaaatggcgattgaaaacctccaaaaaagcgaaggaatcacatcacacaaaagcggtttactcaacagccat

SEQ ID NO: 174924 - DNA, 577 bp, Homo sapiens
  Payload ID: 14345
  Gene Symbol: RFX2
  Gene Name: regulatory factor X, 2 (influences HLA class II expression)
  ENST ID: ENST00000592473
  CDS Start-End: 246-577
attttcctttgttcctcgttactccaacgttgcctcaaatgtcagctccttagagagacccagggtgaccaactcttcccgctttggggatttcccggttttagcactgaaattcccatatcctgggaaaccccttagtcttgggccaagcaggattgttggatatcccagggagatcatctctggctgctctatctaagagggtgttggtccaggcagccagctccaatcccaaaggggcccagatgcagccgatctccctccccagagttcagcaggtaccccagcaggtgcagccggtgcagcacgtgtatcctgcccaggtgcagtacgtggaagggggagacgccgtctacaccaatggagccatacgaacagcctacacctacaaccccgagcctcagatgtacgcccccagcagcacggcttcttacttcgaggccccaggcggtgcccaggtgaccgtggcagcctcgtccccgccagcggtcccctcccacagcatggtgggcatcaccatggatgtcggggggagccccatcgtctccagcgcgggagcctatctcatccacggggg

SEQ ID NO: 174925 - DNA, 446 bp, Homo sapiens
  Payload ID: 14345
  Gene Symbol: RFX2
  Gene Name: regulatory factor X, 2 (influences HLA class II expression)
  ENST ID: ENST00000592281
  CDS Start-End: 131-446
acggccgtagtccagggctgcttctagctgcgtctctcctgtgccccctcacatgaagtcaggaagccacgggagatgttcccactggcgcgtttgactcagcagtggctccaaaaggtcaaacctgagcatgcagaattccgagggtggagcggattcgccagcgtccgtggctctgcgtccctcggcggcagccccgcctgtgccagcctccccgcagagggtgttggtccaggcagccagctccaatcccaaaggggcccagatgcagccgatctccctccccagagttcagcaggtaccccagcaggtgcagccggtgcagcacgtgtatcctgcccaggtgcagtacgtggaagggggagacgccgtctacaccaatggagccatacgaacagcctacacctacaaccccgagcctcagatgtacgcccccagcagcacgg

SEQ ID NO: 174926 - DNA, 1522 bp, Homo sapiens
  Payload ID: 14346
  Gene Symbol: RFX3
  Gene Name: regulatory factor X, 3 (influences HLA class II expression)
  Uniprot ID: P48380
  ENST ID: ENST00000302303
  CDS Start-End: 248-1489
actctactactcaataatagttttgttatgtaggaagatgcagcagcttgtttgtgtgaacttctgcttccactacaaacagtactttaaagacaggccttccactgccattcagaaagcagccatggaggatactctagtttctttgggaagataaacactcaatctgctagttaagagacaaagctcaagagaaataagctgaagctgtaacctccatttcaaacttgtggttctgcagaccatcatgcagacatcagagactgggtcggacacaggctcgacagtgaccttacaaacatctgtggctagtcaagcagcagtgcctacgcaggtggtacagcaagtaccagtacaacaacaggtacagcaggtacagactgtgcagcaggtacaacatgtctatcccgctcaggtgcagtatgtggaaggaagcgatactgtctataccaatggagcaatccgaacaacaacgtatccttacacagagacacagatgtacagccaaaatactggagggaattactttgatactcaagggagttccgcccaggtgactaccgtggtctcatcccacagtatggtgggcactggtgggattcagatgggcgtcacaggaggacaactcatcagcagctctggaggaacctatctgatcggcaactcaatggagaattctggtcactcagtgacacacacaactcgggcctccccagcgacaattgaaatggcgattgagacgctgcaaaagtctgacggtctgtccactcacagaagctctcttctcaacagccatctccagtggctgttggacaattatgagacagcagaaggagtgagccttcccagaagcactctgtacaaccactaccttcgacactgtcaggaacacaaactggacccagtcaatgctgcctcttttggaaaattaataagatcaatttttatggggctacgaaccaggagattgggcactagaggaaactccaaataccactactatgggattcgtgtcaagccagattcccctcttaatcgtctgcaagaagacatgcagtatatggctatgagacaacaacccatgcaacagaaacaaaggtacaagcctatgcagaaagtggatggggttgcagatggtttcacaggaagtggtcaacagacaggcacatctgttgagcaaactgtaattgcccaaagccaacatcatcaacagtttttagatgcatctcgagcacttccagagtttggagaagttgaaatctcttctctgccagatggtactacctttgaggatatcaagtcactgcagagtctttatagagagcactgtgaggcaatattggacgttgttgtgaatcttcaatttagcctgatagaaaaattgtggcaaacattctggcgctattctccctctactccaactgatggcactaccattaccgaatcgaggtcagaatcaacatcttttccaattcattttcatggctgagtagatgtcacaactaataaattagagatatgt

SEQ ID NO: 174927 - DNA, 2971 bp, Homo sapiens
  Payload ID: 14346
  Gene Symbol: RFX3
  Gene Name: regulatory factor X, 3 (influences HLA class II expression)
  Uniprot ID: P48380
  ENST ID: ENST00000358730
  CDS Start-End: 9-2132
agaccatcatgcagacatcagagactgggtcggacacaggctcgacagtgaccttacaaacatctgtggctagtcaagcagcagtgcctacgcaggtggtacagcaagtaccagtacaacaacaggtacagcaggtacagactgtgcagcaggtacaacatgtctatcccgctcaggtgcagtatgtggaaggaagcgatactgtctataccaatggagcaatccgaacaacaacgtatccttacacagagacacagatgtacagccaaaatactggagggaattactttgatactcaagggagttccgcccaggtgactaccgtggtctcatcccacagtatggtgggcactggtgggattcagatgggcgtcacaggaggacaactcatcagcagctctggaggaacctatctgatcggcaactcaatggagaattctggtcactcagtgacacacacaactcgggcctccccagcgacaattgaaatggcgattgagacgctgcaaaagtctgacggtctgtccactcacagaagctctcttctcaacagccatctccagtggctgttggacaattatgagacagcagaaggagtgagccttcccagaagcactctgtacaaccactaccttcgacactgtcaggaacacaaactggacccagtcaatgctgcctcttttggaaaattaataagatcaatttttatggggctacgaaccaggagattgggcactagaggaaactccaaataccactactatgggattcgtgtcaagccagattcccctcttaatcgtctgcaagaagacatgcagtatatggctatgagacaacaacccatgcaacagaaacaaaggtacaagcctatgcagaaagtggatggggttgcagatggtttcacaggaagtggtcaacagacaggcacatctgttgagcaaactgtaattgcccaaagccaacatcatcaacagtttttagatgcatctcgagcacttccagagtttggagaagttgaaatctcttctctgccagatggtactacctttgaggatatcaagtcactgcagagtctttatagagagcactgtgaggcaatattggacgttgttgtgaatcttcaatttagcctgatagaaaaattgtggcaaacattctggcgctattctccctctactccaactgatggcactaccattaccgaatcgagcaatctgagtgaaatagaaagtcgacttccgaaagcaaagctgataactctgtgcaaacatgagtctatcctgaaatggatgtgtaactgtgaccatgggatgtaccaggctttggtggagattctcatccccgacgtccttagacctattcctagtgccttgacccaagccattcgaaattttgcaaaaagccttgaaggttggctttccaatgccatgaacaatattccacagagaatgatacaaaccaaggttgccgctgtaagtgcctttgcccagactctgcgaagatacacgtcgcttaatcacctggcccaggcagctcgtgcagtgcttcagaacacttcccaaatcaaccagatgcttagtgacctcaaccgtgtcgactttgccaatgtccaggagcaggcttcctgggtgtgccagtgtgatgacaacatggttcagagactagaaacagacttcaagatgactcttcagcagcagagcaccctggagcagtgggctgcgtggcttgacaatgtgatgatgcaagcactgaaaccctatgaaggaagacccagttttcctaaagccgccaggcagtttctgctaaaatggtctttctacagctcaatggttattcgggacttaaccttacgcagtgctgctagctttggctccttccacctgatccgtctactctacgacgaatatatgttttacttagtagaacatcgtgttgctcaggcaacaggagagactcctatagcagtcatgggcgaggtaagagaggctgaaagagctgtgacccactgggttattaaaaataagccagaattacacttcagtctaaatacattattgattaaaaccatggttcctaaccaagtcagcctcagagccaggagggactgtggagttattgcaagagttccttaaattcctctgttcttatgtgcttaatcaaaagattctaaaattgtggattatatcatgtgaaagttcatggaatgtgtctctatattatacaggtacctatgtaaaagaaaaacttgagaaccactggaatatgaaaaatattttaagtgggaaaaagattggtgctcctgataaagcaaagggctgggaatacaatggaaaggattaaatatgtattttgtagactctttcccggtctccaagaacaaagtaaatgattctattttagaaggataaaaatggtaatgatgataactaacattttttggacacttactatgtgcgaggcacagttctatgttttttacatgtaataaagcacttaatgcaagtctttgagatacgttctactttattctgttttacaataagcatccgaggtttatgcagaaagctaaggcacagaaaggttaaatgattactcagctaaaaaatggtagagatttttttttcaaacacagtctgattttcaaacccatatgcttctaaccactaatgatgtaagggggaaaattctcttcttcagaatttctgaatagtcatcaaaatggcttatcaaaaagcttaaactctgaatataacaagggctggttaatataatgaggaatagatgcaaatgctcagatggttcagcactggcttattttgttatattgaatgcaggaggcgggggtagtttataccttgtcgaatcataccagattattaaatgtgacaaattacccaaggcggtaaaaaagacatgttcacttttaagctatgtgtatgtgcttatataaataaaaaagagtgaaaacaga

SEQ ID NO: 174928 - DNA, 364 bp, Homo sapiens
  Payload ID: 14346
  Gene Symbol: RFX3
  Gene Name: regulatory factor X, 3 (influences HLA class II expression)
  ENST ID: ENST00000381984
  CDS Start-End: 1-258
atgcagacatcagagactgggtcggacacaggctcgacagtgaccttacaaacatctgtggctagtcaagcagcagtgcctacgcaggtggtacagcaagtaccagtacaacaacaggtacagcaggtacagactgtgcagcaggtacaacatgtctatcccgctcaggtgcagtatgtggaaggaagcgatactgtctataccaatggagcaatgtccagggccccctggagcatgattttggaatcttcaccataaacttaaactactgttggcatttataccaaatgaaaaagacgcctgccacttcgacctttatgctctcagggaaaataaatggctttgtagacactgctagaggtca

SEQ ID NO: 174929 - DNA, 9307 bp, Homo sapiens
  Payload ID: 14346
  Gene Symbol: RFX3
  Gene Name: regulatory factor X, 3 (influences HLA class II expression)
  Uniprot ID: P48380
  ENST ID: ENST00000382004
  CDS Start-End: 313-2562
cgtgcgagtgtctccctctccctctcgctctctctctctctccctctctctctctcttttgtgagttatagcaaccgttgccttgtgaatcaagcgccatagtcaccgtagtcctggcgactgttacccatcaacaacaactactcctctcctcctcctcctcctcttcctcctcctcctccccaccaccaccatctccatcacccaccaacaacaccacaataatccacagccaaggccacttggtcattctggcattttatggtagagaatacgttgagtttggctctggaaggaatatgagagaccatcatgcagacatcagagactgggtcggacacaggctcgacagtgaccttacaaacatctgtggctagtcaagcagcagtgcctacgcaggtggtacagcaagtaccagtacaacaacaggtacagcaggtacagactgtgcagcaggtacaacatgtctatcccgctcaggtgcagtatgtggaaggaagcgatactgtctataccaatggagcaatccgaacaacaacgtatccttacacagagacacagatgtacagccaaaatactggagggaattactttgatactcaagggagttccgcccaggtgactaccgtggtctcatcccacagtatggtgggcactggtgggattcagatgggcgtcacaggaggacaactcatcagcagctctggaggaacctatctgatcggcaactcaatggagaattctggtcactcagtgacacacacaactcgggcctccccagcgacaattgaaatggcgattgagacgctgcaaaagtctgacggtctgtccactcacagaagctctcttctcaacagccatctccagtggctgttggacaattatgagacagcagaaggagtgagccttcccagaagcactctgtacaaccactaccttcgacactgtcaggaacacaaactggacccagtcaatgctgcctcttttggaaaattaataagatcaatttttatggggctacgaaccaggagattgggcactagaggaaactccaaataccactactatgggattcgtgtcaagccagattcccctcttaatcgtctgcaagaagacatgcagtatatggctatgagacaacaacccatgcaacagaaacaaaggtacaagcctatgcagaaagtggatggggttgcagatggtttcacaggaagtggtcaacagacaggcacatctgttgagcaaactgtaattgcccaaagccaacatcatcaacagtttttagatgcatctcgagcacttccagagtttggagaagttgaaatctcttctctgccagatggtactacctttgaggatatcaagtcactgcagagtctttatagagagcactgtgaggcaatattggacgttgttgtgaatcttcaatttagcctgatagaaaaattgtggcaaacattctggcgctattctccctctactccaactgatggcactaccattaccgaatcgagcaatctgagtgaaatagaaagtcgacttccgaaagcaaagctgataactctgtgcaaacatgagtctatcctgaaatggatgtgtaactgtgaccatgggatgtaccaggctttggtggagattctcatccccgacgtccttagacctattcctagtgccttgacccaagccattcgaaattttgcaaaaagccttgaaggttggctttccaatgccatgaacaatattccacagagaatgatacaaaccaaggttgccgctgtaagtgcctttgcccagactctgcgaagatacacgtcgcttaatcacctggcccaggcagctcgtgcagtgcttcagaacacttcccaaatcaaccagatgcttagtgacctcaaccgtgtcgactttgccaatgtccaggagcaggcttcctgggtgtgccagtgtgatgacaacatggttcagagactagaaacagacttcaagatgactcttcagcagcagagcaccctggagcagtgggctgcgtggcttgacaatgtgatgatgcaagcactgaaaccctatgaaggaagacccagttttcctaaagccgccaggcagtttctgctaaaatggtctttctacagctcaatggttattcgggacttaaccttacgcagtgctgctagctttggctccttccacctgatccgtctactctacgacgaatatatgttttacttagtagaacatcgtgttgctcaggcaacaggagagactcctatagcagtcatgggcgagtttggtgatttaaatgccgtgtctcctggaaatctggataaagatgaaggcagtgaagtagaaagtgaaatggatgaagaactggatgactcttcagagcctcaagccaaaagagagaaaacagagctgagccaggcatttccagtgggctgcatgcagcctgttctcgagactggcgtgcaaccaagcctcctgaatccaattcacagcgagcacattgtcacaagtactcagactatcagacagtgcagcgctacaggaaatacctacactgcagtctaaagaatattaaagcgtatttttccagcttacattaaccctgttgatattgggcttaagttgaaaatttaataagcctgaaggtcgactgttgtcaaattctatctgtgctgaacattaactttttggagttgtgaaatggaatgggtgtatgtattttgccagatctttttttttaacgtaaacaaattatttgcttcttaataatgaattttttcccttagtttcaggtgtcaagaaggatttttacaacacttaatgtcaatgttttgttttcttataattaaaaagtaatttacattttttgtagcttaaaatattttattgttgattgttagtcttggtgtatgatttcatgtgtaagttttttaattagatgcacttctgtgaaatatcaaaagaaatgatttttttgatttacactggaggcatgcccatttggcagcagatgcatcaaatttgcttttgaaaggtgcttttcattggacagaaccataagacactattttgataacattttgagtatggagagagaatacagagcatttttattatagtgctagagggtttggaaggtcatctatttttctctgaggaaaaaatgagctgtacatttatcagttcagagtaaatgacagaattgcaagagattatgctaatatgtacataatttgtgtacataattattaaaccatgttaacaatgcaagcttccgttaaacattgaattttaactattatttgcataccaattcctctgtttaaagactactgattctgtatttgggaccactgcacagatgcattctgctgttaagtgggggctgttatagttagatactgaagcagaaaaaaaagacttgactttttttttttaagtgtacatgctacttatgctgagctggacatacaggaaaccattccatttggatgactttcttttattccaggtctttttcctaatagtagttcaatatgctgctattataaacgagaatttatagaatgcaaggaatgtagcaacctacataacgttatttccttcaaaactatttcctggtttctaaagtatgtggatttaaattgtaaacagaacctgaaggcagtgtaactggcacacctcactgttacttatccccaattctgtaggatttggataggtggctggatggaccattgccattgaagaatgtacatcagggatcatcgtacctcggctattacatggtgccttaaaacagaactgaagctaaggtttagtaaggtttattttgttcatgtgactaactcttcaatccatttgacaaagtgtgcctgtcattttcagattcctgaagtaaggacaggtgacatgttcttcaaaggaaatttagggaaaacaaaggaaaacaaaaagacaaaaatcagtttccctctttgagtgaccgtggatctattttttattcttagagctgaatattacttgattacaaatcagattgcttaagggtgtggaatagcaggctagttttaataccaacttgttaacataaaatcatatatgttttagaccattcttatttagttacaattttagaaagttaacaaagtaagcaggtacttatcgaagtgcatcttttcagtctaaatgtttgtctgtgtgtctaggtgctggtgagtccacatggacacatgagtgcccatggggcaggagtctgctataaagtcagaaggtgagatcctagagagttacacccagccccattttaatttgcatgaaaagccaaggttcttttaagcactcaaattatttaatgattaaaacacaagaaaggcacatctgttcatttaaatagttgtaaaaaactaatcagcaaaaataaatagataataaagccaaaaaaaaggaaagcacaaaatgattgacagattatcaaatgaggcctatattaaacccaagatgtttatctttccagtggtattggggtaaggggggtggggggttggaaagacgaggtgagccagtctgtaaagttagaaataccaaatggcttatcgggtaatacacagtgtatttaagctgttgttgcttaattgcctcagactactcaaataacatcaacaacatttcttaagtaaaatttaaatattttagatgtaattttaaaaactgatccaaattttttattatacaactcactcatatatttgaaagtcttcactagcatagtagcatcaccttcatctaaatgtcatttaaattactgtccccctttttcctcccaaaaagacaatggatttgtaccaaaacacacacaaaaaaggcaaacaaaacatgataatctgcaaaagttcatgtatctacttcattgtgcataggaagtgtttacaggtaaaattaaaatcaaaaattgaaaaaacactcttcattttggctctcctttctgaattttttcagtttcctgtctctacccgccatcctttgagtgatactatatctgtattggaccaaatgtatttactggtttcattttgtttattgaatgactttaaatgtatttattatcattgtttaatttaatgttggatatatttgtatcattacaggaatctggtaataatgggcaaatttagattgatgaggcttagggatcggggatgctccaggattcaacatttcttccaattgttcatggtttgttctaaattaggacagattaagaactaataaaacattattacatttgaacttgactcaataaaaatattctgatctcctttatgaatattaggaatattctttgtgattagtgtaagtagtttggatcaaaacataaaaagaagacctatggtttatgctacttctagttatttgtagttcacagtaaaacatgcacagacatacacacaaacattttcatcaatttcgaatttgaattgtgaaaaatatataagaaaataaaaacaatttatacatttgagcaaattgagcaatcacatttattgcatttatttccctttttcccttttttcactcattgaaagtgtgggttttctaaataatattagacactaacactcaacagatttattcacaaatgacacaagtacacattttaagacttctttgtatttcttgcaattataaccaatcactagtcatgaaatatacctacataaaccaagtcctacactttcagtgaggaagaatgtaaggaaggtatgttgactgttttcaagtttcagaaaagatattttcatatgataggattgagtatcatgggtatagtttgatcttgacatatagtttgaaaatcatactcaaaagatttgcattcatgaaaccagtgaacaatagggtggaatggatgaaccatctccttggaagacagggcccaattttcaattttttctttggctatcaagttgctagtcacttattcaggattttcatccaaactgtgtttggactgactgtataagtcttactgccttttcagaaatctgctttcctttgtgtgatttttcttgtactgtatagcacggtttatgcacctctctttagatggtgtactttaaaaacaaaagtaaaatttagaaaatggttttaacactgcatacctaaaattagtagtgtgcagcattgactgcctttgatttgtagtagacaagtaaaaatgaatacgttcttgtagaatgctgtaaaagttattcaggaatgaatacggttttagtgccgtaatcatgaatctttttatatgaatgcactgtctaaaagtgctaaatgcattttcaaatttttaaaaattcctcagatgatatatttgaaatgtctaaaataatgctgtgcttgaaacattagtgtaaaaggaaaaaaaaaatagtgtcactgtgatgttggtcctccctgtgtggacacaagtagaaagaaaaaacttggcaagtcacctttgtgtacaatttgaggcagtggttatatacaataaattgacctttattatatcccccagacacacacattcttggtgagaaaagaacaaccatccagaaattgagatgagaacttttgtgatctgtatgaatcacagcagatcatgggggaggaggattggcatgcagtgctgttgaaaattgggcttgttgttagatcagaacaacctccatgtatatggttagaacgaatcaattaatggaatcctagtatttctgcaagtttggtgatttttaaaaactggaatagaagcattaattcagtgcttagttctagtattagaaaacccctttgatgtaatgccttgtattaaccctttgagcattgtaagatatacaatgggggacaaaagcctttcagatcatttatttagacttagaccggtaaagtatactctatatccaaatgtctaattatgctgtttttttaaaggggggggtaggaagagaaagtgtttccacgccgaacacttgcattttatatacaactcttaatttttcttcaagagggcttgatatatttattcccaaatattcactgccatctaagtaagtgtactgtttacagaaaaaaaaaatcaacttttctagtatcacaccatagtctctagaaaaggaggacaaatacatgggcctggatagacctatgtcataactgatttctgcacattgaaggtacctagattgcctttaaaaggtataaagaaagggttaagtttcttttttttttgtcttttttttcccaaaatgaatcaaaagatctcatttatttagctttagaaagtacaagtgtaagtaaagccttaggaagaaaggagttcgagtggattaagagaatctgaactctttgggggcagttaggctatttggagttagatcgctcataaaatattgtttgcgaatttcacacagggcataattttatctatgctccaaaactttaatacgttgtcaaaaaattatatatagatagaatggagagcaaagcacttgattttaagctcatctgtcaggagatgctatgactactgcttctgatatctctaaatgtcagtctgcttacaccattgctgattttgttcaagggaatctcttcgtgcacttgattccctctgttccctgcgtgatcgaacatgaaagcagtgttgtctgcagatgtgcttgcgctgccctagctgggtgcaaataagagtgtaacctattctgatgtctggtgaaaggacatccatagcatagtgcaagtatgccgtaaacgttgctttttaggcagtttaggaagtcagaccatgcaaattactcatgtgttaacatgcaatactcaaagggttttaatttaactctcttcttttgaattcttcatgatgatttactgtaaatgcttctcagtttgcatgccttgatcattgctgctagtgattttatgtgccagtagacctgagtttagtttaccaattttacttaaatagtaaaagccacttacaaagtgactgcctaggatttttttttcctttcatttgaaataattgataatatgtttttttaaaaagaaaaatgtgttttgtctcttcttttatttggttctggtttgattctttttctcccctctttcctttgttttttttttttaaataaattatgatgttgggattggaagccctgagtaatgaaaatctttggtaagaattgtttatgtagctcaataacgaggacaacaaatattctttagaagaattttgattctggggaggaaagaaaatataaaaactcccattgactgttgataaccaagtaaatttttccttcagtaaattagtatttttgaagaaacgatcgccttgttttaacttgctaaacaacaattttaaatgacccaataaagaatctattgaactttattcgtttaaaaagcatcttttgtaccaaagcaaatttttttctctactcatttccatcatcaatttggacctatggtggtgaccaatgcattggttacagaaactttaagtgagtgccttgagaaaacttggaaatttgtgcctgaggtggtaaacttttaattaggttaattgtagtgcttaccaatcagtaacttcactatcactcagggctttcgtaccttctaggtaaaacttctttcattgtgtttttttaagatactgtatttttttttaagtgccatcatttaaatttcacttagtaagtggcagattacattattcagtcccacaagcacagaaacatagtaacactaggagatatttgaacatttattttacaatcgactgaatatattatgtaaatgaggtaagcaacttttgtagagattgtatgtgtgagataatgtaatgttcttttccagtttttggactacagttgaataaactttttaattatttaaaaacatctttaccgaataacatgtgatggttttttgtataatgtatttgattttgtaaatacgtatttcctgatgtgatttttgtgagaaatgctaaatcttttagtatatcatgtcctctcaaaattggcaggagctaaataatagtttgtgggcgatttgtattgtgtactgtacaataactggggaacttttataattataaaaatatatattaacttttagtgtgttgtttaaacaaatgactggaacatactaaagatattagtaggatttttctgaatatttcagacttgaactcaggctagctttcttgtgtttttcaaaacaaaatggtgtcttgtcttttaaaatcaataaatttgtttccttgttacaaata

SEQ ID NO: 174930 - DNA, 869 bp, Homo sapiens
  Payload ID: 14346
  Gene Symbol: RFX3
  Gene Name: regulatory factor X, 3 (influences HLA class II expression)
  ENST ID: ENST00000449190
  CDS Start-End: 454-869
cttccctcccccacccctccccgtgcgagtgtctccctctccctctcgctctctctctctctccctctctctctctcttttgtgagttatagcaaccgttgccttgtgaatcaagcgccatagtcaccgtagtcctggcgactgttacccatcaacaacaactactcctctcctcctcctcctcctcttcctcctcctcctccccaccaccaccatctccatcacccaccaacaacaccacaataatccacagccaaggccacttggtcattctggcattttatggtagagaatacgttgagtttggctctggaaggaatatgagcagccatggaggatactctagtttctttgggaagataaacactcaatctgctagttaagagacaaagctcaagagaaataagctgaagctgtaacctccatttcaaacttgtggttctgcagaccatcatgcagacatcagagactgggtcggacacaggctcgacagtgaccttacaaacatctgtggctagtcaagcagcagtgcctacgcaggtggtacagcaagtaccagtacaacaacaggtacagcaggtacagactgtgcagcaggtacaacatgtctatcccgctcaggtgcagtatgtggaaggaagcgatactgtctataccaatggagcaatccgaacaacaacgtatccttacacagagacacagatgtacagccaaaatactggagggaattactttgatactcaagggagttccgcccaggtgactaccgtggtctcatcccacagtatggtgggcactggtgggattcagatgggcgtcacaggaggacaactcatcagcagctctggaggaacctatctgatcggcaa

SEQ ID NO: 174931 - DNA, 814 bp, Homo sapiens
  Payload ID: 14346
  Gene Symbol: RFX3
  Gene Name: regulatory factor X, 3 (influences HLA class II expression)
  ENST ID: ENST00000458034
  CDS Start-End: 293-814
cagaaaatacaaatgtgcatagacagctctgggggagtgttttatatatctgtctgtctctctcggtatatatagccagctgtatggcaccagtgcaatggtggtatagttctaacctcagtaatatttggtaaacttaaactatttttaaagtccattttcttttttatcctcatttgccatctattcatttgctacatttattcacaccagcaatctgagtgaaatagaaagtcgacttccgaaagcaaagctgataactctgtgcaaacatgagtctatcctgaaatggatgtgtaactgtgaccatgggatgtaccaggctttggtggagattctcatccccgacgtccttagacctattcctagtgccttgacccaagccattcgaaattttgcaaaaagccttgaaggttggctttccaatgccatgaacaatattccacagagaatgatacaaaccaaggttgccgctgtaagtgcctttgcccagactctgcgaagatacacgtcgcttaatcacctggcccaggcagctcgtgcagtgcttcagaacacttcccaaatcaaccagatgcttagtgacctcaaccgtgtcgactttgccaatgtccaggagcaggcttcctgggtgtgccagtgtgatgacaacatggttcagagactagaaacagacttcaagatgactcttcagcagcagagcaccctggagcagtgggctgcgtggcttgacaatgtgatgatgcaagcactgaaaccctatgaaggaagacccagttttcctaaagccgccaggcagtttctgctaaaatgg

SEQ ID NO: 174932 - DNA, 822 bp, Homo sapiens
  Payload ID: 14346
  Gene Symbol: RFX3
  Gene Name: regulatory factor X, 3 (influences HLA class II expression)
  ENST ID: ENST00000457373
  CDS Start-End: 174-822
actacaaacagtactttaaagacaggccttccactgccattcagaaagccatggaggatactctagtttctttgggaagataaacactcaatctgctagttaagagacaaagctcaagagaaataagctgaagctgtaacctccatttcaaacttgtggttctgcagaccatcatgcagacatcagagactgggtcggacacaggctcgacagtgaccttacaaacatctgtggctagtcaagcagcagtgcctacgcaggtggtacagcaagtaccagtacaacaacaggtacagcaggtacagactgtgcagcaggtacaacatgtctatcccgctcaggtgcagtatgtggaaggaagcgatactgtctataccaatggagcaatccgaacaacaacgtatccttacacagagacacagatgtacagccaaaatactggagggaattactttgatactcaagggagttccgcccaggtgactaccgtggtctcatcccacagtatggtgggcactggtgggattcagatgggcgtcacaggaggacaactcatcagcagctctggaggaacctatctgatcggcaactcaatggagaattctggtcactcagtgacacacacaactcgggcctccccagcgacactccagtggctgttggacaattatgagacagcagaaggagtgagccttcccagaagcactctgtacaaccactaccttcgacactgtcaggaacacaaactggacccagtcaatgctgcctcttttggaaaattaataagatcaatttttatggggctacgaaccaggagattgg

SEQ ID NO: 174933 - DNA, 526 bp, Homo sapiens
  Payload ID: 14346
  Gene Symbol: RFX3
  Gene Name: regulatory factor X, 3 (influences HLA class II expression)
  ENST ID: ENST00000442560
  CDS Start-End: 1-408
gtacagcaggtacagactgtgcagcaggtacaacatgtctatcccgctcaggtgcagtatgtggaaggaagcgatactgtctataccaatggagcaatccgaacaacaacgtatccttacacagagacacagatgtacagccaaaatactggagggaattactttgatactcaagggagttccgcccaggtgactaccgtggtctcatcccacagtatggtgggcactggtgggattcagatgggcgtcacaggaggacaactcatcagcagctctggaggaacctatctgatcggcaactcaatggagaattctggtcactcagtgacacacacaactcgggcctccccagcgacactttttctgttttcctgtgtccctttttccctaggccaactcagtccctgaaatgaaactcctcagacagattaccatgaaccgtctgtttcctacactaaatcataaattgactgaaggttctgggcctcattttcaaagcatttaataaaatgggactttgaatgac

SEQ ID NO: 174934 - DNA, 740 bp, Homo sapiens
  Payload ID: 14346
  Gene Symbol: RFX3
  Gene Name: regulatory factor X, 3 (influences HLA class II expression)
  ENST ID: ENST00000451859
  CDS Start-End: 189-740
acttctgcttccactacaaacagtactttaaagacaggccttccactgccattcagaaagcagccatggaggatactctagtttctttgggaagataaacactcaatctgctagttaagagacaaagctcaagagaaataagctgaagctgtaacctccatttcaaacttgtggttctgcagaccatcatgcagacatcagagactgggtcggacacaggctcgacagtgaccttacaaacatctgtggctagtcaagcagcagtgcctacgcaggtggtacagcaagtaccagtacaacaacaggtacagcaggtacagactgtgcagcaggtacaacatgtctatcccgctcaggtgcagtatgtggaaggaagcgatactgtctataccaatggagcaatccgaacaacaacgtatccttacacagagacacagatgtacagccaaaatactggagggaattactttgatactcaagggagttccgcccaggtgactaccgtggtctcatcccacagtatggtgggcactggtgggattcagatgggcgtcacaggaggacaactcatcagcagctctggaggaacctatctgatcggcaactcaatggagaattctggtcactcagtgacacacacaactcgggcctccccagcgacaattgaaatggcgattgagacgctgcaaaagtctgacggtctgtccactcacagaagctctcttctcaacagccatgta

SEQ ID NO: 174935 - DNA, 633 bp, Homo sapiens
  Payload ID: 14346
  Gene Symbol: RFX3
  Gene Name: regulatory factor X, 3 (influences HLA class II expression)
  ENST ID: ENST00000449234
  CDS Start-End: 1-375
gagcaggcttcctgggtgtgccagtgtgatgacaacatggttcagagactagaaacagacttcaagatgactcttcagcagcagagcaccctggagcagtgggctgcgtggcttgacaatgtgatgatgcaagcactgaaaccctatgaaggaagacccagttttcctaaagccgccaggcagtttctgctaaaatggtctttctacagctcaatggttattcgggacttaaccttacgcagtgctgctagctttggctccttccacctgatccgtctactctacgacgaatatatgttttacttagtagaacatcgtgttgctcaggcaacaggagagactcctatagcagtcatgggcgaggtacctatgtaaaagaaaaacttgagaaccactggaatatgaaaaatattttaagtgggaaaaagattggtgctcctgataaagcaaagggctgggaatacaatggaaaggattaaatatgtattttgtagactctttcccggtctccaagaacaaagtaaatgattctattttagaaggataaaaatggtaatgatgataactaacattttttggacacttactatgtgcgaggcacagttctatgttttttacatgtaataaagcact

SEQ ID NO: 174936 - DNA, 492 bp, Homo sapiens
  Payload ID: 14346
  Gene Symbol: RFX3
  Gene Name: regulatory factor X, 3 (influences HLA class II expression)
  ENST ID: ENST00000420720
  CDS Start-End: 1-471
gtacagcaggtacagactgtgcagcaggtacaacatgtctatcccgctcaggtgcagtatgtggaaggaagcgatactgtctataccaatggagcaatccgaacaacaacgtatccttacacagagacacagatgtacagccaaaatactggagggaattactttgatactcaagggagttccgcccaggtgactaccgtggtctcatcccacagtatggtgggcactggtgggattcagatgggcgtcacaggaggacaactcatcagcagctctggaggaacctatctgatcggcaactcaatggagaattctggtcactcagtgacacacacaactcgggcctccccagcgacagccaactcagtccctgaaatgaaactcctcagacagattaccatgaaccgtctgtttcctacactaaatcataaattgactgaaggttctgggcctcattttcaaagcatttaataaaatgggactttgaatgac

SEQ ID NO: 174937 - DNA, 9253 bp, Homo sapiens
  Payload ID: 14346
  Gene Symbol: RFX3
  Gene Name: regulatory factor X, 3 (influences HLA class II expression)
  Uniprot ID: P48380
  ENST ID: ENST00000617270
  CDS Start-End: 264-2513
ccctcccccacccctccccgtgcgagtgtctccctctccctctcgctctctctctctctccctctctctctctcttttgtgagttatagcaaccgttgccttgtgaatcaagcgccatagtcaccgtagtcctggcgactgttacccatcaacaacaactactcctctcctcctcctcctcctcttcctcctcctcctccccaccaccaccatctccatcacccaccaacaacaccacaataatccacagccaagagaccatcatgcagacatcagagactgggtcggacacaggctcgacagtgaccttacaaacatctgtggctagtcaagcagcagtgcctacgcaggtggtacagcaagtaccagtacaacaacaggtacagcaggtacagactgtgcagcaggtacaacatgtctatcccgctcaggtgcagtatgtggaaggaagcgatactgtctataccaatggagcaatccgaacaacaacgtatccttacacagagacacagatgtacagccaaaatactggagggaattactttgatactcaagggagttccgcccaggtgactaccgtggtctcatcccacagtatggtgggcactggtgggattcagatgggcgtcacaggaggacaactcatcagcagctctggaggaacctatctgatcggcaactcaatggagaattctggtcactcagtgacacacacaactcgggcctccccagcgacaattgaaatggcgattgagacgctgcaaaagtctgacggtctgtccactcacagaagctctcttctcaacagccatctccagtggctgttggacaattatgagacagcagaaggagtgagccttcccagaagcactctgtacaaccactaccttcgacactgtcaggaacacaaactggacccagtcaatgctgcctcttttggaaaattaataagatcaatttttatggggctacgaaccaggagattgggcactagaggaaactccaaataccactactatgggattcgtgtcaagccagattcccctcttaatcgtctgcaagaagacatgcagtatatggctatgagacaacaacccatgcaacagaaacaaaggtacaagcctatgcagaaagtggatggggttgcagatggtttcacaggaagtggtcaacagacaggcacatctgttgagcaaactgtaattgcccaaagccaacatcatcaacagtttttagatgcatctcgagcacttccagagtttggagaagttgaaatctcttctctgccagatggtactacctttgaggatatcaagtcactgcagagtctttatagagagcactgtgaggcaatattggacgttgttgtgaatcttcaatttagcctgatagaaaaattgtggcaaacattctggcgctattctccctctactccaactgatggcactaccattaccgaatcgagcaatctgagtgaaatagaaagtcgacttccgaaagcaaagctgataactctgtgcaaacatgagtctatcctgaaatggatgtgtaactgtgaccatgggatgtaccaggctttggtggagattctcatccccgacgtccttagacctattcctagtgccttgacccaagccattcgaaattttgcaaaaagccttgaaggttggctttccaatgccatgaacaatattccacagagaatgatacaaaccaaggttgccgctgtaagtgcctttgcccagactctgcgaagatacacgtcgcttaatcacctggcccaggcagctcgtgcagtgcttcagaacacttcccaaatcaaccagatgcttagtgacctcaaccgtgtcgactttgccaatgtccaggagcaggcttcctgggtgtgccagtgtgatgacaacatggttcagagactagaaacagacttcaagatgactcttcagcagcagagcaccctggagcagtgggctgcgtggcttgacaatgtgatgatgcaagcactgaaaccctatgaaggaagacccagttttcctaaagccgccaggcagtttctgctaaaatggtctttctacagctcaatggttattcgggacttaaccttacgcagtgctgctagctttggctccttccacctgatccgtctactctacgacgaatatatgttttacttagtagaacatcgtgttgctcaggcaacaggagagactcctatagcagtcatgggcgagtttggtgatttaaatgccgtgtctcctggaaatctggataaagatgaaggcagtgaagtagaaagtgaaatggatgaagaactggatgactcttcagagcctcaagccaaaagagagaaaacagagctgagccaggcatttccagtgggctgcatgcagcctgttctcgagactggcgtgcaaccaagcctcctgaatccaattcacagcgagcacattgtcacaagtactcagactatcagacagtgcagcgctacaggaaatacctacactgcagtctaaagaatattaaagcgtatttttccagcttacattaaccctgttgatattgggcttaagttgaaaatttaataagcctgaaggtcgactgttgtcaaattctatctgtgctgaacattaactttttggagttgtgaaatggaatgggtgtatgtattttgccagatctttttttttaacgtaaacaaattatttgcttcttaataatgaattttttcccttagtttcaggtgtcaagaaggatttttacaacacttaatgtcaatgttttgttttcttataattaaaaagtaatttacattttttgtagcttaaaatattttattgttgattgttagtcttggtgtatgatttcatgtgtaagttttttaattagatgcacttctgtgaaatatcaaaagaaatgatttttttgatttacactggaggcatgcccatttggcagcagatgcatcaaatttgcttttgaaaggtgcttttcattggacagaaccataagacactattttgataacattttgagtatggagagagaatacagagcatttttattatagtgctagagggtttggaaggtcatctatttttctctgaggaaaaaatgagctgtacatttatcagttcagagtaaatgacagaattgcaagagattatgctaatatgtacataatttgtgtacataattattaaaccatgttaacaatgcaagcttccgttaaacattgaattttaactattatttgcataccaattcctctgtttaaagactactgattctgtatttgggaccactgcacagatgcattctgctgttaagtgggggctgttatagttagatactgaagcagaaaaaaaagacttgactttttttttttaagtgtacatgctacttatgctgagctggacatacaggaaaccattccatttggatgactttcttttattccaggtctttttcctaatagtagttcaatatgctgctattataaacgagaatttatagaatgcaaggaatgtagcaacctacataacgttatttccttcaaaactatttcctggtttctaaagtatgtggatttaaattgtaaacagaacctgaaggcagtgtaactggcacacctcactgttacttatccccaattctgtaggatttggataggtggctggatggaccattgccattgaagaatgtacatcagggatcatcgtacctcggctattacatggtgccttaaaacagaactgaagctaaggtttagtaaggtttattttgttcatgtgactaactcttcaatccatttgacaaagtgtgcctgtcattttcagattcctgaagtaaggacaggtgacatgttcttcaaaggaaatttagggaaaacaaaggaaaacaaaaagacaaaaatcagtttccctctttgagtgaccgtggatctattttttattcttagagctgaatattacttgattacaaatcagattgcttaagggtgtggaatagcaggctagttttaataccaacttgttaacataaaatcatatatgttttagaccattcttatttagttacaattttagaaagttaacaaagtaagcaggtacttatcgaagtgcatcttttcagtctaaatgtttgtctgtgtgtctaggtgctggtgagtccacatggacacatgagtgcccatggggcaggagtctgctataaagtcagaaggtgagatcctagagagttacacccagccccattttaatttgcatgaaaagccaaggttcttttaagcactcaaattatttaatgattaaaacacaagaaaggcacatctgttcatttaaatagttgtaaaaaactaatcagcaaaaataaatagataataaagccaaaaaaaaggaaagcacaaaatgattgacagattatcaaatgaggcctatattaaacccaagatgtttatctttccagtggtattggggtaaggggggtggggggttggaaagacgaggtgagccagtctgtaaagttagaaataccaaatggcttatcgggtaatacacagtgtatttaagctgttgttgcttaattgcctcagactactcaaataacatcaacaacatttcttaagtaaaatttaaatattttagatgtaattttaaaaactgatccaaattttttattatacaactcactcatatatttgaaagtcttcactagcatagtagcatcaccttcatctaaatgtcatttaaattactgtccccctttttcctcccaaaaagacaatggatttgtaccaaaacacacacaaaaaaggcaaacaaaacatgataatctgcaaaagttcatgtatctacttcattgtgcataggaagtgtttacaggtaaaattaaaatcaaaaattgaaaaaacactcttcattttggctctcctttctgaattttttcagtttcctgtctctacccgccatcctttgagtgatactatatctgtattggaccaaatgtatttactggtttcattttgtttattgaatgactttaaatgtatttattatcattgtttaatttaatgttggatatatttgtatcattacaggaatctggtaataatgggcaaatttagattgatgaggcttagggatcggggatgctccaggattcaacatttcttccaattgttcatggtttgttctaaattaggacagattaagaactaataaaacattattacatttgaacttgactcaataaaaatattctgatctcctttatgaatattaggaatattctttgtgattagtgtaagtagtttggatcaaaacataaaaagaagacctatggtttatgctacttctagttatttgtagttcacagtaaaacatgcacagacatacacacaaacattttcatcaatttcgaatttgaattgtgaaaaatatataagaaaataaaaacaatttatacatttgagcaaattgagcaatcacatttattgcatttatttccctttttcccttttttcactcattgaaagtgtgggttttctaaataatattagacactaacactcaacagatttattcacaaatgacacaagtacacattttaagacttctttgtatttcttgcaattataaccaatcactagtcatgaaatatacctacataaaccaagtcctacactttcagtgaggaagaatgtaaggaaggtatgttgactgttttcaagtttcagaaaagatattttcatatgataggattgagtatcatgggtatagtttgatcttgacatatagtttgaaaatcatactcaaaagatttgcattcatgaaaccagtgaacaatagggtggaatggatgaaccatctccttggaagacagggcccaattttcaattttttctttggctatcaagttgctagtcacttattcaggattttcatccaaactgtgtttggactgactgtataagtcttactgccttttcagaaatctgctttcctttgtgtgatttttcttgtactgtatagcacggtttatgcacctctctttagatggtgtactttaaaaacaaaagtaaaatttagaaaatggttttaacactgcatacctaaaattagtagtgtgcagcattgactgcctttgatttgtagtagacaagtaaaaatgaatacgttcttgtagaatgctgtaaaagttattcaggaatgaatacggttttagtgccgtaatcatgaatctttttatatgaatgcactgtctaaaagtgctaaatgcattttcaaatttttaaaaattcctcagatgatatatttgaaatgtctaaaataatgctgtgcttgaaacattagtgtaaaaggaaaaaaaaaatagtgtcactgtgatgttggtcctccctgtgtggacacaagtagaaagaaaaaacttggcaagtcacctttgtgtacaatttgaggcagtggttatatacaataaattgacctttattatatcccccagacacacacattcttggtgagaaaagaacaaccatccagaaattgagatgagaacttttgtgatctgtatgaatcacagcagatcatgggggaggaggattggcatgcagtgctgttgaaaattgggcttgttgttagatcagaacaacctccatgtatatggttagaacgaatcaattaatggaatcctagtatttctgcaagtttggtgatttttaaaaactggaatagaagcattaattcagtgcttagttctagtattagaaaacccctttgatgtaatgccttgtattaaccctttgagcattgtaagatatacaatgggggacaaaagcctttcagatcatttatttagacttagaccggtaaagtatactctatatccaaatgtctaattatgctgtttttttaaaggggggggtaggaagagaaagtgtttccacgccgaacacttgcattttatatacaactcttaatttttcttcaagagggcttgatatatttattcccaaatattcactgccatctaagtaagtgtactgtttacagaaaaaaaaaatcaacttttctagtatcacaccatagtctctagaaaaggaggacaaatacatgggcctggatagacctatgtcataactgatttctgcacattgaaggtacctagattgcctttaaaaggtataaagaaagggttaagtttcttttttttttgtcttttttttcccaaaatgaatcaaaagatctcatttatttagctttagaaagtacaagtgtaagtaaagccttaggaagaaaggagttcgagtggattaagagaatctgaactctttgggggcagttaggctatttggagttagatcgctcataaaatattgtttgcgaatttcacacagggcataattttatctatgctccaaaactttaatacgttgtcaaaaaattatatatagatagaatggagagcaaagcacttgattttaagctcatctgtcaggagatgctatgactactgcttctgatatctctaaatgtcagtctgcttacaccattgctgattttgttcaagggaatctcttcgtgcacttgattccctctgttccctgcgtgatcgaacatgaaagcagtgttgtctgcagatgtgcttgcgctgccctagctgggtgcaaataagagtgtaacctattctgatgtctggtgaaaggacatccatagcatagtgcaagtatgccgtaaacgttgctttttaggcagtttaggaagtcagaccatgcaaattactcatgtgttaacatgcaatactcaaagggttttaatttaactctcttcttttgaattcttcatgatgatttactgtaaatgcttctcagtttgcatgccttgatcattgctgctagtgattttatgtgccagtagacctgagtttagtttaccaattttacttaaatagtaaaagccacttacaaagtgactgcctaggatttttttttcctttcatttgaaataattgataatatgtttttttaaaaagaaaaatgtgttttgtctcttcttttatttggttctggtttgattctttttctcccctctttcctttgttttttttttttaaataaattatgatgttgggattggaagccctgagtaatgaaaatctttggtaagaattgtttatgtagctcaataacgaggacaacaaatattctttagaagaattttgattctggggaggaaagaaaatataaaaactcccattgactgttgataaccaagtaaatttttccttcagtaaattagtatttttgaagaaacgatcgccttgttttaacttgctaaacaacaattttaaatgacccaataaagaatctattgaactttattcgtttaaaaagcatcttttgtaccaaagcaaatttttttctctactcatttccatcatcaatttggacctatggtggtgaccaatgcattggttacagaaactttaagtgagtgccttgagaaaacttggaaatttgtgcctgaggtggtaaacttttaattaggttaattgtagtgcttaccaatcagtaacttcactatcactcagggctttcgtaccttctaggtaaaacttctttcattgtgtttttttaagatactgtatttttttttaagtgccatcatttaaatttcacttagtaagtggcagattacattattcagtcccacaagcacagaaacatagtaacactaggagatatttgaacatttattttacaatcgactgaatatattatgtaaatgaggtaagcaacttttgtagagattgtatgtgtgagataatgtaatgttcttttccagtttttggactacagttgaataaactttttaattatttaaaaacatctttaccgaataacatgtgatggttttttgtataatgtatttgattttgtaaatacgtatttcctgatgtgatttttgtgagaaatgctaaatcttttagtatatcatgtcctctcaaaattggcaggagctaaataatagtttgtgggcgatttgtattgtgtactgtacaataactggggaacttttataattataaaaatatatattaacttttagtgtgttgtttaaacaaatgactggaacatactaaagatattagtaggatttttctgaatatttcagacttgaactcaggctagctttcttgtgtttttcaaaacaaaatggtgtcttgtcttttaaaatcaataaatttgtttccttgttac

SEQ ID NO: 174938 - DNA, 3378 bp, Homo sapiens
  Payload ID: 14347
  Gene Symbol: RFX4
  Gene Name: regulatory factor X, 4 (influences HLA class II expression)
  Uniprot ID: Q33E94
  ENST ID: ENST00000229387
  CDS Start-End: 119-2044
agagtgagttccaggtgggaaggcagttatgacagttgagaagtagtagaagacacggaaggcacagaaggcagacttcgctcagcacaaagaattttctgataaccatactggcaaaatgaactgggctgccttcggagggtctgaattcttcatcccagaaggcattcagatagattcgagatgcccactaagcagaaatatcacggaatggtaccattactatggcattgcagtgaaagaaagctcccaatattatgatgtgatgtattccaagaaaggagctgcctgggtgagtgagacgggcaagaaagaagtgagcaaacagacagtggcatattcaccccggtccaaactcggaacactgctgccagaatttcccaatgtcaaagatctaaatctgccagccagcctgcctgaggagaaggtttctacctttattatgatgtacagaacacactgtcagagaatactggacactgtaataagagccaactttgatgaggttcaaagtttccttctgcacttttggcaaggaatgccgccccacatgctgcctgtgctgggctcctccacggtggtgaacattgtcggcgtgtgtgactccatcctctacaaagctatctccggggtgctgatgcccactgtgctgcaggcattacctgacagcttaactcaggtgattcgaaagtttgccaagcaactggatgagtggctaaaagtggctctccacgacctcccagaaaacttgcgaaacatcaagttcgaattgtcgagaaggttctcccaaattctgagacggcaaacatcactaaatcatctctgccaggcatctcgaacagtgatccacagtgcagacatcacgttccaaatgctggaagactggaggaacgtggacctgaacagcatcaccaagcaaaccctttacaccatggaagactctcgcgatgagcaccggaaactcatcacccaattatatcaggagtttgaccatctcttggaggagcagtctcccatcgagtcctacattgagtggctggataccatggttgaccgctgtgttgtgaaggtggctgccaagagacaagggtccttgaagaaagtggcccagcagttcctcttgatgtggtcctgtttcggcacaagggtgatccgggacatgaccttgcacagcgcccccagcttcgggtcttttcacctaattcacttaatgtttgatgactacgtgctctacctgttagaatctctgcactgtcaggagcgggccaatgagctcatgcgagccatgaagggagaaggaagcactgcagaagtccgagaagagatcatcttgacagaggctgccgcaccaaccccttcaccagtgccatcgttttctccagcaaaatctgccacatctgtggaagtgccacctccctcttcccctgttagcaatccttcccctgagtacactggcctcagcactacaggagcaatgcagtcttacacgtggtctctaacatacacagtgacgacggctgctgggtccccagctgagaactcccaacagctgccctgtatgaggaacactcatgtgccttcttcctccgtcacacacaggataccagtttatccccacagagaggaacatggatacacgggaagctataactatgggagctatggcaaccagcatcctcaccccatgcagagccagtatccggccctccctcatgacacagctatctctgggccactccactatgccccttaccacaggagctctgcacagtacccttttaatagccccacttcccggatggaaccttgtttgatgagcagtactcccagactgcatcctaccccagtcactccccgctggccagaggtgccctcagccaacacgtgctacacaagcccgtctgtgcattctgcgaggtacggaaactctagtgacatgtatacacctctgacaacgcgcaggaattctgaatatgagcacatgcaacactttcctggctttgcttacatcaacggagaggcctctacaggatgggctaaatgactgctatcataggcatccatatttaatattaataataataattaataataataataaacccaacacccatcccccagaagactttatctctatacattgtaactcatgggctattcctaagtgcccattttcctaatgaacatgaggatgggatcaatgtgggatgaataaactttagttcagaaacaggacttactaaaagtcagtgggactgggtttctgtagccaagccagacttgactgtttctgtagagcactatctcgggcaggccattctgtgccttttccctctgttccatgactttgctttgtgttggcaaccacttctagtaagctactgattttcctgttgacaaaatctctttagtcttgaaggatggatactggagacagaatctggtttgtgttcttggatgggcacataatttaccaagagcattcaccttgccatctgtcttgtcattgtactgtacaaggaacagccctcagacgtgttctgcacatcccttcttcctggtggtaccatccctatttcctggagcaccagggctaaatggggagctatctggaaactctagattttctgtcatacccacatctgtcacagtacctgcattgtcttggaatgtaagcactgtcttgagggaaggaagaggtctgttctgtattgccttaagttgattgaggtttgtaggagactggttcttctacatacaaggatttgtcttaagtttgcacaatggctagtgtcagcaaaaggcaggagagggtttttgttttttttttaagttctatgagaatgtggatttatggcattgagtatcacactcagctctgctgtgttaactttgtgaaactggatggaacaaactttaacttaccaagcaccaagtgtgaaagtgactttcacggttccttcataaaactataataatatccgacactttgatagaaaaaaattcaaagctgtgcctttgagcctatactatactgtgtatgtgtggaaataaaaatgtattgtacttttggagaattttttgtaggcatttttctgtcagatttgtagtaatttgtgaggtttgttagagattaatataggttttctttctgtattataaaatgcaccaagcaattatggtggacctattaccctatgggtaagaaataaatggaaatatgacatcggatgtttcagcaactgttctgtaaataaaatctttgatcacaccactcagtgtgataattgtgtctacagctaaaatggaaatagttttatctgtacagttgtgcaagatatgaatggtttcacactcaaataaaaaatattgaaacga

SEQ ID NO: 174939 - DNA, 2565 bp, Homo sapiens
  Payload ID: 14347
  Gene Symbol: RFX4
  Gene Name: regulatory factor X, 4 (influences HLA class II expression)
  Uniprot ID: Q33E94
  ENST ID: ENST00000357881
  CDS Start-End: 141-2375
gttgccatggcaacccactgacctgagccaccccctggagaggccacagctgctggcttcctgggcttctccaaactcctgtgtgtcgccactgccaccggcagggagccaggagagagacagaaaggggctgagacagaatgatcaaaaggagagcccaccctggtgcgggaggcgacaggaccaggcctcgacggcgccgttccactgagagctggattgaaagatgtctcaacgaaagtgaaaacaaacgttattccagccacacatctctggggaatgtttctaatgatgaaaatgaggaaaaagaaaataatagagcatccaagccccactccactcctgctactctgcaatggctggaggagaactatgagattgcagagggggtctgcatccctcgcagtgccctctatatgcattacctggatttctgcgagaagaatgatacccaacctgtcaatgctgccagctttggaaagatcataaggcagcagtttcctcagttaaccaccagaagactcgggacccgaggacagtcaaagtaccattactatggcattgcagtgaaagaaagctcccaatattatgatgtgatgtattccaagaaaggagctgcctgggtgagtgagacgggcaagaaagaagtgagcaaacagacagtggcatattcaccccggtccaaactcggaacactgctgccagaatttcccaatgtcaaagatctaaatctgccagccagcctgcctgaggagaaggtttctacctttattatgatgtacagaacacactgtcagagaatactggacactgtaataagagccaactttgatgaggttcaaagtttccttctgcacttttggcaaggaatgccgccccacatgctgcctgtgctgggctcctccacggtggtgaacattgtcggcgtgtgtgactccatcctctacaaagctatctccggggtgctgatgcccactgtgctgcaggcattacctgacagcttaactcaggtgattcgaaagtttgccaagcaactggatgagtggctaaaagtggctctccacgacctcccagaaaacttgcgaaacatcaagttcgaattgtcgagaaggttctcccaaattctgagacggcaaacatcactaaatcatctctgccaggcatctcgaacagtgatccacagtgcagacatcacgttccaaatgctggaagactggaggaacgtggacctgaacagcatcaccaagcaaaccctttacaccatggaagactctcgcgatgagcaccggaaactcatcacccaattatatcaggagtttgaccatctcttggaggagcagtctcccatcgagtcctacattgagtggctggataccatggttgaccgctgtgttgtgaaggtggctgccaagagacaagggtccttgaagaaagtggcccagcagttcctcttgatgtggtcctgtttcggcacaagggtgatccgggacatgaccttgcacagcgcccccagcttcgggtcttttcacctaattcacttaatgtttgatgactacgtgctctacctgttagaatctctgcactgtcaggagcgggccaatgagctcatgcgagccatgaagggagaaggaagcactgcagaagtccgagaagagatcatcttgacagaggctgccgcaccaaccccttcaccagtgccatcgttttctccagcaaaatctgccacatctgtggaagtgccacctccctcttcccctgttagcaatccttcccctgagtacactggcctcagcactacaggagcaatgcagtcttacacgtggtctctaacatacacagtgacgacggctgctgggtccccagctgagaactcccaacagctgccctgtatgaggaacactcatgtgccttcttcctccgtcacacacaggataccagtttatccccacagagaggaacatggatacacgggaagctataactatgggagctatggcaaccagcatcctcaccccatgcagagccagtatccggccctccctcatgacacagctatctctgggccactccactatgccccttaccacaggagctctgcacagtacccttttaatagccccacttcccggatggaaccttgtttgatgagcagtactcccagactgcatcctaccccagtcactccccgctggccagaggtgccctcagccaacacgtgctacacaagcccgtctgtgcattctgcgaggtacggaaactctagtgacatgtatacacctctgacaacgcgcaggaattctgaatatgagcacatgcaacactttcctggctttgcttacatcaacggagaggcctctacaggatgggctaaatgactgctatcataggcatccatatttaatattaataataataattaataataataataaacccaacacccatcccccagaagactttatctctatacattgtaactcatgggctattcctaagtgcccattttcctaatgaacatgaggatgggatcaatgtgggatgaataaactttagttcagaaacagg

SEQ ID NO: 174940 - DNA, 3955 bp, Homo sapiens
  Payload ID: 14347
  Gene Symbol: RFX4
  Gene Name: regulatory factor X, 4 (influences HLA class II expression)
  Uniprot ID: Q33E94
  ENST ID: ENST00000392842
  CDS Start-End: 415-2622
atctgacgagcggccattcatcaggccggctggcctatcaatgacattgctcccatcggggctcctataaaatgatgctttttcccatgaaacatccgcaaacattttgacgggtttggctttgcccggctggattactgagtgtccccttgctcgctcgctttttctctctcccccttctccgagctcgctcccttctctccctctctctcctcttttcttctttctcttttctttcctcttctttttcttttcttttcctttcctcctttatccttgtgccccctcactttctgcgtctctctctctccccttctccctccctccctcccttcctccctgggcatctctagcacaggggatccccaaacatcaggacttttggggggcgcctgtgctgtccatgggaagagcatgcattgtgggttactggaggaacccgacatggattccacagagagctggattgaaagatgtctcaacgaaagtgaaaacaaacgttattccagccacacatctctggggaatgtttctaatgatgaaaatgaggaaaaagaaaataatagagcatccaagccccactccactcctgctactctgcaatggctggaggagaactatgagattgcagagggggtctgcatccctcgcagtgccctctatatgcattacctggatttctgcgagaagaatgatacccaacctgtcaatgctgccagctttggaaagatcataaggcagcagtttcctcagttaaccaccagaagactcgggacccgaggacagtcaaagtaccattactatggcattgcagtgaaagaaagctcccaatattatgatgtgatgtattccaagaaaggagctgcctgggtgagtgagacgggcaagaaagaagtgagcaaacagacagtggcatattcaccccggtccaaactcggaacactgctgccagaatttcccaatgtcaaagatctaaatctgccagccagcctgcctgaggagaaggtttctacctttattatgatgtacagaacacactgtcagagaatactggacactgtaataagagccaactttgatgaggttcaaagtttccttctgcacttttggcaaggaatgccgccccacatgctgcctgtgctgggctcctccacggtggtgaacattgtcggcgtgtgtgactccatcctctacaaagctatctccggggtgctgatgcccactgtgctgcaggcattacctgacagcttaactcaggtgattcgaaagtttgccaagcaactggatgagtggctaaaagtggctctccacgacctcccagaaaacttgcgaaacatcaagttcgaattgtcgagaaggttctcccaaattctgagacggcaaacatcactaaatcatctctgccaggcatctcgaacagtgatccacagtgcagacatcacgttccaaatgctggaagactggaggaacgtggacctgaacagcatcaccaagcaaaccctttacaccatggaagactctcgcgatgagcaccggaaactcatcacccaattatatcaggagtttgaccatctcttggaggagcagtctcccatcgagtcctacattgagtggctggataccatggttgaccgctgtgttgtgaaggtggctgccaagagacaagggtccttgaagaaagtggcccagcagttcctcttgatgtggtcctgtttcggcacaagggtgatccgggacatgaccttgcacagcgcccccagcttcgggtcttttcacctaattcacttaatgtttgatgactacgtgctctacctgttagaatctctgcactgtcaggagcgggccaatgagctcatgcgagccatgaagggagaaggaagcactgcagaagtccgagaagagatcatcttgacagaggctgccgcaccaaccccttcaccagtgccatcgttttctccagcaaaatctgccacatctgtggaagtgccacctccctcttcccctgttagcaatccttcccctgagtacactggcctcagcactacaggagcaatgcagtcttacacgtggtctctaacatacacagtgacgacggctgctgggtccccagctgagaactcccaacagctgccctgtatgaggaacactcatgtgccttcttcctccgtcacacacaggataccagtttatccccacagagaggaacatggatacacgggaagctataactatgggagctatggcaaccagcatcctcaccccatgcagagccagtatccggccctccctcatgacacagctatctctgggccactccactatgccccttaccacaggagctctgcacagtacccttttaatagccccacttcccggatggaaccttgtttgatgagcagtactcccagactgcatcctaccccagtcactccccgctggccagaggtgccctcagccaacacgtgctacacaagcccgtctgtgcattctgcgaggtacggaaactctagtgacatgtatacacctctgacaacgcgcaggaattctgaatatgagcacatgcaacactttcctggctttgcttacatcaacggagaggcctctacaggatgggctaaatgactgctatcataggcatccatatttaatattaataataataattaataataataataaacccaacacccatcccccagaagactttatctctatacattgtaactcatgggctattcctaagtgcccattttcctaatgaacatgaggatgggatcaatgtgggatgaataaactttagttcagaaacaggacttactaaaagtcagtgggactgggtttctgtagccaagccagacttgactgtttctgtagagcactatctcgggcaggccattctgtgccttttccctctgttccatgactttgctttgtgttggcaaccacttctagtaagctactgattttcctgttgacaaaatctctttagtcttgaaggatggatactggagacagaatctggtttgtgttcttggatgggcacataatttaccaagagcattcaccttgccatctgtcttgtcattgtactgtacaaggaacagccctcagacgtgttctgcacatcccttcttcctggtggtaccatccctatttcctggagcaccagggctaaatggggagctatctggaaactctagattttctgtcatacccacatctgtcacagtacctgcattgtcttggaatgtaagcactgtcttgagggaaggaagaggtctgttctgtattgccttaagttgattgaggtttgtaggagactggttcttctacatacaaggatttgtcttaagtttgcacaatggctagtgtcagcaaaaggcaggagagggtttttgttttttttttaagttctatgagaatgtggatttatggcattgagtatcacactcagctctgctgtgttaactttgtgaaactggatggaacaaactttaacttaccaagcaccaagtgtgaaagtgactttcacggttccttcataaaactataataatatccgacactttgatagaaaaaaattcaaagctgtgcctttgagcctatactatactgtgtatgtgtggaaataaaaatgtattgtacttttggagaattttttgtaggcatttttctgtcagatttgtagtaatttgtgaggtttgttagagattaatataggttttctttctgtattataaaatgcaccaagcaattatggtggacctattaccctatgggtaagaaataaatggaaatatgacatcggatgtttcagcaactgttctgtaaataaaatctttgatcacaccactcagtgtgataattgtgtctacagctaaaatggaaatagttttatctgtacagttgtgcaagatatgaatggtttcacactcaaataaaaaatattgaaacg

SEQ ID NO: 174941 - DNA, 1228 bp, Homo sapiens
  Payload ID: 14347
  Gene Symbol: RFX4
  Gene Name: regulatory factor X, 4 (influences HLA class II expression)
  ENST ID: ENST00000536722
  CDS Start-End: 112-855
accccctggagaggccacagctgctggcttcctgggcttctccaaactcctgtgtgtcgccactgccaccggcagggagccaggagagagacagaaaggggctgagacagaatgatcaaaaggagagcccaccctggtgcgggaggcgacaggaccaggcctcgacggcgccgttccactgagagctggattgaaagatgtctcaacgaaagtgaaaacaaacgttattccagccacacatctctggggaatgtttctaatgatgaaaatgaggaaaaagaaaataatagagcatccaagccccactccactcctgctactctgcaatggctggaggagaactatgagattgcagagggggtctgcatccctcgcagtgccctctatatgcattacctggatttctgcgagaagaatgatacccaacctgtcaatgctgccagctttggaaagatcataaggcagcagtttcctcagttaaccaccagaagactcgggacccgaggacagtcaaagtaccattactatggcattgcagtgaaagaaagctcccaatattatgatgtgatgtattccaagaaaggagctgcctgggtgagtgagacgggcaagaaagaagtgagcaaacagacagtggcatattcaccccggtccaaactcggaacactgctgccagaatttcccaatgtcaaagatctaaatctgccagccagcctgcctgaggagaaggtttctacctttattatgatgtacagaacacactgtcagagaatactggacactgtaataagagccaactttgatgaggaatgccgccccacatgctgcctgtgctgggctcctccacggtggtgaacattgtcggcgtgtgtgactccatcctctacaaagctatctccggggtgctgatgcccactgtgctgcaggcattacctgacagcttaactcaggtgattcgaaagtttgccaagcaactggatgagtggctaaaagtggctctccacgacctcccagaaaacttgcgaaacatcaagttcgaattgtcgagaaggttctcccaaattctgagacggcaaacatcactaaatcatctctgccaggcatctcgaacagtgatccacagtgcagacatcacgttccaaatgctggaagactggaggaacgtggacctgaacagcatcaccaagcaaaccctttacaccatggaagactctcgcgatgagcaccg

SEQ ID NO: 174942 - DNA, 660 bp, Homo sapiens
  Payload ID: 14347
  Gene Symbol: RFX4
  Gene Name: regulatory factor X, 4 (influences HLA class II expression)
  ENST ID: ENST00000546882
  CDS Start-End: 289-522
cggctggattactgagtgtccccttgctcgctcgctttttctctctcccccttctccgagctcgctcccttctctccctctctctcctcttttcttctttctcttttctttcctcttctttttcttttcttttcctttcctcctttatccttgtgccccctcactttctgcgtctctctctctccccttctccctccctccctcccttcctccctgggcatctctagcacaggggatccccaaacatcaggacttttggggggcgcctgtgctgtccatgggaagagcatgcattgtgggttactggaggaacccgacatggattccacagatgaggaaaaagaaaataatagagcatccaagccccactccactcctgctactctgcaatggctggaggagaactatgagattgcagagggggtctgcatccctcgcagtgccctctatatgcattacctggatttctgcgagaagaatgatacccaacctgtcaatgctgccagctttggaaagcaataaatgagagttcctgttgctctacatcctcaccagcatttggtgttgtcagtgttccaggttttggccattctaatagatcataaggcagcagtttcctcagttaaccaccagaagactcgggacccgaggacagtcaaa

SEQ ID NO: 174943 - DNA, 473 bp, Homo sapiens
  Payload ID: 14347
  Gene Symbol: RFX4
  Gene Name: regulatory factor X, 4 (influences HLA class II expression)
  ENST ID: ENST00000549040
  CDS Start-End: 297-473
aaagatgcgctggctcgcggcgagctcgaggtgccacttgcagaaactttgccagccgaccgccccctcccggacccaggtcctcctaggagagctggattgaaagatgtctcaacgaaagtgaaaacaaacgttattccagccacacatctctggggaatgtttctaatgatgaaaatgaggaaaaagaaaataatagagcatccaagccccactccactcctgctactctgcaatggctggaggagaactatgagattgcagagggggtctgcatccctcgcagtgccctctatatgcattacctggatttctgcgagaagaatgatacccaacctgtcaatgctgccagctttggaaagatcataaggcagcagtttcctcagttaaccaccagaagactcgggacccgaggacagtcaaagtaccattactatggcattgcagtgaaagaaagctcccaatattatgat

SEQ ID NO: 174944 - DNA, 798 bp, Homo sapiens
  Payload ID: 14347
  Gene Symbol: RFX4
  Gene Name: regulatory factor X, 4 (influences HLA class II expression)
  ENST ID: ENST00000551640
  CDS Start-End: 30-798
tgccactagatgtgactgtgtccctccggatgacctcagctacagatggagaaaggctggaggagaactatgagattgcagagggggtctgcatccctcgcagtgccctctatatgcattacctggatttctgcgagaagaatgatacccaacctgtcaatgctgccagctttggaaagatcataaggcagcagtttcctcagttaaccaccagaagactcgggacccgaggacagtcaaagtaccattactatggcattgcagtgaaagaaagctcccaatattatgatgtgatgtattccaagaaaggagctgcctgggtgagtgagacgggcaagaaagaagtgagcaaacagacagtggcatattcaccccggtccaaactcggaacactgctgccagaatttcccaatgtcaaagatctaaatctgccagccagcctgcctgaggagaaggtttctacctttattatgatgtacagaacacactgtcagagaatactggacactgtaataagagccaactttgatgaggttcaaagtttccttctgcacttttggcaaggaatgccgccccacatgctgcctgtgctgggctcctccacggtggtgaacattgtcggcgtgtgtgactccatcctctacaaagctatctccggggtgctgatgcccactgtgctgcaggcattacctgacagcttaactcaggtgattcgaaagtttgccaagcaactggatgagtggctaaaagtggctctccacgacctcccagaaaacttgcgaaacatcaagttcgaat

SEQ ID NO: 174945 - DNA, 594 bp, Homo sapiens
  Payload ID: 14347
  Gene Symbol: RFX4
  Gene Name: regulatory factor X, 4 (influences HLA class II expression)
  ENST ID: ENST00000552917
  CDS Start-End: 7-126
ggcaaaatgaactgggctgccttcggagggtctgaattcttcatcccagaaggcattcagatagattcgagatgcccactaagcagaaatatcacggaatgtgaaagaaagctcccaatattatgatgtgatgtattccaagaaaggagctgcctgggtgagtgagacgggcaagaaagaagtgagcaaacagacagtggcatattcaccccggtccaaactcggaacactgctgccagaatttcccaatgtcaaagatctaaatctgccagccagcctgcctgaggagaaggtttctacctttattatgatgtacagaacacactgtcagagaatactggacactgtaataagagccaactttgatgaggttcaaagtttccttctgcacttttggcaaggaatgccgccccacatgctgcctgtgctgggctcctccacggtggtgaacattgtcggcgtgtgtgactccatcctctacaaagctatctccggggtgctgatgcccactgtgctgcaggcattacctgacagcttaactcaggtgattcgaaagtttgccaagcaactggatgagtggctaaaagtggctct

SEQ ID NO: 174946 - DNA, 1053 bp, Homo sapiens
  Payload ID: 14347
  Gene Symbol: RFX4
  Gene Name: regulatory factor X, 4 (influences HLA class II expression)
  ENST ID: ENST00000539967
  CDS Start-End: 618-1053
gttattatatcattccgaaaggactggaacaaccgactcacagcaagtgctggggcgaagtaggaaacgtccaggataagagaggccggcgagcggggccaccgtcccttactcttaaaaggaaaatccccgcgaagtgcctcgggcccgggagaacagttttgcaggggccagggctctagtggcctgctttggggccacttcagcatgacctgcggaaacgcgcccctttgttccgcacactgagccaagagctggattgaaagatgtctcaacgaaagtgaaaacaaacgttattccagccacacatctctggggaatgtttctaatgatgaaaatgaggaaaaagaaaataatagagcatccaagccccactccactcctgctactctgcaatggctggaggagaactatgagattgcagagggggtctgcatccctcgcagtgccctctatatgcattacctggatttctgcgagaagaatgatacccaacctgtcaatgctgccagctttggaaagatcataaggcagcagtttcctcagttaaccaccagaagactcgggacccgaggacagtcaaagttcaaagtttccttctgcacttttggcaaggaatgccgccccacatgctgcctgtgctgggctcctccacggtggtgaacattgtcggcgtgtgtgactccatcctctacaaagctatctccggggtgctgatgcccactgtgctgcaggcattacctgacagcttaactcaggtgattcgaaagtttgccaagcaactggatgagtggctaaaagtggctctccacgacctcccagaaaacttgcgaaacatcaagttcgaattgtcgagaaggttctcccaaattctgagacggcaaacatcactaaatcatctctgccaggcatctcgaacagtgatccacagtgcagacatcacgttccaaatgctggaagactggaggaacgtggacctgaacagcatcaccaagcaaaccctttacaccatggaagactctcgcgatgagcaccggaaactcatcacccaat

SEQ ID NO: 174947 - DNA, 3576 bp, Homo sapiens
  Payload ID: 14348
  Gene Symbol: RFX5
  Gene Name: regulatory factor X, 5 (influences HLA class II expression)
  Uniprot ID: P48382
  ENST ID: ENST00000290524
  CDS Start-End: 180-2030
ccaggaccttggggctgggctggagtgaaggtggctacgagttttccagatttaggagacttcagaaaggtggggcagatagaatggagatggcaaagatctctttgggcatatatgggcctggcgaagtaatggaataatttctaattttcggagaaggcaagtgccctcatgccgggatggcagaagatgagcctgatgctaagagccccaagactgggggaagggcccccccaggtggtgctgaggctggggaacctaccacccttcttcagaggctccgaggtaccatttccaaggccgtgcagaacaaagtagaggggatcctgcaagatgtacagaaattttctgacaatgacaagctgtatctctaccttcagctcccctcaggacccaccactggagacaaaagctcagagccaagtacactgagcaatgaggagtacatgtatgcctataggtggatccgcaaccacctggaagagcacactgacacctgtctgccaaagcaaagtgtttatgatgcctatcggaagtactgtgagagtcttgcctgttgccgcccactcagcacagccaactttggcaagatcatcagagagatcttccctgacatcaaagctcgaaggcttggtggccggggccagtccaaatattgctacagtggcataaggaggaagaccttggtgtctatgccacccctgcctggacttgacctaaagggttctgagagtccagaaatgggcccagaagtaaccccagcacctcgagatgaactggtggaggcagcgtgtgccctgacctgtgactgggcagagcggatcctgaaacggtccttcagttccatcgttgaggtcgcccgcttcctgctacagcagcatctcatctctgcccgatctgcacatgcccatgtgcttaaggccatggggctcgctgaagaggacgaacatgcacctcgggaacggtcatctaaaccaaagaatggtttagagaacccagagggtggagcccacaagaagccagagagactggcccagcctcctaaggatctggaagcccgaactggggccggtcctctcgcacgtggagagcggaagaagagtgtagttgagagctcggccccaggagccaataacctgcaggttaatgccctagtggctcggctgcctctgctccttccccgggcccctcgctcactaattccgccaatcccagtctctccacctattctggcccccaggctttcttcaggtgccctgaaagtggctacactgcctctgtctagtagggccggggcacccccagcagctgtgcccatcattaacatgatcttaccaactgttcctgctttgcctggacctggacctgggcctgggcgagctccacctgggggactcactcagccccggggcacagagaacagagaggtaggcataggtggtgaccaaggaccacatgacaagggtgtcaagaggacagctgaagtacctgtgagtgaggccagtgggcaggctccaccagctaaagcagcaaagcaggatatagaggatacagcaagtgatgccaaaaggaaacgggggcgccctcgaaaaaagtcaggtggaagtggggaaaggaattctacccctctcaagtcagcagctgccatggaatctgcccagtcctcaaggttaccatgggagacatggggctcaggaggggaaggcaactcagctggaggggcagagaggccagggccaatgggagaggctgaaaagggggcagtacttgcccagggtcagggagatggtactgtttccaaaggaggaaggggccccggttcccagcataccaaagaagcagaagataaaattcccttggtcccctcaaaagtgagtgtcatcaagggcagcagaagccaaaaggaggcttttcctttggcaaagggagaggtagacactgcaccacagggtaataaagacttaaaggagcatgtgcttcaaagttccttatcccaggagcataaagacccaaaagcaacacccccatgatacaggtctgtggggaagagtgtttatatccctacgttaactttgcctagtagaggcccttctttgcacttgcttctcatttggctattcttttcctaaggaagtccattctcctctgtacagacagctgagtcacccagtctacttagtacctggttgctgcctctgaccttttcagcttgataccctgggctttagtgtaaccaataaatctgtagtgaccttacctgtattccctgtgctatcctgtgggaaggtaggaatgggctaagtatgatgaatatataggttagggatcttttggttttaaatcacagaaaacctaattcaaactggcttaaaataaaaaggatttattggttcatgtaactagaaagtccataggtagtgctggctccaggtgaagacttgacccagtagttcagtatgtctctaaataccggactgacttttttctcactgttgcatcttctgtaggaccatttaagtctgggccacttaatggctgccagcattcctaagattacacttttccccatttatgtccaatcagaaaaagaaggcatctttgtaccagaaatctcagcaaaagccctaatattcacactgattaggcctgggtcacatgtccaccctgaccaatcactgtggccaggaggatgatacatgctaatttgcttattctatatcatggacaacacctttggggaaaagggtgggggtcagcctccccaaaatcacatggattccccaagtggaaactaggagcagggagttgcttgggtggccgctaacaccaggctactcttattttagcttgctaagttgagatcagctagacctgctttcttttctcctcagtcttgcatttccctcaatacaagctgtagcctctttcctcgtttctagtctcagaaggaaggagagggaagccattctcctctagggactcttcagtctcatttagatgatagtccctttttttctacctccatattagagatggagctccttccttttcctgtttcttaatttttgtcttctcattcctgcttccctctcaccctattgccagttccaccaactagagtgaaagacttcctagccatttcattaaatctattctgtatccaccaggtggcagcatcttgtcatacgtgtcaggacttaggactgcggggtttaggttagatgtcacggaaaaagctagttctgtggtcaggcggcaccaatgagaaaggaatgcagaccctccagatgtatccttgggaaaagcagtaaaccaactaatatttattgaagacctactttgtcctctacatagggtagcttctgtcagggaatcttggttcttcccaagaaacactgattttctttcagggagacttcatgtgttcatttatttccaccacagcagattttaagaaattataatatgtaatatttgatatctataaagagtatatctaacgtgaataaattatgaagcatactaatgagtacctatgacccataacacatatacattaaaacattttaaatacca

SEQ ID NO: 174948 - DNA, 2459 bp, Homo sapiens
  Payload ID: 14348
  Gene Symbol: RFX5
  Gene Name: regulatory factor X, 5 (influences HLA class II expression)
  Uniprot ID: P48382
  ENST ID: ENST00000368870
  CDS Start-End: 252-2102
cgtgtatctaggcagatcgcggctgttacaaccattcagaaaaaggaaaataaagcaacgcacgagccggctgggccaggaccttggggctgggctggagtgaaggtggctacgagttttccagatttaggagacttcagaaaggtggggcagatagaatggagatggcaaagatctctttgggcatatatgggcctggcgaagtaatggaataatttctaattttcggagaaggcaaccctcatgccgggatggcagaagatgagcctgatgctaagagccccaagactgggggaagggcccccccaggtggtgctgaggctggggaacctaccacccttcttcagaggctccgaggtaccatttccaaggccgtgcagaacaaagtagaggggatcctgcaagatgtacagaaattttctgacaatgacaagctgtatctctaccttcagctcccctcaggacccaccactggagacaaaagctcagagccaagtacactgagcaatgaggagtacatgtatgcctataggtggatccgcaaccacctggaagagcacactgacacctgtctgccaaagcaaagtgtttatgatgcctatcggaagtactgtgagagtcttgcctgttgccgcccactcagcacagccaactttggcaagatcatcagagagatcttccctgacatcaaagctcgaaggcttggtggccggggccagtccaaatattgctacagtggcataaggaggaagaccttggtgtctatgccacccctgcctggacttgacctaaagggttctgagagtccagaaatgggcccagaagtaaccccagcacctcgagatgaactggtggaggcagcgtgtgccctgacctgtgactgggcagagcggatcctgaaacggtccttcagttccatcgttgaggtcgcccgcttcctgctacagcagcatctcatctctgcccgatctgcacatgcccatgtgcttaaggccatggggctcgctgaagaggacgaacatgcacctcgggaacggtcatctaaaccaaagaatggtttagagaacccagagggtggagcccacaagaagccagagagactggcccagcctcctaaggatctggaagcccgaactggggccggtcctctcgcacgtggagagcggaagaagagtgtagttgagagctcggccccaggagccaataacctgcaggttaatgccctagtggctcggctgcctctgctccttccccgggcccctcgctcactaattccgccaatcccagtctctccacctattctggcccccaggctttcttcaggtgccctgaaagtggctacactgcctctgtctagtagggccggggcacccccagcagctgtgcccatcattaacatgatcttaccaactgttcctgctttgcctggacctggacctgggcctgggcgagctccacctgggggactcactcagccccggggcacagagaacagagaggtaggcataggtggtgaccaaggaccacatgacaagggtgtcaagaggacagctgaagtacctgtgagtgaggccagtgggcaggctccaccagctaaagcagcaaagcaggatatagaggatacagcaagtgatgccaaaaggaaacgggggcgccctcgaaaaaagtcaggtggaagtggggaaaggaattctacccctctcaagtcagcagctgccatggaatctgcccagtcctcaaggttaccatgggagacatggggctcaggaggggaaggcaactcagctggaggggcagagaggccagggccaatgggagaggctgaaaagggggcagtacttgcccagggtcagggagatggtactgtttccaaaggaggaaggggccccggttcccagcataccaaagaagcagaagataaaattcccttggtcccctcaaaagtgagtgtcatcaagggcagcagaagccaaaaggaggcttttcctttggcaaagggagaggtagacactgcaccacagggtaataaagacttaaaggagcatgtgcttcaaagttccttatcccaggagcataaagacccaaaagcaacacccccatgatacaggtctgtggggaagagtgtttatatccctacgttaactttgcctagtagaggcccttctttgcacttgcttctcatttggctattcttttcctaaggaagtccattctcctctgtacagacagctgagtcacccagtctacttagtacctggttgctgcctctgaccttttcagcttgataccctgggctttagtgtaaccaataaatctgtagtgaccttacctgtattccctgtgctatcctgtgggaaggtaggaatgggctaagtatgatgaatatataggttagggatcttttggttttaaatcacagaaaacctaattcaaactggcttaaaataaaaaggatttat

SEQ ID NO: 174949 - DNA, 2056 bp, Homo sapiens
  Payload ID: 14348
  Gene Symbol: RFX5
  Gene Name: regulatory factor X, 5 (influences HLA class II expression)
  ENST ID: ENST00000392746
  CDS Start-End: 267-2056
ttttttttccaagcctagaagggcagaatatgttcgtatcctttctgacctcccaggcatatgcaatgttttccagatttaggagacttcagaaaggtggggcagatagaatggagatggcaaagatctctttgggcatatatgggcctggcgaagtaatggaataatttctaattttcggagaaggcaagtggtgagaaaaagaccaccggggaaattcggaggctttgtttctgtttctctgcctttctggccctcatgccgggatggcagaagatgagcctgatgctaagagccccaagactgggggaagggcccccccaggtggtgctgaggctggggaacctaccacccttcttcagaggctccgaggtaccatttccaaggccgtgcagaacaaagtagaggggatcctgcaagatgtacagaaattttctgacaatgacaagctgtatctctaccttcagctcccctcaggacccaccactggagacaaaagctcagagccaagtacactgagcaatgaggagtacatgtatgcctataggtggatccgcaaccacctggaagagcacactgacacctgtctgccaaagcaaagtgtttatgatgcctatcggaagtactgtgagagtcttgcctgttgccgcccactcagcacagccaactttggcaagatcatcagagagatcttccctgacatcaaagctcgaaggcttggtggccggggccagtccaaatattgctacagtggcataaggaggaagaccttggtgtctatgccacccctgcctggacttgacctaaagggttctgagagtccagaaatgggcccagaagtaaccccagcacctcgagatgaactggtggaggcagcgtgtgccctgacctgtgactgggcagagcggatcctgaaacggtccttcagttccatcgttgaggtcgcccgcttcctgctacagcagcatctcatctctgcccgatctgcacatgcccatgtgcttaaggccatggggctcgctgaagaggacgaacatgcacctcgggaacggtcatctaaaccaaagaatggtttagagaacccagagggtggagcccacaagaagccagagagactggcccagcctcctaaggatctggaagcccgaactggggccggtcctctcgcacgtggagagcggaagaagagtgtagttgagagctcggccccaggagccaataacctgcaggttaatgccctagtggctcggctgcctctgctccttccccgggcccctcgctcactaattccgccaatcccagtctctccacctattctggcccccaggctttcttcaggtgccctgaaagtggctacactgcctctgtctagtagggccggggcacccccagcagctgtgcccatcattaacatgatcttaccaactgttcctgctttgcctggacctggacctgggcctgggcgagctccacctgggggactcactcagccccggggcacagagaacagagaggtaggcataggtggtgaccaaggaccacatgacaagggtgtcaagaggacagctgaagtacctgtgagtgaggccagtgggcaggctccaccagctaaagcagcaaagcaggatatagaggatacagcaagtgatgccaaaaggaaacgggggcgccctcgaaaaaagtcaggtggaagtggggaaaggaattctacccctctcaagtcagcagctgccatggaatctgcccagtcctcaaggttaccatgggagacatggggctcaggaggggaaggcaactcagctggaggggcagagaggccagggccaatgggagaggctgaaaagggggcagtacttgcccagggtcagggagatggtactgtttccaaaggaggaaggggccccggttcccagcataccaaagaagcagaagataaaattcccttggtcccctcaaaagtgagtgtcatcaagggcagcagaagccaaaaggaggcttttcctttggcaaagggagaggtagacactgcaccacagggtaataaagacttaaagga

SEQ ID NO: 174950 - DNA, 585 bp, Homo sapiens
  Payload ID: 14348
  Gene Symbol: RFX5
  Gene Name: regulatory factor X, 5 (influences HLA class II expression)
  ENST ID: ENST00000430227
  CDS Start-End: 217-585
agtgaaggtggctacgaggtagtttctctttctcccttacctttattgttgcttgtgttggaaggcgactgttcagagttttccagatttaggagacttcagaaaggtggggcagatagaatggagatggcaaagatctctttgggcatatatgggcctggcgaagtaatggaataatttctaattttcggagaaggcaagtgccctcatgccgggatggcagaagatgagcctgatgctaagagccccaagactgggggaagggcccccccaggtggtgctgaggctggggaacctaccacccttcttcagaggctccgaggtaccatttccaaggccgtgcagaacaaagtagaggggatcctgcaagatgtacagaaattttctgacaatgacaagctgtatctctaccttcagctcccctcaggacccaccactggagacaaaagctcagagccaagtacactgagcaatgaggagtacatgtatgcctataggtggatccgcaaccacctggaagagcacactgacacctgtctgccaaagcaaagtgtttatgatgcctatcggaagtactgtgagagt

SEQ ID NO: 174951 - DNA, 2355 bp, Homo sapiens
  Payload ID: 14348
  Gene Symbol: RFX5
  Gene Name: regulatory factor X, 5 (influences HLA class II expression)
  Uniprot ID: P48382
  ENST ID: ENST00000452671
  CDS Start-End: 279-2129
gcagcagtgaccaatgacagagcaggccgcccgtgtatctaggcagatcgcggctgttacaaccattcagaaaaaggaaaataaagcaacgcacgagccggctgggccaggaccttggggctgggctggagtgaaggtggctacgagttttccagatttaggagacttcagaaaggtggggcagatagaatggagatggcaaagatctctttgggcatatatgggcctggcgaagtaatggaataatttctaattttcggagaagccctcatgccgggatggcagaagatgagcctgatgctaagagccccaagactgggggaagggcccccccaggtggtgctgaggctggggaacctaccacccttcttcagaggctccgaggtaccatttccaaggccgtgcagaacaaagtagaggggatcctgcaagatgtacagaaattttctgacaatgacaagctgtatctctaccttcagctcccctcaggacccaccactggagacaaaagctcagagccaagtacactgagcaatgaggagtacatgtatgcctataggtggatccgcaaccacctggaagagcacactgacacctgtctgccaaagcaaagtgtttatgatgcctatcggaagtactgtgagagtcttgcctgttgccgcccactcagcacagccaactttggcaagatcatcagagagatcttccctgacatcaaagctcgaaggcttggtggccggggccagtccaaatattgctacagtggcataaggaggaagaccttggtgtctatgccacccctgcctggacttgacctaaagggttctgagagtccagaaatgggcccagaagtaaccccagcacctcgagatgaactggtggaggcagcgtgtgccctgacctgtgactgggcagagcggatcctgaaacggtccttcagttccatcgttgaggtcgcccgcttcctgctacagcagcatctcatctctgcccgatctgcacatgcccatgtgcttaaggccatggggctcgctgaagaggacgaacatgcacctcgggaacggtcatctaaaccaaagaatggtttagagaacccagagggtggagcccacaagaagccagagagactggcccagcctcctaaggatctggaagcccgaactggggccggtcctctcgcacgtggagagcggaagaagagtgtagttgagagctcggccccaggagccaataacctgcaggttaatgccctagtggctcggctgcctctgctccttccccgggcccctcgctcactaattccgccaatcccagtctctccacctattctggcccccaggctttcttcaggtgccctgaaagtggctacactgcctctgtctagtagggccggggcacccccagcagctgtgcccatcattaacatgatcttaccaactgttcctgctttgcctggacctggacctgggcctgggcgagctccacctgggggactcactcagccccggggcacagagaacagagaggtaggcataggtggtgaccaaggaccacatgacaagggtgtcaagaggacagctgaagtacctgtgagtgaggccagtgggcaggctccaccagctaaagcagcaaagcaggatatagaggatacagcaagtgatgccaaaaggaaacgggggcgccctcgaaaaaagtcaggtggaagtggggaaaggaattctacccctctcaagtcagcagctgccatggaatctgcccagtcctcaaggttaccatgggagacatggggctcaggaggggaaggcaactcagctggaggggcagagaggccagggccaatgggagaggctgaaaagggggcagtacttgcccagggtcagggagatggtactgtttccaaaggaggaaggggccccggttcccagcataccaaagaagcagaagataaaattcccttggtcccctcaaaagtgagtgtcatcaagggcagcagaagccaaaaggaggcttttcctttggcaaagggagaggtagacactgcaccacagggtaataaagacttaaaggagcatgtgcttcaaagttccttatcccaggagcataaagacccaaaagcaacacccccatgatacaggtctgtggggaagagtgtttatatccctacgttaactttgcctagtagaggcccttctttgcacttgcttctcatttggctattcttttcctaaggaagtccattctcctctgtacagacagctgagtcacccagtctacttagtacctggttgctgcctctgaccttttcagcttgataccctgggctttagtgtaaccaataaatctgtagtgacctta

SEQ ID NO: 174952 - DNA, 545 bp, Homo sapiens
  Payload ID: 14348
  Gene Symbol: RFX5
  Gene Name: regulatory factor X, 5 (influences HLA class II expression)
  ENST ID: ENST00000436271
  CDS Start-End: 257-545
agcagcgggggaagtcgtggcgagattaagtaatgagaacttgggcccagttttttttccaagcctagaagggcagaatatgttcgtatcctttctgacctcccaggcatatgcaatgttttccagatttaggagacttcagaaaggtggggcagatagaatggagatggcaaagatctctttgggcatatatgggcctggcgaagtaatggaataatttctaattttcggagaaggcaagtgccctcatgccgggatggcagaagatgagcctgatgctaagagccccaagactgggggaagggcccccccaggtggtgctgaggctggggaacctaccacccttcttcagaggctccgaggtaccatttccaaggccgtgcagaacaaagtagaggggatcctgcaagatgtacagaaattttctgacaatgacaagctgtatctctaccttcagctcccctcaggacccaccactggagacaaaagctcagagccaagtacactgagcaatgaggagtacatgtatgcctataggtggatcc

SEQ ID NO: 174953 - DNA, 765 bp, Homo sapiens
  Payload ID: 14348
  Gene Symbol: RFX5
  Gene Name: regulatory factor X, 5 (influences HLA class II expression)
  ENST ID: ENST00000436637
  CDS Start-End: 1-708
ccaaagcaaagtgtttatgatgcctatcggaagtactgtgagagtcttgcctgttgccgcccactcagcacagccaactttggcaagatcatcagagagatcttccctgacatcaaagctcgaaggcttggtggccggggccagtccaaatattgctacagtggcataaggaggaagaccttggtgtctatgccacccctgcctggacttgacctaaagggttctgagagtccagaaatgggcccagaagtaaccccagcacctcgagatgaactggtggaggcagcgtgtgccctgacctgtgactgggcagagcggatcctgaaacggtccttcagttccatcgttgaggtcgcccgcttcctgctacagcagcatctcatctctgcccgatctgcacatgcccatgtgcttaaggccatggggctcgctgaagaggacgaacatgcacctcgggaacggtcatctaaaccaaagaatggtttagagaacccagagggtggagcccacaagaagccagagagactggcccagcctcctaaggatctggaagcccgaactggggccggtcctctcgcacgtggagagcggaagaagagtgtagttgagagctcggccccaggagccaataacctgcaggaagtccattctcctctgtacagacagctgagtcacccagtctacttagtacctggttgctgcctctgaccttttcagcttgataccctgggctttagtgtaaccaataaatctgtagtgacctta

SEQ ID NO: 174954 - DNA, 562 bp, Homo sapiens
  Payload ID: 14348
  Gene Symbol: RFX5
  Gene Name: regulatory factor X, 5 (influences HLA class II expression)
  ENST ID: ENST00000412774
  CDS Start-End: 210-562
agtgaaggtggctacgaggtagtttctctttctcccttacctttattgttgcttgtgttggaaggcgactgttcagagttttccagatttaggagacttcagaaaggtggggcagatagaatggagatggcaaagatctctttgggcatatatgggcctggcgaagtaatggaataatttctaattttcggagaagccctcatgccgggatggcagaagatgagcctgatgctaagagccccaagactgggggaagggcccccccaggtggtgctgaggctggggaacctaccacccttcttcagaggctccgaggtaccatttccaaggccgtgcagaacaaagtagaggggatcctgcaagatgtacagaaattttctgacaatgacaagctgtatctctaccttcagctcccctcaggacccaccactggagacaaaagctcagagccaagtacactgagcaatgaggagtacatgtatgcctataggtggatccgcaaccacctggaagagcacactgacacctgtctgccaaagcaaagtgtttatgatgcctatcg

SEQ ID NO: 174955 - DNA, 903 bp, Homo sapiens
  Payload ID: 14348
  Gene Symbol: RFX5
  Gene Name: regulatory factor X, 5 (influences HLA class II expression)
  ENST ID: ENST00000450506
  CDS Start-End: 351-903
aaccggggattgaatggagggggaagggaaggaggtgggggcgcgcctcaggatgggctgttgtgggagatgacgtaggggccggcgacgtggggagggggagcagcgggggaagtcgtggcgagattaagtaatgagaacttgggcccagttttttttccaagcctagaagggcagaatatgttcgtatcctttctgacctcccaggcatatgcaatgttttccagatttaggagacttcagaaaggtggggcagatagaatggagatggcaaagatctctttgggcatatatgggcctggcgaagtaatggaataatttctaattttcggagaagccctcatgccgggatggcagaagatgagcctgatgctaagagccccaagactgggggaagggcccccccaggtggtgctgaggctggggaacctaccacccttcttcagaggctccgaggtaccatttccaaggccgtgcagaacaaagtagaggggatcctgcaagatgtacagaaattttctgacaatgacaagctgtatctctaccttcagctcccctcaggacccaccactggagacaaaagctcagagccaagtacactgagcaatgaggagtacatgtatgcctataggtggatccgcaaccacctggaagagcacactgacacctgtctgccaaagcaaagtgtttatgatgcctatcggaagtactgtgagagtcttgcctgttgccgcccactcagcacagccaactttggcaagatcatcagagagatcttccctgacatcaaagctcgaaggcttggtggccggggccagtccaaatattgctacagtggcataaggaggaagaccttggtgtctatgccacccctgcctggacttgacctaaagggttctgaga

SEQ ID NO: 174956 - DNA, 902 bp, Homo sapiens
  Payload ID: 14348
  Gene Symbol: RFX5
  Gene Name: regulatory factor X, 5 (influences HLA class II expression)
  ENST ID: ENST00000422595
  CDS Start-End: 214-902
agcgcatgagttccgctaccccgccccacccccgctccactttgcagaaaccggggattgaatggagggggaagggaaggagttttccagatttaggagacttcagaaaggtggggcagatagaatggagatggcaaagatctctttgggcatatatgggcctggcgaagtaatggaataatttctaattttcggagaagccctcatgccgggatggcagaagatgagcctgatgctaagagccccaagactgggggaagggcccccccaggtggtgctgaggctggggaacctaccacccttcttcagaggctccgaggtaccatttccaaggccgtgcagaacaaagtagaggggatcctgcaagatgtacagaaattttctgacaatgacaagctgtatctctaccttcagctcccctcaggacccaccactggagacaaaagctcagagccaagtacactgagcaatgaggagtacatgtatgcctataggtggatccgcaaccacctggaagagcacactgacacctgtctgccaaagcaaagtgtttatgatgcctatcggaagtactgtgagagtcttgcctgttgccgcccactcagcacagccaactttggcaagatcatcagagagatcttccctgacatcaaagctcgaaggcttggtggccggggccagtccaaatattgctacagtggcataaggaggaagaccttggtgtctatgccacccctgcctggacttgacctaaagggttctgagagtccagaaatgggcccagaagtaaccccagcacctcgagatgaactggtggaggcagcgtgtgccctgacctgtgactgggcagagcggatcctgaaacggtccttcagttccatcgttgaggtcgcccgcttcct

SEQ ID NO: 174957 - DNA, 558 bp, Homo sapiens
  Payload ID: 14348
  Gene Symbol: RFX5
  Gene Name: regulatory factor X, 5 (influences HLA class II expression)
  ENST ID: ENST00000421986
  CDS Start-End: 188-322
tttctctttctcccttacctttattgttgcttgtgttggaaggcgactgttcagagttttccagatttaggagacttcagaaaggtggggcagatagaatggagatggcaaagatctctttgggcatatatgggcctggcgaagtaatggaataatttctaattttcggagaagccctcatgccgggatggcagaagatgagcctgatgctaagagccccaagactgggggaagggcccccccaggtggtgctgaggctggggaacctaccacccttcttcagaggctccgaggtaccatttcgccgtgcagaacaaagtagaggggatcctgcaagatgtacagaaattttctgacaatgacaagctgtatctctaccttcagctcccctcaggacccaccactggagacaaaagctcagagccaagtacactgagcaatgaggagtacatgtatgcctataggtggatccgcaaccacctggaagagcacactgacacctgtctgccaaagcaaagtgtttatgatgcctatcggaagtactgtgagagtcttgcc

SEQ ID NO: 174958 - DNA, 567 bp, Homo sapiens
  Payload ID: 14348
  Gene Symbol: RFX5
  Gene Name: regulatory factor X, 5 (influences HLA class II expression)
  ENST ID: ENST00000452456
  CDS Start-End: 213-365
aacttgggcccagttttttttccaagcctagaagggcagaatatgttcgtatcctttctgacctcccaggcatatgcaatgttttccagatttaggagacttcagaaaggtggggcagatagaatggagatggcaaagatctctttgggcatatatgggcctggcgaagtaatggaataatttctaattttcggagaagccctcatgccgggatggcagaagatgagcctgatgctaagagccccaagactgggggaagggcccccccaggtggtgctgaggctggggaacctaccacccttcttcagaggctccgaggtaccatttccaaggccgtgcagaacaaagtagaggggatcctgtagaaacggggtttcaccatgttagccaggatggtctcgatctcctgaccttgtgatcagcctgccttggccttccaaagtgctgggattgtaggcgtgagccaccgtgcccggccttgtcaaataatttctaaggtcctttttcagtctgacaccctcaagatgtacagaaattttctgacaatgacaagctgtatctctacct

SEQ ID NO: 174959 - DNA, 537 bp, Homo sapiens
  Payload ID: 14348
  Gene Symbol: RFX5
  Gene Name: regulatory factor X, 5 (influences HLA class II expression)
  ENST ID: ENST00000458484
  CDS Start-End: 42-537
ttttccagatttaggagacttcagaaagccctcatgccgggatggcagaagatgagcctgatgctaagagccccaagactgggggaagggcccccccaggtggtgctgaggctggggaacctaccacccttcttcagaggctccgaggtaccatttccaaggccgtgcagaacaaagtagaggggatcctgcaagatgtacagaaattttctgacaatgacaagctgtatctctaccttcagctcccctcaggacccaccactggagacaaaagctcagagccaagtacactgagcaatgaggagtacatgtatgcctataggtggatccgcaaccacctggaagagcacactgacacctgtctgccaaagcaaagtgtttatgatgcctatcggaagtactgtgagagtcttgcctgttgccgcccactcagcacagccaactttggcaagatcatcagagagatcttccctgacatcaaagctcgaaggcttggtggccggggccagtccaaatattgctacagtggcataagga

SEQ ID NO: 174960 - DNA, 596 bp, Homo sapiens
  Payload ID: 14348
  Gene Symbol: RFX5
  Gene Name: regulatory factor X, 5 (influences HLA class II expression)
  ENST ID: ENST00000444392
  CDS Start-End: 222-374
attcagaaaaaggaaaataaagcaacgcacgagccggctgggccaggaccttggggctgggctggagtgaaggtggctacgagttttccagatttaggagacttcagaaaggtggggcagatagaatggagatggcaaagatctctttgggcatatatgggcctggcgaagtaatggaataatttctaattttcggagaaggcaagtgccctcatgccgggatggcagaagatgagcctgatgctaagagccccaagactgggggaagggcccccccaggtggtgctgaggctggggaacctaccacccttcttcagaggctccgaggtaccatttccaaggccgtgcagaacaaagtagaggggatcctgtagaaacggggtttcaccatgttagccaggatggtctcgatctcctgaccttgtgatcagcctgccttggccttccaaagtgctgggattgtaggcgtgagccaccgtgcccggccttgtcaaataatttctaaggtcctttttcagtctgacaccctcaagatgtacagaaattttctgacaatgacaagctgtatctctaccttcagctcccctcaggaccca

SEQ ID NO: 174961 - DNA, 597 bp, Homo sapiens
  Payload ID: 14348
  Gene Symbol: RFX5
  Gene Name: regulatory factor X, 5 (influences HLA class II expression)
  ENST ID: ENST00000437327
  CDS Start-End: 281-597
ttcagaaaaaggaaaataaagcaacgcacgagccggctgggccaggaccttggggctgggctggagtgaaggtggctacgagttttccagatttaggagacttcagaaaggtggggcagatagaatggagatggcaaagatctctttgggcatatatgggcctggcgaagtaatggaataatttctaattttcggagaaggcaagtggtgagaaaaagaccaccggggaaattcggaggctttgtttctgtttctctgcctttctggccctcatgccgggatggcagaagatgagcctgatgctaagagccccaagactgggggaagggcccccccaggtggtgctgaggctggggaacctaccacccttcttcagaggctccgaggtaccatttccaaggccgtgcagaacaaagtagaggggatcctgcaagatgtacagaaattttctgacaatgacaagctgtatctctaccttcagctcccctcaggacccaccactggagacaaaagctcagagccaagtacactgagcaatgaggagtacatgtatgcctataggtggatccgcaaccacctggaagagcacactgacac

SEQ ID NO: 174962 - DNA, 583 bp, Homo sapiens
  Payload ID: 14348
  Gene Symbol: RFX5
  Gene Name: regulatory factor X, 5 (influences HLA class II expression)
  ENST ID: ENST00000435314
  CDS Start-End: 196-324
ttttccaagcctagaagggcagaatatgttcgtatcctttctgacctcccaggcatatgcaatgttttccagatttaggagacttcagaaaggtggggcagatagaatggagatggcaaagatctctttgggcatatatgggcctggcgaagtaatggaataatttctaattttcggagaagccctcatgccgggatggcagaagatgagcctgatgctaagagccccaagactgggggaagggcccccccaggtggtgctgaggctggggaacctaccacccttcttcagaggctccgagcaaggccgtgcagaacaaagtagaggggatcctgcaagatgtacagaaattttctgacaatgacaagctgtatctctaccttcagctcccctcaggacccaccactggagacaaaagctcagagccaagtacactgagcaatgaggagtacatgtatgcctataggtggatccgcaaccacctggaagagcacactgacacctgtctgccaaagcaaagtgtttatgatgcctatcgggactcttcgagcctacccatggcctccttctctgagtatcttcc

SEQ ID NO: 174963 - DNA, 3460 bp, Homo sapiens
  Payload ID: 14349
  Gene Symbol: RFX6
  Gene Name: regulatory factor X, 6
  Uniprot ID: Q8HWS3
  ENST ID: ENST00000332958
  CDS Start-End: 17-2803
tccggcggccaggaggatggccaaggtcccggagctggaagacaccttcctgcaggcgcagcctgcgccccaactgtccccggggatccaggaagactgctgtgtgcagctcctgggcaagggcttgctagtctatccggaagaaacagtgtacctggcggccgaagggcagcccgggggcgagcagggcggcggggagaaaggcgaagacccggagctgccgggggcagtgaaatcagaaatgcacttaaacaatggtaacttttcctctgaagaagaggacgccgacaaccacgacagcaaaaccaaagcagcggatcaatacctgtctcagaagaaaaccatcacgcagattgtgaaggataaaaagaagcagacacagctcacgctgcagtggcttgaagagaattacattgtatgtgaaggagtttgcttaccacggtgcattctttatgcacactacttagatttctgtaggaaagagaaattagagccagcctgtgcggccacctttggaaagacaattcgccagaagtttcccctcctaacaacaaggcggcttggaacaagaggccattcaaagtatcattactatgggattggcatcaaagagagcagtgcatattaccactccgtttattctggaaagggcttgacaaggttttctggaagcaagctaaagaatgagggtggcttcactcgtaaatattcgcttagctcaaaaactggaacacttcttccagaattccccagcgctcaacaccttgtataccaaggatgcatttctaaggacaaggttgatacgctcataatgatgtacaaaactcactgccagtgtatcctggacaatgcaattaatggaaactttgaagagatccagcattttttattacacttttggcaaggaatgcctgaccatctccttcccctgctcgaaaatcctgttatcattgatattttctgtgtttgtgactcaattctttataaggttcttacagatgtactcattcctgcaacaatgcaagaaatgcctgaaagcttattagcagacataagaaattttgctaaaaattgggaacagtgggttgtttcatccttggaaaacttgccagaagctctaactgacaagaaaatacctattgtgcgaagatttgtatcttctctgaaacgacaaacatctttcttacatcttgcccagattgccagaccagctctctttgaccagcatgtcgttaattctatggtgtctgatattgaaagggttgatttgaacagcattggctctcaagcccttcttaccatttcaggcagcacagacactgaatctggtatctacactgaacatgactctatcactgtgttccaagaactgaaggatctccttaagaagaatgccactgtggaggcttttattgaatggttggatactgtggtagaacagagagttattaagaccagcaaacaaaatggaaggtcattaaagaagagagctcaagactttctgttaaagtggagtttttttggtgctcgagtaatgcataatctcaccttgaacaatgcatccagttttggttcttttcatttgattcgaatgcttctcgatgaatacattctcctggccatggagacccagtttaataatgacaaagagcaggagttacagaatttattggacaagtatatgaagaattcagatgcgagtaaagctgctttcactgcttctccgagttcatgctttctggccaaccgtaataaagggagcatggtttccagcgacgctgtgaagaatgaaagccacgtggagacaacctatctccctctgccatccagtcaacctggaggcctaggccctgctctgcaccagttccctgctgggaacacagacaacatgccgctcacaggtcaaatggagctttcacagattgctggtcatctgatgacaccacccatttctccagccatggcaagccgaggaagtgtcattaaccaaggaccaatggcagggaggcccccaagtgtgggcccagtactgtcagctccatcacactgctccacatacccagagcccatttatcccactctccctcaagccaatcatgacttttatagcaccagctctaactaccagactgtgtttagggcacagccccactccacatcaggactctatcctcatcacaccgagcatggtcgatgcatggcttggactgaacagcagctttcaagagacttcttcagtggcagctgtgcggggtctccatataactcccggccaccgtctagctatggcccatccctgcaagcccaggattcacacaatatgcagtttttaaatacaggaagcttcaatttcttgagcaacacaggagctgccagctgccaaggagcaacactgcctcctaattcaccaaatggatactatggaagcaacataaactacccagagtctcacaggctcggatcaatggtgaatcagcacgtttctgtcatcagcagcattcgttcactgcccccctacagtgacatccacgatccacttaacattttagatgacagtggtagaaaacagaccagctcgttttacacagacacatcatctccagttgcatgtcgaactccagtcctagcttccagtttgcaaaccccaattccttcttcctcatcccaatgtatgtatggaacttccaaccagtatccagctcaagaaaccctggactcccatggaacaagcagtagagaaatggtgtcctctttaccacctatcaacactgtgttcatgggaacagcagctggaggcacttaaaccaccaatgtgggagggggtgctaaaactttaaaaaaaatctctactgtgcaaatatcattattcactcagacttccataagagtaaataaaaatgaatatgcagtggctgacattgttttaaagtcactggtactatggacaactccatagtgaatggagatacttgcagagcttgtcatgcacactaagagtttaaaatgtgagctcattattaatcatagtttcaaaattatcaaataaaaccagtgaagatctgaagatgcaaacatttcaactatgaagatttacatttcactttctaatttattaaacatctgtgtgcctttttatctttggtttcttttaaaaagtatatttaatgcctttacaatacctttaatttattaggatctcagaatcattgtttactatcccttatttgacaaaaagtcaaatgtgtatgttctacctccaacggaaatgtttacaaggtcaagacttaattcaattcagacaagaccaaagttgcttgacttcaattcctgtgcattagtgtgatgatttctgtcacatagcagcattccgattctatgtaactgaatggagatgataagtgctttcccctctttatttaaaaaagattaaaaggaataaaagaaataatgtatggaaata

SEQ ID NO: 174964 - DNA, 10426 bp, Homo sapiens
  Payload ID: 14350
  Gene Symbol: RFX7
  Gene Name: regulatory factor X, 7
  Uniprot ID: Q2KHR2
  ENST ID: ENST00000559447
  CDS Start-End: 273-4364
agccgccaccacagcagcctgatgcccatcagcagcttccccccagcgcccccaactcgggggtggccctgccagcccttgtgcccgggctgccagggacagaggccagcgcgctgcaacacaagatcaagaactccatctgcaaaactgtacaatctaaagtggactgcattttgcaagaagttgagaagtttacagacctagagaaactctacctctaccttcagctgccttctggtctcagcaatggagagaaaagtgatcagaatgccatgtcatctagtcgggcacaacaaatgcatgccttttcctggattcggaataccctagaggaacatccggagacttcactgcccaaacaggaagtctatgatgagtacaagagctattgtgacaatcttggttaccatccattaagtgctgctgattttggaaagatcatgaaaaacgtctttccaaacatgaaggcacgtcgtttgggcacaagaggcaaatctaaatattgctacagtggactaagaaaaaaagcttttgttcatatgccaacactgcccaaccttgactttcacaaaactggagatgggttggaaggagctgaaccttctgggcagcttcaaaatattgatgaagaagttatctcttctgcttgccgtcttgtgtgtgagtgggcccagaaagtgttaagccaaccatttgacaccgtcttggaattagcccgcttccttgtaaaaagtcactatataggcaccaagtcaatggcagctctaactgtaatggcagcagcaccagcaggaatgaaaggaattacccagccttctgcttttatacctacagctgaaagtaattcctttcagcctcaggtgaagactttgccatctccaattgatgctaaacagcagttgcaacggaaaatccagaagaagcagcaagaacagaaactacaatcccctttgccaggagaatctgcagcaaaaaagtcagaaagtgctacaagcaatggagtgactaatcttcctaatggaaatccttcaatcctttctcctcaacctattggtatcgttgtggcagctgtccctagtcccattccggtccagcggactaggcaattggtaacttcaccgagtccaatgagttcttctgacggcaaagttcttcccctcaatgtacaggtggtcactcagcacatgcagtctgtgaaacaggcaccaaagactccccagaacgttccagccagtcctggtggggatcgttctgcccggcaccgttaccctcagatcttacccaaaccagcgaacaccagtgcactcaccattcgctctccaactactgtcctctttactagtagtcccatcaaaactgctgttgtacccgcttcacacatgagttctctaaatgtggtgaaaatgacaacaatatccctcacacccagcaacagtaacacccctcttaaacattctgcctcagtcagcagtgctacaggaacaacagaagaatcaaggagtgttccacagatcaagaatggttctgtcgtgtcgcttcagtctcctgggtccaggagcagcagtgcggggggaacatctgctgtggaagtcaaagtggaacccgaaacatcatcagatgagcatcctgtacagtgccaagagaactctgatgaggctaaagctccccagacacctagtgcccttttggggcagaaaagtaatacagacggagcactgcagaaaccttcaaatgaaggtgtcattgaaataaaagcaactaaggtctgtgaccagaggaccaaatgtaaaagtcgctgtaatgaaatgctgccaggcacgtcaacaggcaataatcaaagcactatcactctatcagttgcttctcagaacttaactttcaccagcagcagctcaccacctaatggtgactcaatcaataaagaccctaaattatgcactaaaagcccaagaaaacgactgtcttctacattgcaggagacccaggtgcctcctgtaaagaaaccaattgtggaacagctttcagcagctaccatagaagggcagaaacaaggcagtgttaagaaggaccaaaaggttccacattcagggaaaacagaaggttcaacagcaggtgctcagattcctagcaaggtatcagtaaatgtcagttcacacataggagcaaatcaacccttgaattcctctgcccttgttatcagtgattcagctttggaacagcaaacaaccccatcatcatctccagatataaaagtaaaacttgaaggaagtgtctttctcttggacagtgattcaaagtcagttggcagctttaatccaaatggatggcaacaaatcactaaagattctgagtttatatctgccagttgtgaacaacagcaagatatcagtgttatgacaattcctgagcactctgatatcaatgacttagagaaatctgtttgggaattagaaggaatgccacaggacacatatagccagcagctacatagccagatacaggaatcttctttaaatcaaatacaagcacattcttcagatcagttacctctgcaatctgaactgaaggagtttgagccttctgtttcccagacaaatgaaagctactttccttttgatgatgaacttacacaagatagtattgtggaagagctggtgcttatggagcagcaaatgtcaatgaacaattctcattcttacggcaactgtttgggaatgacccttcagagtcagtcagtaactccaggagctccaatgtcatctcacacttccagcacccacttctatcatccaatccacagcaatggcactccaatccacacacccacacccacacccacacccactcctactccaaccccaaccccaaccccgacatctgaaatgattgctggatctcagagtctgtcacgggagagcccttgctccaggctagcccagactacacctgtggatagtgctttaggaagtagccgacatacacccattggtactccacattctaactgcagcagtagtgtcccccccagccctgttgaatgcaggaatccgtttgcattcactccaataagctccagtatggcatatcatgacgccagcattgtctcaagtagtcctgtgaaaccgatgcaaagacccatggccacacaccctgacaaaaccaagcttgaatggatgaataatgggtatagtggggttggtaattcatcagtttctggccatggtattctcccaagctatcaggaactagtggaagaccgtttcaggaaacctcatgcttttgctgtgcctggacagtcttatcagtctcaatccagacatcatgacactcattttggtcgtttgactcctgtctctcctgtgcagcatcaaggtgccactgtaaataacaccaacaaacaggagggttttgcagtccctgcccctcttgataataaaggaactaattcatctgccagcagcaacttcagatgccggagtgtgagccctgctgttcatcgccaacgtaatcttagtggaagcaccctctatccagtatctaatatcccacgatctaatgtgaccccctttggaagtccagttaccccagaagttcatgttttcacaaatgttcacacagacgcatgtgccaacaacatagctcaaagaagccaatcagttccattgacagtcatgatgcagacagccttcccaaacgctcttcagaagcaagcaaacagtaaaaaaataaccaatgttttgttgagtaaacttgattccgacaatgatgatgcagtgagaggtttgggaatgaacaacctgccctctaattatacagcccggatgaatctcactcagattttggaaccttccactgtttttcctagtgccaacccacaaaatatgatcgattccagcacttctgtttatgagttccaaacaccatcttacctcaccaaaagtaatagcaccggtcagatcaatttttctcctggagataatcaagcacaatcagaaattggagagcaacaattagatttcaatagcactgttaaagacctgttgagtggagacagcttgcaaaccaaccagcagctggtaggtcagggagcatctgatctcactaatactgcatctgatttctctagcgatatcaggttgtcttctgagctctcaggcagcatcaatgatttgaacactttagacccaaatctactgtttgatccaggtcgtcagcagggacaagatgatgaagctacactggaagaattaaagaatgacccattatttcaacaaatttgcagtgaatccatgaattctatgacttcatcaggttttgaatggatagaaagcaaggaccatcctactgttgaaatgttgggttaaattgtgttttataacatgtagcacactgtatctaaagacatatgtattgtatttgtcttaatggaagtgcctcccgcagcagaaatactattaattgtgacattttaaaagcgtttgctgcagaagtggtttcttcagtaggaaatggttagacttgcctcagttcttaacaagtgtctaaagacagtaggctgtagaagaacaagtattaggttttaaattttataatgtgccccatttattcacattgattgactatccagctgttacaagagcagtcgatctttattttgtgtaagttagtttcatttcatcagatgatctgcacagaactcagaataaaccatcaattttaggtataggctgttttgttgttggcattatcttttagatataaaatcatagctagggtgaactgtagacaagaaagtcttccttgaaacagggataatattcaggttattataaatatttaggcttgaagcatagagctactgtagggtgaaaaatctctgtaggactttctggggcttcagtaccatttacacccacgatgaagggcttaaatagaaaataatggaaaattaaatattactttaaggaaagcaaagctgcactaaaatttttaagggaaaaaaaacaagtagccatttatatttgtgaccttgcattaatatttaaatgttgattttaatatggagctagcacacatagatgcgcaggcacgcacacacaaaacaagcaaatgtaactccaggcatttgtaatttaatataataaatacaagcatgttagaaaaatgctttatgtcttattatttgttaagttaggggaatgagaaggaaaacaaaagcattctcttagtttcatcacaatggctgcatgtacatattgagattctaactgagatttactttgaaatttttcattaaaatattccacaataatcagtttttttcctcttcaattgagtgactgactccctcactcctcctgaatatagtaatgtagtttgatcataggatccctttgaaaaacaggaaggaggataacataaaaaacaacaaaaaacatttcaccacctaaggtctgaagccacaaatctttatatctctgatgaaacaaaggggatatcaatagtacttgaagaagaagagcattttattacttgcttaatttatttattgtgataaccacaattgcaaaagaagaactcaggatttgttttaaaatgtttctctctatggctcccattttgttttgtgaataattatttatgagttgcatgttgacacaaacctactcactggttgaaagctccatttaagtgagtttcaagatcactttcaaagagatttttaaattgccattgtttttaaagctaacataaaaccatttgctatgctaccttgaacctagctaagctttcctttaccttagtaagccaatcagaagactacaatcaatgaatatttagcaaatgtgctgaagggtttaataaggttttgttgttcaataaatttgcaaggtagggtattaacatattttgataaataaatggtgctagagttggcgcagaggtttatatattgatatgtcttagttattggcatttgtgtgtgtttgctgttatcttgatttcatgatttgttaggtatttttttcttgatgctagttatttcttcactgtacattgagacacagcactactgcacaccaaagtatgcaatacccaaaggaaactgtgtgatttctcctgacaaatgatgggagcctttctttatgagatactctgaaaaggagattttgaggccattctaatcccttgtttacattattagcttcctactaatataaaaataatggaaatcttttttgataaaaatattaagactggaggatttttaaccccttgtacagtattgcagcaaactctttaaatttggttgaattcgtccagcaaactttctggggttcatatattgcactaaatttgttgaacctgtggtaggcacatctcttaggataaatgcaaccaatacagtccacagattaaactttttaaatgtgtttcattatgaaaagacaaaatgtcatcaaagtgacagataaaattgtcttatgtagcaatgtgcattgatctcaatgagatatttctattattctcttacatgagaatattacagcaggaagaattaagtttagtttgcttcaccatgttaatacatgatcacaaaatgtgcatgagtgttattgacttatcttgtacagtactaggattcctgtaaccactcttttttttcttcgctgtattgaaactggttcagtgttaaccaggcaagcatagttattcacaggttatttactttatgtttactaattctgcttagttattgttgaatatgttctgttccagattatttttattgttttgatgtttaaaacattttgcatactgtttatcataaaacttcatgaagtaaataattttgcatataattgcaataagcactgacttttgaactgaaaagaaggaaagtgtttttttgtgcagtgcttctgaggttcatataatagtcttgtactataatgtgctttactacacgataaatgacaaaaacaagccctgtttcatgtttcatttagtgcaaaaagtcagatttccccagtgttttgttgtctgttgtacctgctgaaactacagtagttgaatattgcggtagcatttcagttctctttttttattaaagtgctcaaaaattgttttttaaatgttttcaaaaacaattaaaaacattttatattaaactgactggatctgaaggtgttttatgggacatattttatataggcaacacattttgtaaacagacccaatgttattcttcctttgatgtcattaactttagggagtgaataaaaatgagcagaaggcagaacagtgctgctgatctgctgtgtgctattaatccagaagaatacacagatcttagttcattcatcaaaactctgttgttcacttaagattattaccaatgaatggtgcatggcatagaactttatgttgtccaaaaagccatctttttctctttcacatagtgtttaaatgttagcctatggagtacctaggtaagtatatttctggagctctgaatagaaaatgagaaaattttaagcatagctgtgttcaaaagcagtatagacatttccaggtaccagaaataacaaactgataagtgtaatgaatttgtaagccagaagctgggctacaggtctggaagcaggccgaagtagccagaaatgtcagctcctgcaaagtaatgaaaccagggtcttgaatggagtttcctcactcttgaaactgagaagcaacaacaaccagtgccagggactatatattgtagacagatcttctcaaacagcctactcctctgtttacatagatctttgtagatctgtgatagttccactatcaccatagatctggagccctcagtttgaacaggtggtagaagcaattacaaaaggaaaggagtggagattaggaagggagaggtaaagagcaggaaggctcccatgaaagctgagcctgcagatcaaaattcaaaagtacttgaagaaaaactaatcccaagaaaggcaatcagtcactcaagagaaaatgaaagtaatgaactacctagataatactataaaattagtatgttaggatcctcagtgctcaatgacatggaagggtaaaatgtcagagcaggcaaacataagaaccagtgcatagagtcaaccagtaagaaattctgggggtgaaaatactgtgtaacacctgaggtgattttggtttcaagtaattgaaaacccaacactggcttaaaccataaggacacttacttttagcttaataatagtggagataggaggttcaagggttcattcaatggttcattgtttacaggcaccagatcctgtttgtgtttctgttccatcatcttcagctttgctttgctgtgtctattacctcatagtcacaagatggctgccacagctcagatgttataccctcataacatcccaagcaggatagtaagagcagttcttagccttttatcagagagaaaaaaaaatctcagaatcttccattaagcactccatacacacacactgttagtctcattgtattaaacaaaggctcatcctaaggccaattacttagcttagatccttaattaatgctttataggtaggagggggggcccatttcctggagcatgtggtcattcatcttaaatgagttccatcacctagggaagatattagggacttgctctttgggaggcaaccagtagtggtcactgcaaaaaatagctaggtaagatgagtaagatcttgtacccacctttgaggggcttacaatcataaagagttaagtacatgttctttgttaagtgccaacagtatgtatactacactatgtagaagaaaaaataagaatttgaaatctgccgaactaagtttactggtgctaactgttaactggtatcttgccttccccctatgagctgaaaaatcaggtattattgagtatcacaaatgcaagttgcctcagctcctacagcataagaaaagaccaaactttttattttgttaaatctgaagtacagatttattttgacatgcattgttataaatgaatttttaaataattaaagttataaatttatggatgggatcacttattaatattgcatcatctgaaattttaaaaatatgtatgccagtcttgttgctataatctgcttagaaaaaagaacaaaacaaaaagactacatttttcaagatttgatttttaagaagtacttaattcttggagaggagaagagagtcatataaataaaatatatcatgagagtgatattactgtggtatatagagtatttctttgcattagacccagtgttagtttgcatatattctcatgtcctcattgtaacaatttttagcgagtattatttttcaggtgagaaaattttacttcagagattaactggtggaggtaacataataacaggaagagccaggattatcttaatttcaaatcccacttcataccattatgctatacttaagatatgtgttcacagtgtacctactgcagttgtatgatctggttgcttctttgaaattttcattctggttttaaatttagaattgagtttgatttttgtggagttctttatttaacctcccatccttatatgtcaacaattctttttcatttttattgcttttagatttacctgtagtttgtaattttcctccaaattacttgaatccttttccctcccttctctccatagaaataccctgatgtattaggagaatgaagatttaaaaacaaaattttgttttccacacagcttttcaagcatatttcatacaggtatactctagtcatatttatgtttaaatcacttaaaatgtcatcaaaataaaaatgggactttttttttaacagatgataaagtgcctaaaatatgtcagtctctgtacaaggtgctagagaagacacctgccattttgaaattttgcaatataatgaaaaagacacagtgaatgtctttgcaggatgcaatgaggtcactatagcagaggcggatacttaccagtagtatgcattctccccttcttctttactgtaaaagtccttgatttttagctgagcacacagccatctgaccaaaaggctgcatctgccaacttcccttgcagttaagtggagacacttaccaagtactcaaagagatgtaaccaaaaggtttgggtgctacttctttgcagtgttcttgtccttcctctctgctggctggaatgcaaatgtgatggctagaactcaagcagccctcctggacttcatgttaaagacacatgctgaggatgattgagcaacaagatacaaggagcccagggcatgatgactttggaagggaagatgcccaactagtcctgactgcttacctctggatgtgttttacatgagagaaataaatgtctttctggtttaactc

SEQ ID NO: 174965 - DNA, 4165 bp, Homo sapiens
  Payload ID: 14350
  Gene Symbol: RFX7
  Gene Name: regulatory factor X, 7
  ENST ID: ENST00000559847
  CDS Start-End: 49-3879
cagctgccttctggtctcagcaatggagagaaaagtgatcagaatgccatgtcatctagtcgggcacaacaaatgcatgccttttcctggattcggaataccctagaggaacatccggagacttcactgcccaaacaggaagtctatgatgagtacaagagctattgtgacaatcttggttaccatccattaagtgctgctgattttggaaagatcatgaaaaacgtctttccaaacatgaaggcacgtcgtttgggcacaagaggcaaatctaaatattgctacagtggactaagaaaaaaagcttttgttcatatgccaacactgcccaaccttgactttcacaaaactggagatgggttggaaggagctgaaccttctgggcagcttcaaaatattgatgaagaagttatctcttctgcttgccgtcttgtgtgtgagtgggcccagaaagtgttaagccaaccatttgacaccgtcttggaattagcccgcttccttgtaaaaagtcactatataggcaccaagtcaatggcagctctaactgtaatggcagcagcaccagcaggaatgaaaggaattacccagccttctgcttttatacctacagctgaaagtaattcctttcagcctcaggtgaagactttgccatctccaattgatgctaaacagcagttgcaacggaaaatccagaagaagcagcaagaacagaaactacaatcccctttgccaggagaatctgcagcaaaaaagtcagaaagtgctacaagcaatggagtgactaatcttcctaatggaaatccttcaatcctttctcctcaacctattggtatcgttgtggcagctgtccctagtcccattccggtccagcggactaggcaattggtaacttcaccgagtccaatgagttcttctgacggcaaagttcttcccctcaatgtacaggtggtcactcagcacatgcagtctgtgaaacaggcaccaaagactccccagaacgttccagccagtcctggtggggatcgttctgcccggcaccgttaccctcagatcttacccaaaccagcgaacaccagtgcactcaccattcgctctccaactactgtcctctttactagtagtcccatcaaaactgctgttgtacccgcttcacacatgagttctctaaatgtggtgaaaatgacaacaatatccctcacacccagcaacagtaacacccctcttaaacattctgcctcagtcagcagtgctacaggaacaacagaagaatcaaggagtgttccacagatcaagaatggttctgtcgtgtcgcttcagtctcctgggtccaggagcagcagtgcggggggaacatctgctgtggaagtcaaagtggaacccgaaacatcatcagatgagcatcctgtacagtgccaagagaactctgatgaggctaaagctccccagacacctagtgcccttttggggcagaaaagtaatacagacggagcactgcagaaaccttcaaatgaaggtgtcattgaaataaaagcaactaaggtctgtgaccagaggaccaaatgtaaaagtcgctgtaatgaaatgctgccaggcacgtcaacaggcaataatcaaagcactatcactctatcagttgcttctcagaacttaactttcaccagcagcagctcaccacctaatggtgactcaatcaataaagaccctaaattatgcactaaaagcccaagaaaacgactgtcttctacattgcaggagacccaggtgcctcctgtaaagaaaccaattgtggaacagctttcagcagctaccatagaagggcagaaacaaggcagtgttaagaaggaccaaaaggttccacattcagggaaaacagaaggttcaacagcaggtgctcagattcctagcaaggtatcagtaaatgtcagttcacacataggagcaaatcaacccttgaattcctctgcccttgttatcagtgattcagctttggaacagcaaacaaccccatcatcatctccagatataaaagtaaaacttgaaggaagtgtctttctcttggacagtgattcaaagtcagttggcagctttaatccaaatggatggcaacaaatcactaaagattctgagtttatatctgccagttgtgaacaacagcaagatatcagtgttatgacaattcctgagcactctgatatcaatgacttagagaaatctgtttgggaattagaaggaatgccacaggacacatatagccagcagctacatagccagatacaggaatcttctttaaatcaaatacaagcacattcttcagatcagttacctctgcaatctgaactgaaggagtttgagccttctgtttcccagacaaatgaaagctactttccttttgatgatgaacttacacaagatagtattgtggaagagctggtgcttatggagcagcaaatgtcaatgaacaattctcattcttacggcaactgtttgggaatgacccttcagagtcagtcagtaactccaggagctccaatgtcatctcacacttccagcacccacttctatcatccaatccacagcaatggcactccaatccacacacccacacccacacccacacccactcctactccaaccccaaccccaaccccgacatctgaaatgattgctggatctcagagtctgtcacgggagagcccttgctccaggctagcccagactacacctgtggatagtgctttaggaagtagccgacatacacccattggtactccacattctaactgcagcagtagtgtcccccccagccctgttgaatgcaggaatccgtttgcattcactccaataagctccagtatggcatatcatgacgccagcattgtctcaagtagtcctgtgaaaccgatgcaaagacccatggccacacaccctgacaaaaccaagcttgaatggatgaataatgggtatagtggggttggtaattcatcagtttctggccatggtattctcccaagctatcaggaactagtggaagaccgtttcaggaaacctcatgcttttgctgtgcctggacagtcttatcagtctcaatccagacatcatgacactcattttggtcgtttgactcctgtctctcctgtgcagcatcaaggtgccactgtaaataacaccaacaaacaggagggttttgcagtccctgcccctcttgataataaaggaactaattcatctgccagcagcaacttcagatgccggagtgtgagccctgctgttcatcgccaacgtaatcttagtggaagcaccctctatccagtatctaatatcccacgatctaatgtgaccccctttggaagtccagttaccccagaagttcatgttttcacaaatgttcacacagacgcatgtgccaacaacatagctcaaagaagccaatcagttccattgacagtcatgatgcagacagccttcccaaacgctcttcagaagcaagcaaacagtaaaaaaataaccaatgttttgttgagtaaacttgattccgacaatgatgatgcagtgagaggtttgggaatgaacaacctgccctctaattatacagcccggatgaatctcactcagattttggaaccttccactgtttttcctagtgccaacccacaaaatatgatcgattccagcacttctgtttatgagttccaaacaccatcttacctcaccaaaagtaatagcaccggtcagatcaatttttctcctggagataatcaagcacaatcagaaattggagagcaacaattagatttcaatagcactgttaaagacctgttgagtggagacagcttgcaaaccaaccagcagctgaaataccctgatgtattaggagaatgaagatttaaaaacaaaattttgttttccacacagcttttcaagcatatttcatacagtgttcttgtccttcctctctgctggctggaatgcaaatgtgatggctagaactcaagcagccctcctggacttcatgttaaagacacatgctgaggatgattgagcaacaagatacaaggagcccagggcatgatgactttggaagggaagatgcccaactagtcctgactgcttacctctggatgtgttttacatgagagaaataaatgtctttctggtttaactcaca

SEQ ID NO: 174966 - DNA, 518 bp, Homo sapiens
  Payload ID: 14350
  Gene Symbol: RFX7
  Gene Name: regulatory factor X, 7
  ENST ID: ENST00000560792
  CDS Start-End: 290-518
aacatctgttttgtggacatctagtttgattcctgttggataaatacttatgcaaaactgtacaatctaaagtggactgcattttgccccctcgggtgaattgtttataagctacctagatacttacctgtatctcatcaataataaaatcacaatctgagaactgctggggcctgagagaatataatatcagcaagaagttgagaagtttacagacctagagaaactctacctctaccttcagctgccttctggtctcagcaatggagagaaaagtgatcagaatgccatgtcatctagtcgggcacaacaaatgcatgccttttcctggattcggaataccctagaggaacatccggagacttcactgcccaaacaggaagtctatgatgagtacaagagctattgtgacaatcttggttaccatccattaagtgctgctgattttggaaagatcatgaaaaacgtctttccaaacatgaaggcacgtcgtttgggcacaagaggcaaatctaaat

SEQ ID NO: 174967 - DNA, 1407 bp, Homo sapiens
  Payload ID: 14351
  Gene Symbol: RFXANK
  Gene Name: regulatory factor X-associated ankyrin-containing protein
  Uniprot ID: O14593
  ENST ID: ENST00000303088
  CDS Start-End: 475-1257
agagggcccgccctccccgctcctcagtctttgcggacaagaaaggggctgtgtgagacgcagggaaggaggcacacccgggggtggcgcagtgaggagggggcgcgacggccaggaggctggtggagcgacacccaggcaggagagggggaagaactctctccctttctgaacccccttttccttgagagacgagttgggggagtcctccacgcattacccactcgggccgcaaaaactcccttctttagccctctgcccccgcccttgcttataagcctttgagaccgcagaagggaccttgttgtggaacgggacggccaagaggaagccagatcgctgagggtccggtctccagtttgcctcctgctatatccattggaagagaaaagtttgtgacttgggcccccaagttttgagagaactgggctttcggcgcggggggacagaggaggctcgtggggagctttccccatggagcttacccagcctgcagaagacctcatccagacccagcagacccctgcctcagaacttggggaccctgaagaccccggagaggaggctgcagatggctcagacactgtggtcctcagtctctttccctgcacccctgagcctgtgaatcctgaaccggatgccagtgtttcctctccacaggcaggcagctccctgaagcactccaccactctcaccaaccggcagcgagggaacgaggtgtcagctctgccggccaccctagactccctgtccatccaccagctcgcagcacagggggagctggaccagctgaaggagcatttgcggaaaggtgacaacctcgtcaacaagccagacgagcgcggcttcacccccctcatctgggcctccgcctttggagagattgagaccgttcgcttcctgctggagtggggtgccgacccccacatcctggcaaaagagcgagagagcgccctgtcgctggccagcacaggcggctacacagacattgtggggctgctgctggagcgtgacgtggacatcaacatctatgattggaatggagggacgccactgctgtacgctgtgcgcgggaaccacgtgaaatgcgttgaggccttgctggcccgaggcgctgacctcaccaccgaagccgactctggctacaccccgatggaccttgccgtggccctgggataccggaaagtgcaacaggtgatcgagaaccacatcctcaagctcttccagagcaacctggtgcccgctgaccctgagtgaaggccgcctgccggggactcagacactcagggaacaaaatggtcagccagagctggggaaacccagaactgacttcaaaggcagcttctggacaggtggtgggaggggacccttcccaagaggaaccaataaaccttctgtgcagaatga

SEQ ID NO: 174968 - DNA, 1059 bp, Homo sapiens
  Payload ID: 14351
  Gene Symbol: RFXANK
  Gene Name: regulatory factor X-associated ankyrin-containing protein
  ENST ID: ENST00000392324
  CDS Start-End: 199-912
ctggggtgggggtagcggtcgagtatcaagttgctttctgtcccggcagaggaagccagatcgctgagggtccggtctccagtttgcctcctgctatatccattggaagagaaaagtttgtgacttgggcccccaagttttgagagaactgggctttcggcgcggggggacagaggaggctcgtggggagctttccccatggagcttacccagcctgcagaagacctcatccagacccagcagacccctgcctcagaacttggggaccctgaagaccccggagaggaggctgcagatggctcagacactgtggtcctcagtctctttccctgcacccctgagcctgtgaatcctgaaccggatgccagtgtttcctctccacagggcagctccctgaagcactccaccactctcaccaaccggcagcgagggaacgaggtgtcagctctgccggccaccctagactgtgacaacctcgtcaacaagccagacgagcgcggcttcacccccctcatctgggcctccgcctttggagagattgagaccgttcgcttcctgctggagtggggtgccgacccccacatcctggcaaaagagcgagagagcgccctgtcgctggccagcacaggcggctacacagacattgtggggctgctgctggagcgtgacgtggacatcaacatctatgattggaatggagggacgccactgctgtacgctgtgcgcgggaaccacgtgaaatgcgttgaggccttgctggcccgaggcgctgacctcaccaccgaagccgactctggctacaccccgatggaccttgccgtggccctgggataccggaaagtgcaacaggtgatcgagaaccacatcctcaagctcttccagagcaacctggtgcccgctgaccctgagtgaaggccgcctgccggggactcagacactcagggaacaaaatggtcagccagagctggggaaacccagaactgacttcaaaggcagcttctggacaggtggtgggaggggacccttcccaagaggaaccaataaaccttctgtgcagaa

SEQ ID NO: 174969 - DNA, 1212 bp, Homo sapiens
  Payload ID: 14351
  Gene Symbol: RFXANK
  Gene Name: regulatory factor X-associated ankyrin-containing protein
  Uniprot ID: O14593
  ENST ID: ENST00000407360
  CDS Start-End: 347-1129
aaaagaaggcgcaggcgcaactgccctcccaggaccccagcggaacccacgccctcccctaagtcttaaagggccagaggcagcacttactgcccgggcccttcctcacttttggggggcgggggtgcgcaagcgcagtgggggagctctggggtgggggtagcggtcgagtatcaagttgctttctgtcccggcagaggaagccagatcgctgagggtccggtctccagtttgcctcctgctatatccattggaagagaaaagtttgtgacttgggcccccaagttttgagagaactgggctttcggcgcggggggacagaggaggctcgtggggagctttccccatggagcttacccagcctgcagaagacctcatccagacccagcagacccctgcctcagaacttggggaccctgaagaccccggagaggaggctgcagatggctcagacactgtggtcctcagtctctttccctgcacccctgagcctgtgaatcctgaaccggatgccagtgtttcctctccacaggcaggcagctccctgaagcactccaccactctcaccaaccggcagcgagggaacgaggtgtcagctctgccggccaccctagactccctgtccatccaccagctcgcagcacagggggagctggaccagctgaaggagcatttgcggaaaggtgacaacctcgtcaacaagccagacgagcgcggcttcacccccctcatctgggcctccgcctttggagagattgagaccgttcgcttcctgctggagtggggtgccgacccccacatcctggcaaaagagcgagagagcgccctgtcgctggccagcacaggcggctacacagacattgtggggctgctgctggagcgtgacgtggacatcaacatctatgattggaatggagggacgccactgctgtacgctgtgcgcgggaaccacgtgaaatgcgttgaggccttgctggcccgaggcgctgacctcaccaccgaagccgactctggctacaccccgatggaccttgccgtggccctgggataccggaaagtgcaacaggtgatcgagaaccacatcctcaagctcttccagagcaacctggtgcccgctgaccctgagtgaaggccgcctgccggggactcagacactcagggaacaaaatggtcagccagagctggggaaacccagaactgacttcaaaggca

SEQ ID NO: 174970 - DNA, 856 bp, Homo sapiens
  Payload ID: 14351
  Gene Symbol: RFXANK
  Gene Name: regulatory factor X-associated ankyrin-containing protein
  ENST ID: ENST00000421262
  CDS Start-End: 607-856
cagagggcccgccctccccgctcctcagtctttgcggacaagaaaggggctgtgtgagacgcagggaaggaggcacacccgggggtggcgcagtgaggagggggcgcgacggccaggaggctggtggagcgacacccaggcaggagagggggaagaactctctccctttctgaacccccttttccttgagagacgagttgggggagtcctccacgcattacccactcgggccgcaaaaactcccttctttagccctctgcccccgcccttgcttataagcctttgagaccgcagaagggaccttgttgtggaacgggacggccaaggtacgctgcccctttaagttccagacgccccgcgtacttcccctacttcttcttcttgagatagccccgcccatctacccgaagccggagccaattggctccctctggaaaaatctgtgggcagggtaaagaggaagccagatcgctgagggtccggtctccagtttgcctcctgctatatccattggaagagaaaagtttgtgacttgggcccccaagttttgagagaactgggctttcggcgcggggggacagaggaggctcgtggggagctttccccatggagcttacccagcctgcagaagacctcatccagacccagcagacccctgcctcagaacttggggaccctgaagaccccggagaggaggctgcagatggctcagacactgtggtcctcagtctctttccctgcacccctgagcctgtgaatcctgaaccggatgccagtgtttcctctccacaggcaggcagctccctgaagcactccaccactctcaccaaccggcagcgagggaacgaggtgtcag

SEQ ID NO: 174971 - DNA, 1325 bp, Homo sapiens
  Payload ID: 14351
  Gene Symbol: RFXANK
  Gene Name: regulatory factor X-associated ankyrin-containing protein
  Uniprot ID: O14593
  ENST ID: ENST00000456252
  CDS Start-End: 462-1178
tccccgctcctcagtctttgcggacaagaaaggggctgtgtgagacgcagggaaggaggcacacccgggggtggcgcagtgaggagggggcgcgacggccaggaggctggtggagcgacacccaggcaggagagggggaagaactctctccctttctgaacccccttttccttgagagacgagttgggggagtcctccacgcattacccactcgggccgcaaaaactcccttctttagccctctgcccccgcccttgcttataagcctttgagaccgcagaagggaccttgttgtggaacgggacggccaagaggaagccagatcgctgagggtccggtctccagtttgcctcctgctatatccattggaagagaaaagtttgtgacttgggcccccaagttttgagagaactgggctttcggcgcggggggacagaggaggctcgtggggagctttccccatggagcttacccagcctgcagaagacctcatccagacccagcagacccctgcctcagaacttggggaccctgaagaccccggagaggaggctgcagatggctcagacactgtggtcctcagtctctttccctgcacccctgagcctgtgaatcctgaaccggatgccagtgtttcctctccacaggcaggcagctccctgaagcactccaccactctcaccaaccggcagcgagggaacgaggtgtcagctctgccggccaccctagactgtgacaacctcgtcaacaagccagacgagcgcggcttcacccccctcatctgggcctccgcctttggagagattgagaccgttcgcttcctgctggagtggggtgccgacccccacatcctggcaaaagagcgagagagcgccctgtcgctggccagcacaggcggctacacagacattgtggggctgctgctggagcgtgacgtggacatcaacatctatgattggaatggagggacgccactgctgtacgctgtgcgcgggaaccacgtgaaatgcgttgaggccttgctggcccgaggcgctgacctcaccaccgaagccgactctggctacaccccgatggaccttgccgtggccctgggataccggaaagtgcaacaggtgatcgagaaccacatcctcaagctcttccagagcaacctggtgcccgctgaccctgagtgaaggccgcctgccggggactcagacactcagggaacaaaatggtcagccagagctggggaaacccagaactgacttcaaaggcagcttctggacaggtggtgggaggggacccttcccaagaggaaccaataaaccttctgtgcagaa

SEQ ID NO: 174972 - DNA, 374 bp, Homo sapiens
  Payload ID: 14351
  Gene Symbol: RFXANK
  Gene Name: regulatory factor X-associated ankyrin-containing protein
  ENST ID: ENST00000536253
  CDS Start-End: 1-126
cccgaggcgctgacctcaccaccgaagccgactctggctacaccccgatggaccttgccgtggccctgggataccggaaagatggagtttcgctcttgttgcccaggctggagtgctatggcgtgatctcggctcactgcaacttccgcctcccagtgcaacaggtgatcgagaaccacatcctcaagctcttccagagcaacctggtgcccgctgaccctgagtgaaggccgcctgccggggactcagacactcagggaacaaaatggtcagccagagctggggaaacccagaactgacttcaaaggcagcttctggacaggtggtgggaggggacccttcccaagaggaaccaataaaccttctgtgcagaa

SEQ ID NO: 174973 - DNA, 832 bp, Homo sapiens
  Payload ID: 14351
  Gene Symbol: RFXANK
  Gene Name: regulatory factor X-associated ankyrin-containing protein
  ENST ID: ENST00000540981
  CDS Start-End: 269-832
ggcagcacttactgcccgggcccttcctcacttttggggggcgggggtgcgcaagcgcagtgggggagctctggggtgggggtagcggtcgagtatcaagttgctttctgtcccggcagaggaagccagatcgctgagggtccggtctccagtttgcctcctgctatatccattggaagagaaaagtttgtgacttgggcccccaagttttgagagaactgggctttcggcgcggggggacagaggaggctcgtggggagctttccccatggagcttacccagcctgcagaagacctcatccagacccagcagacccctgcctcagaacttggggaccctgaagaccccggagaggaggctgcagatggctcagacactgtggtcctcagtctctttccctgcacccctgagcctgtgaatcctgaaccggatgccagtgtttcctctccacaggcaggcagctccctgaagcactccaccactctcaccaaccggcagcgagggaacgaggtgtcagctctgccggccaccctagactgtgacaacctcgtcaacaagccagacgagcgcggcttcacccccctcatctgggcctccgcctttggagagattgagaccgttcgcttcctgctggagtggggtgccgacccccacatcctggcaaaagagcgagagagcgccctgtcgctggccagcacaggcggctacacagacattgtggggctgctgctggagcgtgacgtggacatcaacatctatgattggaatggagggacgccactgctgtacgctgtgcgcgggaaccacgtgaaatgcgttgaggccttgctg

SEQ ID NO: 174974 - DNA, 288 bp, Homo sapiens
  Payload ID: 14351
  Gene Symbol: RFXANK
  Gene Name: regulatory factor X-associated ankyrin-containing protein
  ENST ID: ENST00000544923
  CDS Start-End: 1-144
cccgaggcgctgacctcaccaccgaagccgactctggctacaccccgatggaccttgccgtggccctgggataccggaaaggtgatcgagaaccacatcctcaagctcttccagagcaacctggtgcccgctgaccctgagtgaaggccgcctgccggggactcagacactcagggaacaaaatggtcagccagagctggggaaacccagaactgacttcaaaggcagcttctggacaggtggtgggaggggacccttcccaagaggaaccaataaaccttctgtgca

SEQ ID NO: 174975 - DNA, 546 bp, Homo sapiens
  Payload ID: 14351
  Gene Symbol: RFXANK
  Gene Name: regulatory factor X-associated ankyrin-containing protein
  ENST ID: ENST00000535017
  CDS Start-End: 1-546
gacactgtggtcctcagtctctttccctgcacccctgagcctgtgaatcctgaaccggatgccagtgtttcctctccacaggcaggcagctccctgaagcactccaccactctcaccaaccggcagcgagggaacgaggtgtcagctctgccggccaccctagactgtgacaacctcgtcaacaagccagacgagcgcggcttcacccccctcatctgggcctccgcctttggagagattgagaccgttcgcttcctgctggagtggggtgccgacccccacatcctggcaaaagagcgagagagcgccctgtcgctggccagcacaggcggctacacagacattgtggggctgctgctggagcgtgacgtggacatcaacatctatgattggaatggagggacgccactgctgtacgctgtgcgcgggaaccacgtgaaatgcgttgaggccttgctggagacccttcagccacgttcttcagtggagaccaagatagcagagcccgaggcgctgacctcaccaccgaagccgactctggctaca

SEQ ID NO: 174976 - DNA, 865 bp, Homo sapiens
  Payload ID: 14351
  Gene Symbol: RFXANK
  Gene Name: regulatory factor X-associated ankyrin-containing protein
  ENST ID: ENST00000593273
  CDS Start-End: 431-865
ggggctgtgtgagacgcagggaaggaggcacacccgggggtggcgcagtgaggagggggcgcgacggccaggaggctggtggagcgacacccaggcaggagagggggaagaactctctccctttctgaacccccttttccttgagagacgagttgggggagtcctccacgcattacccactcgggccgcaaaaactcccttctttagccctctgcccccgcccttgcttataagcctttgagaccgcagaagggaccttgttgtggaacgggacggccaagaggaagccagatcgctgagggtccggtctccagtttgcctcctgctatatccattggaagagaaaagtttgtgacttgggcccccaagttttgagagaactgggctttcggcgcggggggacagaggaggctcgtggggagctttccccatggagcttacccagcctgcagaagacctcatccagacccagcagacccctgcctcagaacttggggaccctgaagaccccggagaggaggctgcagatggctcagacactgtggtcctcagtctctttccctgcacccctgagcctgtgaatcctgaaccggatgccagtgtttcctctccacagggcagctccctgaagcactccaccactctcaccaaccggcagcgagggaacgaggtgtcagctctgccggccaccctagactccctgtccatccaccagctcgcagcacagggggagctggaccagctgaaggagcatttgcggaaaggtgacaacctcgtcaacaagccagacgagcgcggcttcacccccctcatctgggcctccgcctttggagagattgagaccgttcgcttcctgctggagtgg

SEQ ID NO: 174977 - DNA, 2304 bp, Homo sapiens
  Payload ID: 14352
  Gene Symbol: RFXAP
  Gene Name: regulatory factor X-associated protein
  Uniprot ID: O00287
  ENST ID: ENST00000255476
  CDS Start-End: 135-953
gcgcagtcggggcgccttcccggtataggcgccttttaccccagcgtgtcctgagtctttggttcgcgaagtgccgttaggccaagcaggtgctaaaagcccggggtcgtggaccccggccaggtcttagcagcatggaggcgcagggtgtagcggagggcgcggggccgggcgccgccagcggcgtgccccaccccgcggccctagccccggctgcggctcccaccttggcgccagcctcggtggcggccgcggcctctcaattcaccctgctagtgatgcaaccctgtgctgggcaggacgaggctgcggcccccgggggcagcgttggggcgggcaagcccgttaggtacctgtgcgaaggggccggggatggcgaagaggaggctggggaggacgaggcggacctgttagacacttcggaccctccggggggaggcgagagcgcggctagtttggaggatctagaggacgaggagactcactcggggggcgagggcagcagcgggggcgcccggaggcggggcagcggtgggggcagcatgagcaagacctgcacctacgaaggctgcagcgagaccacgagccaggtggccaagcagcgcaaaccgtggatgtgcaagaaacaccgcaacaagatgtacaaggacaagtataaaaagaagaagagcgaccaggccctgaactgcggtgggactgcctcgactggcagcgcgggaaacgtcaaactcgaggaaagtgcagataacatactctccattgttaaacaaagaacaggatcttttggggatcgtcctgcaagacctactcttttagaacaagtgttaaatcaaaaaagactgtcgttactaagaagtccagaagtagtgcaatttttacagaaacagcaacagctattaaatcagcaagttttggagcaaagacaacagcagtttccaggaacatcaatgtgagggaacttaccaagaacatctacatggttttttatcttattgtaatagatgagcatatttttttaccagacataaatggggtaataatctatgcctgtagaacataaacattttcctgtaaatgtatgtgtgcatttggggataagtaagtattgcactttgtgcatctaatctttcagattactgtgagtttgaagaagtcagcttatctttccaaataacatttaattataatgttttttaaaaaatatattcctcttcagtcattgttactgaaggtaatgaagcagttactttctgtggaagtcataaagttaatagatattaatcttgactcatctagctcagtggttctcatcaagggtcaatttgattgtcatagtgaccttgaaaaccactggcttttagtgagtggccaggaatgctaaatgttctgcagtgtcaggggtagtcccacatactaaagattgtctcacccgcagtgccaataacactcctaagaaatgttgatggctattttgtggtgctaacatgtagttggggcacctataattgggttctcttaataacctttctttgcagttaagactgaagctgtcaaagaggtaagcacattttatatagacgtaaggaaagtgattattgtttaatatctgtgaatttaggatgtgcatctcttttcagaggtgtgttagtaaaacctgacggattaactaagcacactgggatgtgtctcctacagttggcttctctctttgatgttacctgttagtgctgatctcttaaagcagacatttcttgtttgttgaatttgtgaacagtatagatctcagcccaccaatgccaagacaaaattatttttcttatacttattttttattaaacaaaatgaaaaagatccttttcaaaaaggtgatcctgaaaataaaactaacactccagtattttgtcattgtttttcgcaattgagctatctgaaaactgttattcctaagtaatgttcaaaaatgataagtaatctggatacctttttcttatactttctcctaggaaaactttaaaactttaaaaaggcaaacctaccaataggaataacaaattaaatgtcaagagagtatatccaatattaggatataaatgtatgtgtctcaagtttaactctacaaaaatttgttacttgttttttaaactctatatataaagttcgacttaatcatggctgttctaagaagtacttatggagagcaagaacgtttttgttcatttcttaatgtgtgtgtttttacttgcatatctgttcaaaacacttttaacaaaattaattcattaaagtccagttgttgacctttga

SEQ ID NO: 174978 - DNA, 1854 bp, Homo sapiens
  Payload ID: 14353
  Gene Symbol: RSC1A1
  Gene Name: regulatory solute carrier protein, family 1, member 1
  Uniprot ID: Q92681
  ENST ID: ENST00000345034
  CDS Start-End: 1-1854
atgtcatcattaccaacttcagatgggtttaaccatcccgcccgttcttcaggacagagtcctgatgttggtaatcctatgagtcttgctcgctctgtctctgcttcagtctgccctatcaagcccagtgactcagatcgcattgaacctaaagctgtgaaggctttgaaggcttcagctgaattccagctaaactctgaaaagaaagaacatctttctttacaagatctttctgatcatgcttcctcagcagaccatgctccaacagaccagagtccagctatgcctatgcagaattcatccgaagaaataactgttgcaggtaatctggagaaatctgctgaaagaagcacccagggcctcaaatttcatctccatacaagacaggaagctagtttatctgtcacatctactaggatgcatgaaccacagatgtttctaggtgaaaaggattggcatccagaaaatcagaacctgagtcaagtgagtgaccctcagcagcacgaagaaccagggaatgaacagtatgaggttgcacaacaaaaagcttcacatgaccaagaatatctttgtaacataggggaccttgagcttcctgaagaaaggcaacagaatcaacacaaaattgttgatttggaagctacgatgaaaggaaatgggctcccacagaatgtggatcctccaagtgcgaagaaaagtattccatcttcagaatgcagtggctgctcaaattcagaaacatttatggaaatcgatacagctcaacagtccctagttactttgcttaattcaacaggcaggcagaatgccaatgtcaagaacattggtgcattggatctcactttagataatcccttgatggaagtagaaacatcaaaatgtaacccttcatctgaaattttgaatgattccatttccactcaggatttacagcccccagaaactaatgttgaaatacctggaacaaataaagaatatggccattactcctctccaagtctctgtggcagttgtcagccttctgtggagtcagcagaagaatcttgcccgtctataacggcagccttgaaagaacttcatgaacttttggttgttagcagtaaaccagcttcagaaaatacatctgaagaagtaatctgtcaatcagaaaccatagctgagggccaaaccagtattaaagacctttctgaaagatggacccaaaatgagcatcttacccagaatgaacagtgtccacaagtctcctttcatcaggccatatctgtatcagtggagacagaaaaattaacaggtacttcatctgacactggaagagaagctgtagaaaatgtaaacttcaggagtctaggtgatggcctgtcaaccgataaggaaggtgtccccaaatctagggaatccataaataagaaccgttctgtcactgtaacctcagctaaaacatccaatcagttacactgcaccttaggtgtagaaatttcacccaaacttttagcaggtgaggaggatgcactcaatcagacttctgagcaaactaagtctttgtcatccaatttcatattggttaaagacttaggtcagggcatacagaattcagtaacagacaggcctgaaaccagagaaaatgtctgtcctgatgcttcgaggccattacttgaatatgaaccacctaccagccatccatcatcaagtcctgccattcttccaccattgatttttcctgccacagatattgaccgcattctccgtgctggctttactttgcaggaagctcttggagctttgcatcgagttggtgggaatgcagaccttgcacttcttgttttgctcgcaaaaaacatcgtagttcctacatga

SEQ ID NO: 174979 - DNA, 449 bp, Homo sapiens
  Payload ID: 14354
  Gene Symbol: RIIAD1
  Gene Name: regulatory subunit of type II PKA R-subunit (RIIa) domain containing 1
  Uniprot ID: A6NNX1
  ENST ID: ENST00000479191
  CDS Start-End: 1-279
atggagacgctgccaggcttgctgcagcggcccgaccccggggcgcttagcgcagcgcagctggagcagctgcgaaaattcaagattcagactcggattgctaacgaaaagtacctaaggacccacaaagaagtagagtggctcataagtggtttcttcagagaaatatttttgaaaagaccagacaacatcctagaatttgctgcagactacttcacggatccaagacttcccaacaagattcacatgcagctaattaaagacaagaaagcggcttaattagcaaaatcatgatgctcagctgttgggagagaccagacggaatccagcctcgggggtcatctggaggcatgagagccctactgccatcagtgtgggtttccaagctgccttgggctctgtctactgtcgcaaaagcttttaaagatattcattaaacacggaccttc

SEQ ID NO: 174980 - DNA, 1772 bp, Homo sapiens
  Payload ID: 14354
  Gene Symbol: RIIAD1
  Gene Name: regulatory subunit of type II PKA R-subunit (RIIa) domain containing 1
  ENST ID: ENST00000326413
  CDS Start-End: 1288-1596
atcacttctgctgctccacacacccagagaaggagtggggtggggggtggttaacagggtatgctgggggtggaggatttggtgggggctgggaggtgggggaggggcccagaaaaccttcctgattctggagggaggcttgcagagcaggccctgcaggggccatcccatcccttctcctgcctccctcctccagagcaaatccttggtgcctggagggctctaaaggaggagttgctgtcccgtgctccttcgcaatttaccctgtgcacggaagtcctccagagctctaacctctccccgacccctgcagtatctccctttgttcagtcttcagtggaaatggagaaattcctagttccactctccatgttcttgtctggtgagaggacttggaaattactcctgcaggttgattttcttaaccagggtggggagtattataggaactggagaaagaggagaaggacttagtatttagtgtctgaaaatattttgctcttgaggactctgacagctggaaccacacctggttgccccactcatctgatggtggggcagtagttccagtgaccagaaaaattaaacctcaatttacattctgagggtgaggctagaggtaccctcaggaaaggtactggactgggagtcaggagacctggatttgaggactagccctgccctgccacttactagctgggcgaccttggacaagccactagtcccctctggacctcaacttccttatctgtaaaacaagggggtgggccaggcgatgtctaatcaggttccggtcagctccaggctccagcatgtggagatcctgtgtgtggcatcacttagcgccgagaagtgcagaagtcacagttgcccctgccccttctcaccctggatcctcacccaggtgtcgcatcatgccagtcagtctggccgactccaccaatggagatgggaacctgggacccagagagaaaggatgcagttccctcctggcataggctcccaggcacaaaaatagcatctcgagaaatacccacggctgatgtggattcgcacaaagagacacacaagtgtacagaccacagcaaggaccgtgctgacggggctctgagatagggagacaacagaaaaagacaaacagcgatggagatgaaaactgttgatttgtgaggggcctccacagagaaaaacagggaaggtaacaagaaatgcatgcatctacagcaagaaagatggatgctacagagagagagggggacttcctggtgatgagaggaggtggaaattatgctcagtgtcaggagggtgagtgaagacatctgcagcagaatttatgagagtgcacaaagaattgattctataaccttcctgccctcaagtggcttccacctcaagtggaagattcagactcggattgctaacgaaaagtacctaaggacccacaaagaagtagagtggctcataagtggtttcttcagagaaatatttttgaaaagaccagacaacatcctagaatttgctgcagactacttcacggatccaagacttcccaacaagattcacatgcagctaattaaagacaagaaagcggcttaattagcaaaatcatgatgctcagctgttgggagagaccagacggaatccagcctcgggggtcatctggaggcatgagagccctactgccatcagtgtgggtttccaagctgccttgggctctgtctactgtcgcaaaagcttttaaagatattcattaaacacggaccttcctgctc

SEQ ID NO: 174981 - DNA, 1044 bp, Homo sapiens
  Payload ID: 14355
  Gene Symbol: RRAS
  Gene Name: related RAS viral (r-ras) oncogene homolog
  Uniprot ID: P10301
  ENST ID: ENST00000246792
  CDS Start-End: 104-760
agagctcatgattatgcagtagcctcattagcgtagcccgcccccccgggtcccgcccggctcccccgcaggcggtagcgaaggcagcagcagcggtggcgacatgagcagcggggcggcgtccgggacagggcgggggcggccccggggcgggggacctgggcccggggaccccccgcccagcgagacacacaagctggtggtcgtgggcggcggcggcgtgggcaagagcgcgctgaccatccagttcatccagtcctacttcgtgtctgactacgaccccactattgaggactcctacacgaagatctgcagtgtggatggcatcccagcccggctggacatcctggacaccgcgggccaggaagagttcggggccatgagagagcagtacatgcgtgctggccacggcttcctgctggtgttcgccattaacgaccggcagagtttcaacgaggtgggcaagctcttcacgcagattctgcgggtcaaggaccgcgacgacttccccgttgtgttggtcgggaacaaggcagatctggagtcacagcgccaggtcccccgatcagaagcctctgccttcggcgcctcccaccacgtggcctactttgaggcctcggccaaactgcgtctcaacgtggacgaggcttttgagcagctggtgcgggctgtccggaaataccaggaacaagagctcccaccgagccctcccagtgcccccaggaagaagggcgggggctgcccctgcgtcctcctgtagcccaggcaagagagaagcaaccaccacaagctctcgggactagctgccttcgcaccttgctgtgtgacctgaggccctcactgagcctcaatttcctcatctgggtctcccaggacacatcacatacccacccttacttcctggcctcttctgggctactgccactgtgtgccttctgccaacgcctcctgtccccacctaagcctggtgggggtgaggggctccgggtcactgctgtatataactcccctcccccagaaaaataaatgtcactgccaacgtca

SEQ ID NO: 174982 - DNA, 1516 bp, Homo sapiens
  Payload ID: 14356
  Gene Symbol: RRAS2
  Gene Name: related RAS viral (r-ras) oncogene homolog 2
  Uniprot ID: P62070
  ENST ID: ENST00000256196
  CDS Start-End: 315-929
cagacggccatttgtggcggcgctggaggctgcgttcggcaggcgctgcggagacgcgtagaggagcgcgccccccggccgctgccgcccctggcccgtgccgtcaccccgcttctccgcgcctcgggcggtacccagccagtccccagcgccgcgctaccgcgctgaccggccctccagacgcctcccggtacccgggaccccagcccggccgctcgcccgcagcccgccggccgcacacgtccccggagccgggcctagggcgggcggcagcggcggctcggcgcagtcaggctgggctctgtagcgtccccatggccgcggccggctggcgggacggctccggccaggagaagtaccggctcgtggtggtcggcgggggcggcgtgggcaagtcggcgctcaccatccagttcatccagtcctattttgtaacggattatgatccaaccattgaagattcttacacaaagcagtgtgtgatagatgacagagcagcccggctagatattttggatacagcaggacaagaagagtttggagccatgagagaacagtatatgaggactggcgaaggcttcctgttggtcttttcagtcacagatagaggcagttttgaagaaatctataagtttcaaagacagattctcagagtaaaggatcgtgatgagttcccaatgattttaattggtaataaagcagatctggatcatcaaagacaggtaacacaggaagaaggacaacagttagcacggcagcttaaggtaacatacatggaggcatcagcaaagattaggatgaatgtagatcaagctttccatgaacttgtccgggttatcaggaaatttcaagagcaggaatgtcctccttcaccagaaccaacacggaaagaaaaagacaagaaaggctgccattgtgtcattttctagaatcccttcagttttagctaccaacggccaggaaaagccctcatcttctctttctctcctcagtttacatcttgttggtacctttctagccttagacaaatgatcaccatgttagccttagacgaagaagctggctagtcctttctgtgaagctaatacaatggtcatttccagacaaatttaaaggaaacactaaggctgcttcaaagattatctgattcctttaaaatatatgtctatatacacagacatgctctttttttaagtgcttacattttaatagagatgaatcagttttggaatctaagctgtttgccaagctgaagctacaggttgtgaaataatttttaacttttggaatcatactgcctactgttactctaaatagaaatatagggttttttttaatgtgaatttttgcctatctttaaacatttcaatgtcagcctttgttaaccttaaatacactgaattgaatctacaaaagtgaaccatctcagacctttactgatactacaacttttgttttctgatggccaaaataccaaatgcctgttgtatttatggattaaaaactgcttataaaa

SEQ ID NO: 174983 - DNA, 1884 bp, Homo sapiens
  Payload ID: 14356
  Gene Symbol: RRAS2
  Gene Name: related RAS viral (r-ras) oncogene homolog 2
  Uniprot ID: P62070
  ENST ID: ENST00000414023
  CDS Start-End: 128-511
gcagtcctattttgtaacggattatgatccaaccattgaagattcttacacaaagcagtgtgtgatagatgacagagcagcccggctagatattttggatacagcaggacaagaagagtttggagccatgagagaacagtatatgaggactggcgaaggcttcctgttggtcttttcagtcacagatagaggcagttttgaagaaatctataagtttcaaagacagattctcagagtaaaggatcgtgatgagttcccaatgattttaattggtaataaagcagatctggatcatcaaagacaggtaacacaggaagaaggacaacagttagcacggcagcttaaggtaacatacatggaggcatcagcaaagattaggatgaatgtagatcaagctttccatgaacttgtccgggttatcaggaaatttcaagagcaggaatgtcctccttcaccagaaccaacacggaaagaaaaagacaagaaaggctgccattgtgtcattttctagaatcccttcagttttagctaccaacggccaggaaaagccctcatcttctctttctctcctcagtttacatcttgttggtacctttctagccttagacaaatgatcaccatgttagccttagacgaagaagctggctagtcctttctgtgaagctaatacaatggtcatttccagacaaatttaaaggaaacactaaggctgcttcaaagattatctgattcctttaaaatatatgtctatatacacagacatgctctttttttaagtgcttacattttaatagagatgaatcagttttggaatctaagctgtttgccaagctgaagctacaggttgtgaaataatttttaacttttggaatcatactgcctactgttactctaaatagaaatatagggttttttttaatgtgaatttttgcctatctttaaacatttcaatgtcagcctttgttaaccttaaatacactgaattgaatctacaaaagtgaaccatctcagacctttactgatactacaacttttgttttctgatggccaaaataccaaatgcctgttgtatttatggattaaaaactgcttataaaaccctgtgttactactcctactcttggagatgataatattctatgtggtcaaatatttggactcatttaggacttagatatttcagtgtacttgattttttaatttaactctttttcacagccacgctaagggtaaaaaggaataatttccttctgtcttccttttcaagtatttctgggtaagggattcaaaaaactaaaactgtttttgtttgtaatataaaatatggaattgatctttccagggtcagagatgattaatgtttttgctatatacttttatacattattttcttatcaaactagttaacaagtatttttatatgtttgtaagcagatatgctttcatagcataccttgtgtatatgtaaagataagtatttaattctcactgttcacttttaactgacaaagaaaaacaagtggaaactacagaaactgtggtagaacttttacttgctggtctggtcttggttgtacccatctttggccagtcacataactactcaagaaaccttcccaatagagtacaacaggatgagactctgaaatcactttcagtattccctgctagatattgattgttatttcaagtattaagtgtaagcttttaatggataattagtataactgtggatggcatctgattttgtttttaattctgtggattgtgtttaagcaattcaatagtatgttcctgattttgagatgctaagtggtattgcacagttgtcactttatcaagtgtgtacaacagtcccatgaagtttatagagcatacccttgt

SEQ ID NO: 174984 - DNA, 982 bp, Homo sapiens
  Payload ID: 14356
  Gene Symbol: RRAS2
  Gene Name: related RAS viral (r-ras) oncogene homolog 2
  Uniprot ID: P62070
  ENST ID: ENST00000532814
  CDS Start-End: 372-755
attgctctggccgaggccagagacctccgggagaggctgggccaccgagccgggctttactgctccgagggtccgggcgtggggctggagctggagccccgcgcgctgcttttccagccgcctgcggccgcgccttcaccgtcggggcgatagcggtggcaacttggccgcggctccgcgtggtctccgggcttccccgcgccgcctgagccggagctgcccgcttcaagtactgtgtatttctttgttcctattttgtaacggattatgatccaaccattgaagattcttacacaaagcagtgtgtgatagatgacagagcagcccggctagatattttggatacagcaggacaagaagagtttggagccatgagagaacagtatatgaggactggcgaaggcttcctgttggtcttttcagtcacagatagaggcagttttgaagaaatctataagtttcaaagacagattctcagagtaaaggatcgtgatgagttcccaatgattttaattggtaataaagcagatctggatcatcaaagacaggtaacacaggaagaaggacaacagttagcacggcagcttaaggtaacatacatggaggcatcagcaaagattaggatgaatgtagatcaagctttccatgaacttgtccgggttatcaggaaatttcaagagcaggaatgtcctccttcaccagaaccaacacggaaagaaaaagacaagaaaggctgccattgtgtcattttctagaatcccttcagttttagctaccaacggccaggaaaagccctcatcttctctttctctcctcagtttacatcttgttggtacctttctagccttagacaaatgatcaccatgttagccttagacgaagaagctggctagtcctttctgtgaagctaatacaatggtcatttccagacaaatttaaaggaaacactaaggctgcttcaaagattatctgattcctttaa

SEQ ID NO: 174985 - DNA, 497 bp, Homo sapiens
  Payload ID: 14356
  Gene Symbol: RRAS2
  Gene Name: related RAS viral (r-ras) oncogene homolog 2
  ENST ID: ENST00000531421
  CDS Start-End: 290-497
aatatttttgaactgtggttgactgtgggtaactgaaaccaaggaaagtgaaactggggataagcaaggtactgtagttttctttgatcagcacctgaaagatactgtgccacttcttctgatccccatggtttctgatgagaaatctgctgtttttctcctgtagtcctattttgtaacggattatgatccaaccattgaagattcttacacaaagcagtgtgtgatagatgacagagcagcccggctagatattttggatacagcaggacaagaagagtttggagccatgagagaacagtatatgaggactggcgaaggcttcctgttggtcttttcagtcacagatagaggcagttttgaagaaatctataagtttcaaagacagattctcagagtaaaggatcgtgatgagttcccaatgattttaattggtaataaagcagatctggatcatcaaagacaggtaacacaggaagaaggacaacagttagcac

SEQ ID NO: 174986 - DNA, 1278 bp, Homo sapiens
  Payload ID: 14356
  Gene Symbol: RRAS2
  Gene Name: related RAS viral (r-ras) oncogene homolog 2
  Uniprot ID: P62070
  ENST ID: ENST00000529237
  CDS Start-End: 240-623
atctcagatgcatgcagctcctgctgggcggtttcattctctgccagccattcattcacattaaaagcaatggcccattaaggaaataagtggatgatgctcctccatcacccatgtcctattttgtaacggattatgatccaaccattgaagattcttacacaaagcagtgtgtgatagatgacagagcagcccggctagatattttggatacagcaggacaagaagagtttggagccatgagagaacagtatatgaggactggcgaaggcttcctgttggtcttttcagtcacagatagaggcagttttgaagaaatctataagtttcaaagacagattctcagagtaaaggatcgtgatgagttcccaatgattttaattggtaataaagcagatctggatcatcaaagacaggtaacacaggaagaaggacaacagttagcacggcagcttaaggtaacatacatggaggcatcagcaaagattaggatgaatgtagatcaagctttccatgaacttgtccgggttatcaggaaatttcaagagcaggaatgtcctccttcaccagaaccaacacggaaagaaaaagacaagaaaggctgccattgtgtcattttctagaatcccttcagttttagctaccaacggccaggaaaagccctcatcttctctttctctcctcagtttacatcttgttggtacctttctagccttagacaaatgatcaccatgttagccttagacgaagaagctggctagtcctttctgtgaagctaatacaatggtcatttccagacaaatttaaaggaaacactaaggctgcttcaaagattatctgattcctttaaaatatatgtctatatacacagacatgctctttttttaagtgcttacattttaatagagatgaatcagttttggaatctaagctgtttgccaagctgaagctacaggttgtgaaataatttttaacttttggaatcatactgcctactgttactctaaatagaaatatagggttttttttaatgtgaatttttgcctatctttaaacatttcaatgtcagcctttgttaaccttaaatacactgaattgaatctacaaaagtgaaccatctcagacctttactgatactacaacttttgttttctgatggccaaaataccaaatgcctgttgtatttatggattaaaaactgcttataaaaccctgtgttactactcctactcttggagatgataatattctatgtggtcaaatatttggactcattta

SEQ ID NO: 174987 - DNA, 970 bp, Homo sapiens
  Payload ID: 14356
  Gene Symbol: RRAS2
  Gene Name: related RAS viral (r-ras) oncogene homolog 2
  Uniprot ID: P62070
  ENST ID: ENST00000526063
  CDS Start-End: 353-736
attgctctggccgaggccagagacctccgggagaggctgggccaccgagccgggctttactgctccgagggtccgggcgtggggctggagctggagccccgcgcgctgcttttccagccgcctgcggccgcgccttcaccgtcggggcgatagcggtggcaacttggccgcggctccgcgtggtctccgggcttccccgcgccgcctgagccggagctgcccgcttcaatcctattttgtaacggattatgatccaaccattgaagattcttacacaaagcagtgtgtgatagatgacagagcagcccggctagatattttggatacagcaggacaagaagagtttggagccatgagagaacagtatatgaggactggcgaaggcttcctgttggtcttttcagtcacagatagaggcagttttgaagaaatctataagtttcaaagacagattctcagagtaaaggatcgtgatgagttcccaatgattttaattggtaataaagcagatctggatcatcaaagacaggtaacacaggaagaaggacaacagttagcacggcagcttaaggtaacatacatggaggcatcagcaaagattaggatgaatgtagatcaagctttccatgaacttgtccgggttatcaggaaatttcaagagcaggaatgtcctccttcaccagaaccaacacggaaagaaaaagacaagaaaggctgccattgtgtcattttctagaatcccttcagttttagctaccaacggccaggaaaagccctcatcttctctttctctcctcagtttacatcttgttggtacctttctagccttagacaaatgatcaccatgttagccttagacgaagaagctggctagtcctttctgtgaagctaatacaatggtcatttccagacaaatttaaaggaaacactaaggctgcttcaaagattatctgattcctttaaaatatat

SEQ ID NO: 174988 - DNA, 732 bp, Homo sapiens
  Payload ID: 14356
  Gene Symbol: RRAS2
  Gene Name: related RAS viral (r-ras) oncogene homolog 2
  ENST ID: ENST00000531807
  CDS Start-End: 235-732
aaaagcacacttgatgtatttgtatttctattaaaactgcaattgatggctactgataaaagctagtatagagctgaagatttgcagtggtgtcctctccaaaacgtagtttaggaatactatcatatgattactaatgttgtataaatgcatgagaatgacagataccaaattcaggatattgattacctcttggtgttgggggaggagagaggggaatattattgaggaggcatgcaagagtcttcaatcatattacaaatgttttgtttcctaagtcgggagtcctattttgtaacggattatgatccaaccattgaagattcttacacaaagcagtgtgtgatagatgacagagcagcccggctagatattttggatacagcaggacaagaagagtttggagccatgagagaacagtatatgaggactggcgaaggcttcctgttggtcttttcagtcacagatagaggcagttttgaagaaatctataagtttcaaagacagattctcagagtaaaggatcgtgatgagttcccaatgattttaattggtaataaagcagatctggatcatcaaagacaggtaacacaggaagaaggacaacagttagcacggcagcttaaggtaacatacatggaggcatcagcaaagattaggatgaatgtagatcaagctttccatgaacttgtccgggttatcaggaaatttcaagagcaggaatgtcctcct

SEQ ID NO: 174989 - DNA, 888 bp, Homo sapiens
  Payload ID: 14356
  Gene Symbol: RRAS2
  Gene Name: related RAS viral (r-ras) oncogene homolog 2
  ENST ID: ENST00000532950
  CDS Start-End: 278-421
ggcaggcgctgcggagacgcgtagaggagcgcgccccccggccgctgccgcccctggcccgtgccgtcaccccgcttctccgcgcctcgggcggtacccagccagtccccagcgccgcgctaccgcgctgaccggccctccagacgcctcccggtacccgggaccccagcccggccgctcgcccgcagcccgccggccgcacacgtccccggagccgggcctagggcgggcggcagcggcggctcggcgcagtcaggctgggctctgtagcgtccccatggccgcggccggctggcgggacggctccggccaggagaagtaccggctcgtggtggtcggcgggggcggcgtgggcaagtcggcgctcaccatccagttcatccagaatcatttgttgaagaaatacctccactgtgaatagtatagtacctggatgctctagatgatattaaagaagtaaaggaagcagtcctattttgtaacggattatgatccaaccattgaagattcttacacaaagcagtgtgtgatagatgacagagcagcccggctagatattttggatacagcaggacaagaagagtttggagccatgagagaacagtatatgaggactggcgaaggcttcctgttggtcttttcagtcacagatagaggcagttttgaagaaatctataagtttcaaagacagattctcagagtaaaggatcgtgatgagttcccaatgattttaattggtaataaagcagatctggatcatcaaagacaggtaacacaggaagaaggacaacagttagcacggcagcttaaggtaacatacatggaggcatcagcaaagattaggatgaatgtagatcaagctttccatgaacttgtccgggttatcag

SEQ ID NO: 174990 - DNA, 815 bp, Homo sapiens
  Payload ID: 14356
  Gene Symbol: RRAS2
  Gene Name: related RAS viral (r-ras) oncogene homolog 2
  ENST ID: ENST00000526717
  CDS Start-End: 286-444
ctgcgttcggcaggcgctgcggagacgcgtagaggagcgcgccccccggccgctgccgcccctggcccgtgccgtcaccccgcttctccgcgcctcgggcggtacccagccagtccccagcgccgcgctaccgcgctgaccggccctccagacgcctcccggtacccgggaccccagcccggccgctcgcccgcagcccgccggccgcacacgtccccggagccgggcctagggcgggcggcagcggcggctcggcgcagtcaggctgggctctgtagcgtccccatggccgcggccggctggcgggacggctccggccaggagaagtaccggctcgtggtggtcggcgggggcggcgtgggcaagtcggcgctcaccatccagttcatccaggtctttcgaaactcttgggttccttctttcattcatgtatttcaaatttgaaagctacaagaattgttttccttccatccatatctcctagcaacccagttaaacccacagtcctattttgtaacggattatgatccaaccattgaagattcttacacaaagcagtgtgtgatagatgacagagcagcccggctagatattttggatacagcaggacaagaagagtttggagccatgagagaacagtatatgaggactggcgaaggcttcctgttggtcttttcagtcacagatagaggcagttttgaagaaatctataagtttcaaagacagattctcagagtaaaggatcgtgatgagttcccaatgattttaattggtaataaagcagatctggatcatcaaagacaggtgagaaggaa

SEQ ID NO: 174991 - DNA, 993 bp, Homo sapiens
  Payload ID: 14356
  Gene Symbol: RRAS2
  Gene Name: related RAS viral (r-ras) oncogene homolog 2
  Uniprot ID: P62070
  ENST ID: ENST00000534746
  CDS Start-End: 212-595
gtggtattcaggtgatgaatgtggattccgttttgagttggagaaatttctttttgtcagtttggatttaattttaagaaataatgagtcctattttgtaacggattatgatccaaccattgaagattcttacacaaagcagtgtgtgatagatgacagagcagcccggctagatattttggatacagcaggacaagaagagtttggagccatgagagaacagtatatgaggactggcgaaggcttcctgttggtcttttcagtcacagatagaggcagttttgaagaaatctataagtttcaaagacagattctcagagtaaaggatcgtgatgagttcccaatgattttaattggtaataaagcagatctggatcatcaaagacaggtaacacaggaagaaggacaacagttagcacggcagcttaaggtaacatacatggaggcatcagcaaagattaggatgaatgtagatcaagctttccatgaacttgtccgggttatcaggaaatttcaagagcaggaatgtcctccttcaccagaaccaacacggaaagaaaaagacaagaaaggctgccattgtgtcattttctagaatcccttcagttttagctaccaacggccaggaaaagccctcatcttctctttctctcctcagtttacatcttgttggtacctttctagccttagacaaatgatcaccatgttagccttagacgaagaagctggctagtcctttctgtgaagctaatacaatggtcatttccagacaaatttaaaggaaacactaaggctgcttcaaagattatctgattcctttaaaatatatgtctatatacacagacatgctctttttttaagtgcttacattttaatagagatgaatcagttttggaatctaagctgtttgccaagctgaagctacaggttgtgaaataatttttaacttttggaatcatactgcctactgttactctaaatagaaatataggg

SEQ ID NO: 174992 - DNA, 2034 bp, Homo sapiens
  Payload ID: 14356
  Gene Symbol: RRAS2
  Gene Name: related RAS viral (r-ras) oncogene homolog 2
  Uniprot ID: P62070
  ENST ID: ENST00000537760
  CDS Start-End: 114-623
atctcagatgcatgcagctcctgctgggcggtttcattctctgccagccattcattcacattaaaagcaatggcccattaaggaaataagtggatgatgctcctccatcacccatgtcctattttgtaacggattatgatccaaccattgaagattcttacacaaagcagtgtgtgatagatgacagagcagcccggctagatattttggatacagcaggacaagaagagtttggagccatgagagaacagtatatgaggactggcgaaggcttcctgttggtcttttcagtcacagatagaggcagttttgaagaaatctataagtttcaaagacagattctcagagtaaaggatcgtgatgagttcccaatgattttaattggtaataaagcagatctggatcatcaaagacaggtaacacaggaagaaggacaacagttagcacggcagcttaaggtaacatacatggaggcatcagcaaagattaggatgaatgtagatcaagctttccatgaacttgtccgggttatcaggaaatttcaagagcaggaatgtcctccttcaccagaaccaacacggaaagaaaaagacaagaaaggctgccattgtgtcattttctagaatcccttcagttttagctaccaacggccaggaaaagccctcatcttctctttctctcctcagtttacatcttgttggtacctttctagccttagacaaatgatcaccatgttagccttagacgaagaagctggctagtcctttctgtgaagctaatacaatggtcatttccagacaaatttaaaggaaacactaaggctgcttcaaagattatctgattcctttaaaatatatgtctatatacacagacatgctctttttttaagtgcttacattttaatagagatgaatcagttttggaatctaagctgtttgccaagctgaagctacaggttgtgaaataatttttaacttttggaatcatactgcctactgttactctaaatagaaatatagggttttttttaatgtgaatttttgcctatctttaaacatttcaatgtcagcctttgttaaccttaaatacactgaattgaatctacaaaagtgaaccatctcagacctttactgatactacaacttttgttttctgatggccaaaataccaaatgcctgttgtatttatggattaaaaactgcttataaaaccctgtgttactactcctactcttggagatgataatattctatgtggtcaaatatttggactcatttaggacttagatatttcagtgtacttgattttttaatttaactctttttcacagccacgctaagggtaaaaaggaataatttccttctgtcttccttttcaagtatttctgggtaagggattcaaaaaactaaaactgtttttgtttgtaatataaaatatggaattgatctttccagggtcagagatgattaatgtttttgctatatacttttatacattattttcttatcaaactagttaacaagtatttttatatgtttgtaagcagatatgctttcatagcataccttgtgtatatgtaaagataagtatttaattctcactgttcacttttaactgacaaagaaaaacaagtggaaactacagaaactgtggtagaacttttacttgctggtctggtcttggttgtacccatctttggccagtcacataactactcaagaaaccttcccaatagagtacaacaggatgagactctgaaatcactttcagtattccctgctagatattgattgttatttcaagtattaagtgtaagcttttaatggataattagtataactgtggatggcatctgattttgtttttaattctgtggattgtgtttaagcaattcaatagtatgttcctgattttgagatgctaagtggtattgcacagttgtcactttatcaagtgtgtacaacagtcccatgaagtttatagagcatacccttgtatagcttcaggtgctagaattaaaattgatctgttatc

SEQ ID NO: 174993 - DNA, 612 bp, Homo sapiens
  Payload ID: 14356
  Gene Symbol: RRAS2
  Gene Name: related RAS viral (r-ras) oncogene homolog 2
  ENST ID: ENST00000545643
  CDS Start-End: 1-612
atggccgcggccgctggcggacggctccggcaggagaagtaccggctcgtggtggtcggcgggggcggcgtgggcaagtcggcgctcaccatccagttcatccagtcctattttgtaacggattatgatccaaccattgaagattcttacacaaagcagtgtgtgatagatgacagagcagcccggctagatattttggatacagcaggacaagaagagtttggagccatgagagaacagtatatgaggactggcgaaggcttcctgttggtcttttcagtcacagatagaggcagttttgaagaaatctataagtttcaaagacagattctcagagtaaaggatcgtgatgagttcccaatgattttaattggtaataaagcagatctggatcatcaaagacaggtaacacaggaagaaggacaacagttagcacggcagcttaaggtaacatacatggaggcatcagcaaagattaggatgaatgtagatcaagctttccatgaacttgtccgggttatcaggaaatttcaagagcaggaatgtcctccttcaccagaaccaacacggaaagaaaaagacaagaaaggctgccattgtgtcattttctag

SEQ ID NO: 174994 - DNA, 967 bp, Homo sapiens
  Payload ID: 14357
  Gene Symbol: RLN1
  Gene Name: relaxin 1
  Uniprot ID: P04808
  ENST ID: ENST00000223862
  CDS Start-End: 128-685
ggttgagccgggtagggaaagcagcctaaagcccgggacaggcacacaggcccaggtgtgtaggccacagcagccgcagtcctgaaaggctgcaacacccagacctccaggagagaccaggcccaggatgcctcgcctgttcttgttccacctgctagaattctgtttactactgaaccaattttccagagcagtcgcggccaaatggaaggacgatgttattaaattatgcggccgcgaattagttcgcgcgcagattgccatttgcggcatgagcacctggagcaaaaggtctctgagccaggaagatgctcctcagacacctagaccagtggcagaaattgtaccatccttcatcaacaaagatacagaaactataattatcatgttggaattcattgctaatttgccaccggagctgaaggcagccctatctgagaggcaaccatcattaccagagctacagcagtatgtacctgcattaaaggattccaatcttagctttgaagaatttaagaaacttattcgcaataggcaaagtgaagccgcagacagcaatccttcagaattaaaatacttaggcttggatactcattctcaaaaaaagagacgaccctacgtggcactgtttgagaaatgttgcctaattggttgtaccaaaaggtctcttgctaaatattgctgagatgaagctaattgtgcacatcttgtctaattttcacacatagtcttgatgacatttcactgatgcttctgtcaggtcccactaattattagaatataagaaatctttattaatgtttagatttttcatttggtgtgtaagaaaatattctttgtatgattgtagtttctgtaaatgacactttctatgctgaagtctttttgtctttttattaacagtataattgtgttgattctttttaatgctgttaacttaaaattacaataaaacctttgccacttt

SEQ ID NO: 174995 - DNA, 1177 bp, Homo sapiens
  Payload ID: 14358
  Gene Symbol: RLN2
  Gene Name: relaxin 2
  Uniprot ID: P04090
  ENST ID: ENST00000381627
  CDS Start-End: 390-947
tcaaatttgtttctgtgtgtgtaaaaggaaaggcttcatatctaaaatgactttacctcagtatactaaattgtttgagggtaatgaatgagaagaacacaactgtaaaagggccaaggacagagggatgggcaaatgaaggaaaggcagagagggagaccaagagctgagggggaaaattctgtggaggggtgtgggaaaggggtggagctggcacccttgccttaaaagctgagtgatagcccaagggatacaaaagaccgcttgagccgggtagggaaagcagcctaaagcccgggacaggcacacaggcccaggtgtgtaggccacagcagctgcagtcctgaaaggctgcaacgtcccgacctccaggagagaccaggcccaggatgcctcgcctgttttttttccacctgctaggagtctgtttactactgaaccaattttccagagcagtcgcggactcatggatggaggaagttattaaattatgcggccgcgaattagttcgcgcgcagattgccatttgcggcatgagcacctggagcaaaaggtctctgagccaggaagatgctcctcagacacctagaccagtggcagaaattgtgccatccttcatcaacaaagatacagaaaccataaatatgatgtcagaatttgttgctaatttgccacaggagctgaagttaaccctgtctgagatgcagccagcattaccacagctacaacaacatgtacctgtattaaaagattccagtcttctctttgaagaatttaagaaacttattcgcaatagacaaagtgaagccgcagacagcagtccttcagaattaaaatacttaggcttggatactcattctcgaaaaaagagacaactctacagtgcattggctaataaatgttgccatgttggttgtaccaaaagatctcttgctagattttgctgagatgaagctaattgtgcacatctcgtataatattcacacatattcttaatgacatttcactgatgcttctatcaggtcccatcaattcttagaatatctaagaatctttgttagatattaggtcccatcaattcttagaatatctaaacatctttgttgatgtttagatttttttatttgatgtgtaagaaaatgttctttgtgtgattaaatgacacatttttttgctg

SEQ ID NO: 174996 - DNA, 733 bp, Homo sapiens
  Payload ID: 14358
  Gene Symbol: RLN2
  Gene Name: relaxin 2
  ENST ID: ENST00000416837
  CDS Start-End: 1-206
gcacctggagcaaaaggtctctgagccaggaagatgctcctcagacacctagaccagtggcaggtgattttattcaaacagtctcactgggaatctcaccggacggagggaaagcactgagaacaggaagctgcttcacccgagagttccttggtgccctttccaaattgtgccatccttcatcaacaaagatacagaaaccataaatatgatgtcagaatttgttgctaatttgccacaggagctgaagttaaccctgtctgagatgcagccagcattaccacagctacaacaacatgtacctgtattaaaagattccagtcttctctttgaagaatttaagaaacttattcgcaatagacaaagtgaagccgcagacagcagtccttcagaattaaaatacttaggcttggatactcattctcgaaaaaagagacaactctacagtgcattggctaataaatgttgccatgttggttgtaccaaaagatctcttgctagattttgctgagatgaagctaattgtgcacatctcgtataatattcacacatattcttaatgacatttcactgatgcttctatcaggtcccatcaattcttagaatatctaagaatctttgttagatattaggtcccatcaattcttagaatatctaaacatctttgttgatgtttagatttttttatttgatgtgtaagaaaatgttctttgtgtgattaaatgacacattt

SEQ ID NO: 174997 - DNA, 580 bp, Homo sapiens
  Payload ID: 14359
  Gene Symbol: RLN3
  Gene Name: relaxin 3
  Uniprot ID: Q8WXF3
  ENST ID: ENST00000431365
  CDS Start-End: 58-486
gccaagaggcagcagagacactggcccactctcacgttcaaagcatctccgtccagcatggccaggtacatgctgctgctgctcctggcggtatgggtgctgaccggggagctgtggccgggagctgaggcccgggcagcgccttacggggtcaggctttgcggccgagaattcatccgagcagtcatcttcacctgcgggggctcccggtggagacgatcagacatcctggcccacgaggctatgggagataccttcccggatgcagatgctgatgaagacagtctggcaggcgagctggatgaggccatggggtccagcgagtggctggccctgaccaagtcaccccaggccttttacagggggcgacccagctggcaaggaacccctggggttcttcggggcagccgagatgtcctggctggcctttccagcagctgctgcaagtgggggtgtagcaaaagtgaaatcagtagcctttgctagtttgagggctgggcagccgtgggcaccaggaccaatgccccagtcctgccatccactcaactagtgtctggctgggcacctgtctttcgagcct

SEQ ID NO: 174998 - DNA, 541 bp, Homo sapiens
  Payload ID: 14359
  Gene Symbol: RLN3
  Gene Name: relaxin 3
  ENST ID: ENST00000585987
  CDS Start-End: 1-330
atggccaggtacatgctgctgctgctcctggcggtatgggtgctgaccggggagctgtggccgggagctgaggcccgggcagcgccttacggggtcaggctttgcggccgagaattcatccgagcagtcatcttcacctgcgggggctcccggtggagacgatcagacatcctggcccacgaggctatggaaaagaacattgaggctccaagaagtaaatttacttgctcacgattagagaagctggattcatgctcagtcagcccagctcccaaatgtaccaggtcctcaattaataaagagagataccttcccggatgcagatgctgatgaagacagtctggcaggcgagctggatgaggccatggggtccagcgagtggctggccctgaccaagtcaccccaggccttttacagggggcgacccagctggcaaggaacccctggggttcttcggggcagccgagatgtcctggctggcctttccagcagctgctgcaagtgggggtgtagcaaaagtgaaatcagtagcctttgctag

SEQ ID NO: 174999 - DNA, 3842 bp, Homo sapiens
  Payload ID: 14360
  Gene Symbol: RXFP1
  Gene Name: relaxin/insulin-like family peptide receptor 1
  Uniprot ID: Q9HBX9
  ENST ID: ENST00000307765
  CDS Start-End: 252-2525
aaagaaggagattaggacatttagagaaggagggcggggaggagagatcctgagaatagaaaggaggaaagaaaaaaagaggaatggaaagagacagagaaaggaaatgggagtggaaggagggaggactgctttgtaactgctaagattgcagacagaaatagcacacaaccactgtgagctgtatgcgattcagaaaccaagaccaaattttgctcactttcattaatcagttgctcagatagaaggaaatgacatctggttctgtcttcttctacatcttaatttttggaaaatatttttctcatgggggtggacaggatgtcaagtgctcccttggctatttcccctgtgggaacatcacaaagtgcttgcctcagctcctgcactgtaacggtgtggacgactgcgggaatcaggccgatgaggacaactgtggagacaacaatggatggtctctgcaatttgacaaatattttgccagttactacaaaatgacttcccaatatccttttgaggcagaaacacctgaatgtttggtcggttctgtgccagtgcaatgtctttgccaaggtctggagcttgactgtgatgaaaccaatttacgagctgttccatcggtttcttcaaatgtgactgcaatgtcacttcagtggaacttaataagaaagcttcctcctgattgcttcaagaattatcatgatcttcagaagctgtacctgcaaaacaataagattacatccatctccatctatgctttcagaggactgaatagccttactaaactgtatctcagtcataacagaataaccttcctgaagccgggtgtttttgaagatcttcacagactagaatggctgataattgaagataatcacctcagtcgaatttccccaccaacattttatggactaaattctcttattctcttagtcctgatgaataacgtcctcacccgtttacctgataaacctctctgtcaacacatgccaagactacattggctggaccttgaaggcaaccatatccataatttaagaaatttgacttttatttcctgcagtaatttaactgttttagtgatgaggaaaaacaaaattaatcacttaaatgaaaatacttttgcacctctccagaaactggatgaattggatttaggaagtaataagattgaaaatcttccaccgcttatattcaaggacctgaaggagctgtcacaattgaatctttcctataatccaatccagaaaattcaagcaaaccaatttgattatcttgtcaaactcaagtctctcagcctagaagggattgaaatttcaaatatccaacaaaggatgtttagacctcttatgaatctctctcacatatattttaagaaattccagtactgtgggtatgcaccacatgttcgcagctgtaaaccaaacactgatggaatttcatctctagagaatctcttggcaagcattattcagagagtatttgtctgggttgtatctgcagttacctgctttggaaacatttttgtcatttgcatgcgaccttatatcaggtctgagaacaagctgtatgccatgtcaatcatttctctctgctgtgccgactgcttaatgggaatatatttattcgtgatcggaggctttgacctaaagtttcgtggagaatacaataagcatgcgcagctgtggatggagagtactcattgtcagcttgtaggatctttggccattctgtccacagaagtatcagttttactgttaacatttctgacattggaaaaatacatctgcattgtctatccttttagatgtgtgagacctggaaaatgcagaacaattacagttctgattctcatttggattactggttttatagtggctttcattccattgagcaataaggaatttttcaaaaactactatggcaccaatggagtatgcttccctcttcattcagaagatacagaaagtattggagcccagatttattcagtggcaatttttcttggtattaatttggccgcatttatcatcatagttttttcctatggaagcatgttttatagtgttcatcaaagtgccataacagcaactgaaatacggaatcaagttaaaaaagagatgatccttgccaaacgttttttctttatagtatttactgatgcattatgctggatacccatttttgtagtgaaatttctttcactgcttcaggtagaaataccaggtaccataacctcttgggtagtgatttttattctgcccattaacagtgctttgaacccaattctctatactctgaccacaagaccatttaaagaaatgattcatcggttttggtataactacagacaaagaaaatctatggacagcaaaggtcagaaaacatatgctccatcattcatctgggtggaaatgtggccactgcaggagatgccacctgagttaatgaagccggaccttttcacatacccctgtgaaatgtcactgatttctcaatcaacgagactcaattcctattcatgactgactctgaaattcatttcttcgcagagaatactgtgggggtgcttcatgagggatttactggtatgaaatgaataccacaaaattaatttataataatagctaagataaatattttacaaggacatgaggaaaaataaaaatgactaatgctcttacaaagggaagtaattatatcaataatgtatatatattagtagacattttgcataagaaattaagagaaatctacttcagtaacattcattcatttttctaacatgcatttattgagtacccactactatgtgcatagcattgcaatatagtcctggaagtagacagtgcagaacctttcaatctgtagatggtgtttaatgacaaaagactatacaaagtccatctgcagttcctagtttaaagtagagctttacctgtcatgtgcatcagcaagaatcataggcacttttaaataaaggtttaaagttttggaatactcagtgtatttgcatcatagaaaatgtctgactgtttgcaaaataatattctgttttaagaatccatcttacctctctttaagtttccatacacttgagagccaacacaacatatttattactaaaaagatgctttgctagaaactcaaaaacagcacttcttttggcacttcctgcccagttttctctttgctttaaatgaacatcatcatatggaattggaataggagagtatgagtacggcagagaagtggatcagaaaaactagaatgaggataaacatttacattagtggaaactcctgaaataaatccttgtattgtcagttaactgattttcaacaaggatgccaagacaaaaaggcttttcaacaaaccgtgctgttttaagaacagacctaagtggtttaattcacccactttagatgggtgaatgttatggtgtgtgaaatatctcagtaaagcagttaaaaggaaaaagagctggaatgcactgattcaggaacttaatttcaggaaggaaaggtctgtatgtacacatttcactttaagcagaaaatctttcttcaagaaatgactttactttctctttgcactgccagcacgtgagatactaactttttaactagttgttcttctctagtctctacgttattagaattttttgctttcataatgtgaaacctttaagcaggagaagaaaatgttttcagatagtttcaaatacaccaaaaatgtttgaaacacaaaaatactggaatcaaaccataatgcacttattgaatatatagttgtatagatttgttctgaaaataaattatctgaaatttaactattaaaaa

SEQ ID NO: 175000 - DNA, 2130 bp, Homo sapiens
  Payload ID: 14360
  Gene Symbol: RXFP1
  Gene Name: relaxin/insulin-like family peptide receptor 1
  Uniprot ID: Q9HBX9
  ENST ID: ENST00000343542
  CDS Start-End: 1-2130
atgacatctggttctgtcttcttctacatcttaatttttggaaaatatttttctcatgggggtggacaggatgtcaagtgctcccttggctatttcccctgtgggaacatcacaaagtgcttgcctcagctcctgcactgtaacggtgtggacgactgcgggaatcaggccgatgaggacaactgtggagacaacaatggatggtctctgcaatttgacaaatattttgccagttactacaaaatgacttcccaatatccttttgaggcagaaacacctgaatgtttggtcggttctgtgccagtgcaatgtctttgccaaggtctggagcttgactgtgatgaaaccaatttacgagctgttccatcggtttcttcaaatgtgactgcaatgtcacttcagtggaacttaataagaaagcttcctcctgattgcttcaagaattatcatgatcttcagaagctgtacctgcaaaacaataagattacatccatctccatctatgctttcagaggactgaatagccttactaaactgtatctcagtcataacagaataaccttcctgaagccgggtgtttttgaagatcttcacagactagaatggctgataattgaagataatcacctcagtcgaatttccccaccaacattttatggactaaattctcttattctcttagtcctgatgaataacgtcctcacccgtttacctgataaacctctctgtcaacacatgccaagactacattggctggaccttgaaggcaaccatatccataatttaagaaatttgacttttatttcctgcagtaatttaactgttttagtgatgaggaaaaacaaaattaatcacttaaatgaaaatacttttgcacctctccagaaactggatgaattcagcctagaagggattgaaatttcaaatatccaacaaaggatgtttagacctcttatgaatctctctcacatatattttaagaaattccagtactgtgggtatgcaccacatgttcgcagctgtaaaccaaacactgatggaatttcatctctagagaatctcttggcaagcattattcagagagtatttgtctgggttgtatctgcagttacctgctttggaaacatttttgtcatttgcatgcgaccttatatcaggtctgagaacaagctgtatgccatgtcaatcatttctctctgctgtgccgactgcttaatgggaatatatttattcgtgatcggaggctttgacctaaagtttcgtggagaatacaataagcatgcgcagctgtggatggagagtactcattgtcagcttgtaggatctttggccattctgtccacagaagtatcagttttactgttaacatttctgacattggaaaaatacatctgcattgtctatccttttagatgtgtgagacctggaaaatgcagaacaattacagttctgattctcatttggattactggttttatagtggctttcattccattgagcaataaggaatttttcaaaaactactatggcaccaatggagtatgcttccctcttcattcagaagatacagaaagtattggagcccagatttattcagtggcaatttttcttggtattaatttggccgcatttatcatcatagttttttcctatggaagcatgttttatagtgttcatcaaagtgccataacagcaactgaaatacggaatcaagttaaaaaagagatgatccttgccaaacgttttttctttatagtatttactgatgcattatgctggatacccatttttgtagtgaaatttctttcactgcttcaggtagaaataccaggtaccataacctcttgggtagtgatttttattctgcccattaacagtgctttgaacccaattctctatactctgaccacaagaccatttaaagaaatgattcatcggttttggtataactacagacaaagaaaatctatggacagcaaaggtcagaaaacatatgctccatcattcatctgggtggaaatgtggccactgcaggagatgccacctgagttaatgaagccggaccttttcacatacccctgtgaaatgtcactgatttctcaatcaacgagactcaattcctattcatga

SEQ ID NO: 175001 - DNA, 3930 bp, Homo sapiens
  Payload ID: 14360
  Gene Symbol: RXFP1
  Gene Name: relaxin/insulin-like family peptide receptor 1
  ENST ID: ENST00000423548
  CDS Start-End: 264-2618
gtgcgtgtgtgtaaagaaggagattaggacatttagagaaggagggcggggaggagagatcctgagaatagaaaggaggaaagaaaaaaagaggaatggaaagagacagagaaaggaaatgggagtggaaggagggaggactgctttgtaactgctaagattgcagacagaaatagcacacaaccactgtgagctgtatgcgattcagaaaccaagaccaaattttgctcactttcattaatcagttgctcagatagaaggaaatgacatctggttctgtcttcttctacatcttaatttttggaaaatatttttctcatgggggtggacaggatgtcaagtgctcccttggctatttcccctgtgggaacatcacaaagtgcttgcctcagctcctgcactgtaacggtgtggacgactgcgggaatcaggccgatgaggacaactgtggagacaacaatggatggtctctgcaatttgacaaatattttgccagttactacaaaatgacttcccaatatccttttgaggcagaaacacctgaatgttcttttcatttctttcttttcattaccctcctcttcctggtccctcactgtcatcatgccttaccacttccccttgattcagtggtcggttctgtgccagtgcaatgtctttgccaaggtctggagcttgactgtgatgaaaccaatttacgagctgttccatcggtttcttcaaatgtgactgcaatgtcacttcagtggaacttaataagaaagcttcctcctgattgcttcaagaattatcatgatcttcagaagctgtacctgcaaaacaataagattacatccatctccatctatgctttcagaggactgaatagccttactaaactgtatctcagtcataacagaataaccttcctgaagccgggtgtttttgaagatcttcacagactagaatggctgataattgaagataatcacctcagtcgaatttccccaccaacattttatggactaaattctcttattctcttagtcctgatgaataacgtcctcacccgtttacctgataaacctctctgtcaacacatgccaagactacattggctggaccttgaaggcaaccatatccataatttaagaaatttgacttttatttcctgcagtaatttaactgttttagtgatgaggaaaaacaaaattaatcacttaaatgaaaatacttttgcacctctccagaaactggatgaattggatttaggaagtaataagattgaaaatcttccaccgcttatattcaaggacctgaaggagctgtcacaattgaatctttcctataatccaatccagaaaattcaagcaaaccaatttgattatcttgtcaaactcaagtctctcagcctagaagggattgaaatttcaaatatccaacaaaggatgtttagacctcttatgaatctctctcacatatattttaagaaattccagtactgtgggtatgcaccacatgttcgcagctgtaaaccaaacactgatggaatttcatctctagagaatctcttggcaagcattattcagagagtatttgtctgggttgtatctgcagttacctgctttggaaacatttttgtcatttgcatgcgaccttatatcaggtctgagaacaagctgtatgccatgtcaatcatttctctctgctgtgccgactgcttaatgggaatatatttattcgtgatcggaggctttgacctaaagtttcgtggagaatacaataagcatgcgcagctgtggatggagagtactcattgtcagcttgtaggatctttggccattctgtccacagaagtatcagttttactgttaacatttctgacattggaaaaatacatctgcattgtctatccttttagatgtgtgagacctggaaaatgcagaacaattacagttctgattctcatttggattactggttttatagtggctttcattccattgagcaataaggaatttttcaaaaactactatggcaccaatggagtatgcttccctcttcattcagaagatacagaaagtattggagcccagatttattcagtggcaatttttcttggtattaatttggccgcatttatcatcatagttttttcctatggaagcatgttttatagtgttcatcaaagtgccataacagcaactgaaatacggaatcaagttaaaaaagagatgatccttgccaaacgttttttctttatagtatttactgatgcattatgctggatacccatttttgtagtgaaatttctttcactgcttcaggtagaaataccaggtaccataacctcttgggtagtgatttttattctgcccattaacagtgctttgaacccaattctctatactctgaccacaagaccatttaaagaaatgattcatcggttttggtataactacagacaaagaaaatctatggacagcaaaggtcagaaaacatatgctccatcattcatctgggtggaaatgtggccactgcaggagatgccacctgagttaatgaagccggaccttttcacatacccctgtgaaatgtcactgatttctcaatcaacgagactcaattcctattcatgactgactctgaaattcatttcttcgcagagaatactgtgggggtgcttcatgagggatttactggtatgaaatgaataccacaaaattaatttataataatagctaagataaatattttacaaggacatgaggaaaaataaaaatgactaatgctcttacaaagggaagtaattatatcaataatgtatatatattagtagacattttgcataagaaattaagagaaatctacttcagtaacattcattcatttttctaacatgcatttattgagtacccactactatgtgcatagcattgcaatatagtcctggaagtagacagtgcagaacctttcaatctgtagatggtgtttaatgacaaaagactatacaaagtccatctgcagttcctagtttaaagtagagctttacctgtcatgtgcatcagcaagaatcataggcacttttaaataaaggtttaaagttttggaatactcagtgtatttgcatcatagaaaatgtctgactgtttgcaaaataatattctgttttaagaatccatcttacctctctttaagtttccatacacttgagagccaacacaacatatttattactaaaaagatgctttgctagaaactcaaaaacagcacttcttttggcacttcctgcccagttttctctttgctttaaatgaacatcatcatatggaattggaataggagagtatgagtacggcagagaagtggatcagaaaaactagaatgaggataaacatttacattagtggaaactcctgaaataaatccttgtattgtcagttaactgattttcaacaaggatgccaagacaaaaaggcttttcaacaaaccgtgctgttttaagaacagacctaagtggtttaattcacccactttagatgggtgaatgttatggtgtgtgaaatatctcagtaaagcagttaaaaggaaaaagagctggaatgcactgattcaggaacttaatttcaggaaggaaaggtctgtatgtacacatttcactttaagcagaaaatctttcttcaagaaatgactttactttctctttgcactgccagcacgtgagatactaactttttaactagttgttcttctctagtctctacgttattagaattttttgctttcataatgtgaaacctttaagcaggagaagaaaatgttttcagatagtttcaaatacaccaaaaatgtttgaaacacaaaaatactggaatcaaaccataatgcacttattgaatatatagttgtatagatttgttctgaaaataaattatctgaaatttaactatt

SEQ ID NO: 175002 - DNA, 3861 bp, Homo sapiens
  Payload ID: 14360
  Gene Symbol: RXFP1
  Gene Name: relaxin/insulin-like family peptide receptor 1
  ENST ID: ENST00000448688
  CDS Start-End: 744-2549
gtgcgtgtgtgtaaagaaggagattaggacatttagagaaggagggcggggaggagagatcctgagaatagaaaggaggaaagaaaaaaagaggaatggaaagagacagagaaaggaaatgggagtggaaggagggaggactgctttgtaactgctaagattgcagacagaaatagcacacaaccactgtgagctgtatgcgattcagaaaccaagaccaaattttgctcactttcattaatcagttgctcagatagaaggaaatgacatctggttctgtcttcttctacatcttaatttttggaaaatatttttctcatgggggtggacaggatgtcaagtgctcccttggctatttcccctgtgggaacatcacaaagtgcttgcctcagctcctgcactgtaacggtgtggacgactgcgggaatcaggccgatgaggacaactgtggagacaacaatggatggtctctgcaatttgacaaatattttgccagttactacaaaatgacttcccaatatccttttgaggcagaaacacctgaatgtttggtcggttctgtgccagtgcaatgtctttgccaaggtctggagcttgactgtgatgaaaccaatttacgagctgttccatcggtttcttcaaatgtgactgcaatgtcacttcagtggaacttaataagaaagcttcctcctgattgcttcaagaattatcatgatcttcagaagctgacactctaaagaacaatggtgacctgcactcagaacatgaaggcagccttgaaatccttactttatcattcccgcaatctggggtacctgcaaaacaataagattacatccatctccatctatgctttcagaggactgaatagccttactaaactgtatctcagtcataacagaataaccttcctgaagccgggtgtttttgaagatcttcacagactagaatggctgataattgaagataatcacctcagtcgaatttccccaccaacattttatggactaaattctcttattctcttagtcctgatgaataacgtcctcacccgtttacctgataaacctctctgtcaacacatgccaagactacattggctagtgatgaggaaaaacaaaattaatcacttaaatgaaaatacttttgcacctctccagaaactggatgaattggatttaggaagtaataagattgaaaatcttccaccgcttatattcaaggacctgaaggagctgtcacaattgaatctttcctataatccaatccagaaaattcaagcaaaccaatttgattatcttgtcaaactcaagtctctcagcctagaagggattgaaatttcaaatatccaacaaaggatgtttagacctcttatgaatctctctcacatatattttaagaaattccagtactgtgggtatgcaccacatgttcgcagctgtaaaccaaacactgatggaatttcatctctagagaatctcttggcaagcattattcagagagtatttgtctgggttgtatctgcagttacctgctttggaaacatttttgtcatttgcatgcgaccttatatcaggtctgagaacaagctgtatgccatgtcaatcatttctctctgctgtgccgactgcttaatgggaatatatttattcgtgatcggaggctttgacctaaagtttcgtggagaatacaataagcatgcgcagctgtggatggagagtactcattgtcagcttgtaggatctttggccattctgtccacagaagtatcagttttactgttaacatttctgacattggaaaaatacatctgcattgtctatccttttagatgtgtgagacctggaaaatgcagaacaattacagttctgattctcatttggattactggttttatagtggctttcattccattgagcaataaggaatttttcaaaaactactatggcaccaatggagtatgcttccctcttcattcagaagatacagaaagtattggagcccagatttattcagtggcaatttttcttggtattaatttggccgcatttatcatcatagttttttcctatggaagcatgttttatagtgttcatcaaagtgccataacagcaactgaaatacggaatcaagttaaaaaagagatgatccttgccaaacgttttttctttatagtatttactgatgcattatgctggatacccatttttgtagtgaaatttctttcactgcttcaggtagaaataccaggtaccataacctcttgggtagtgatttttattctgcccattaacagtgctttgaacccaattctctatactctgaccacaagaccatttaaagaaatgattcatcggttttggtataactacagacaaagaaaatctatggacagcaaaggtcagaaaacatatgctccatcattcatctgggtggaaatgtggccactgcaggagatgccacctgagttaatgaagccggaccttttcacatacccctgtgaaatgtcactgatttctcaatcaacgagactcaattcctattcatgactgactctgaaattcatttcttcgcagagaatactgtgggggtgcttcatgagggatttactggtatgaaatgaataccacaaaattaatttataataatagctaagataaatattttacaaggacatgaggaaaaataaaaatgactaatgctcttacaaagggaagtaattatatcaataatgtatatatattagtagacattttgcataagaaattaagagaaatctacttcagtaacattcattcatttttctaacatgcatttattgagtacccactactatgtgcatagcattgcaatatagtcctggaagtagacagtgcagaacctttcaatctgtagatggtgtttaatgacaaaagactatacaaagtccatctgcagttcctagtttaaagtagagctttacctgtcatgtgcatcagcaagaatcataggcacttttaaataaaggtttaaagttttggaatactcagtgtatttgcatcatagaaaatgtctgactgtttgcaaaataatattctgttttaagaatccatcttacctctctttaagtttccatacacttgagagccaacacaacatatttattactaaaaagatgctttgctagaaactcaaaaacagcacttcttttggcacttcctgcccagttttctctttgctttaaatgaacatcatcatatggaattggaataggagagtatgagtacggcagagaagtggatcagaaaaactagaatgaggataaacatttacattagtggaaactcctgaaataaatccttgtattgtcagttaactgattttcaacaaggatgccaagacaaaaaggcttttcaacaaaccgtgctgttttaagaacagacctaagtggtttaattcacccactttagatgggtgaatgttatggtgtgtgaaatatctcagtaaagcagttaaaaggaaaaagagctggaatgcactgattcaggaacttaatttcaggaaggaaaggtctgtatgtacacatttcactttaagcagaaaatctttcttcaagaaatgactttactttctctttgcactgccagcacgtgagatactaactttttaactagttgttcttctctagtctctacgttattagaattttttgctttcataatgtgaaacctttaagcaggagaagaaaatgttttcagatagtttcaaatacaccaaaaatgtttgaaacacaaaaatactggaatcaaaccataatgcacttattgaatatatagttgtatagatttgttctgaaaataaattatctgaaatttaactatt

SEQ ID NO: 175003 - DNA, 2175 bp, Homo sapiens
  Payload ID: 14360
  Gene Symbol: RXFP1
  Gene Name: relaxin/insulin-like family peptide receptor 1
  Uniprot ID: Q9HBX9
  ENST ID: ENST00000470033
  CDS Start-End: 1-2175
atgacatctggttctgtcttcttctacatcttaatttttggaaaatatttttctcatgggggtggacaggatgtcaagtgctcccttggctatttcccctgtgggaacatcacaaagtgcttgcctcagctcctgcactgtaacggtgtggacgactgcgggaatcaggccgatgaggacaactgtgtggtcggttctgtgccagtgcaatgtctttgccaaggtctggagcttgactgtgatgaaaccaatttacgagctgttccatcggtttcttcaaatgtgactgcaatgtcacttcagtggaacttaataagaaagcttcctcctgattgcttcaagaattatcatgatcttcagaagctgtacctgcaaaacaataagattacatccatctccatctatgctttcagaggactgaatagccttactaaactgtatctcagtcataacagaataaccttcctgaagccgggtgtttttgaagatcttcacagactagaatggctgataattgaagataatcacctcagtcgaatttccccaccaacattttatggactaaattctcttattctcttagtcctgatgaataacgtcctcacccgtttacctgataaacctctctgtcaacacatgccaagactacattggctggaccttgaaggcaaccatatccataatttaagaaatttgacttttatttcctgcagtaatttaactgttttagtgatgaggaaaaacaaaattaatcacttaaatgaaaatacttttgcacctctccagaaactggatgaattggatttaggaagtaataagattgaaaatcttccaccgcttatattcaaggacctgaaggagctgtcacaattgaatctttcctataatccaatccagaaaattcaagcaaaccaatttgattatcttgtcaaactcaagtctctcagcctagaagggattgaaatttcaaatatccaacaaaggatgtttagacctcttatgaatctctctcacatatattttaagaaattccagtactgtgggtatgcaccacatgttcgcagctgtaaaccaaacactgatggaatttcatctctagagaatctcttggcaagcattattcagagagtatttgtctgggttgtatctgcagttacctgctttggaaacatttttgtcatttgcatgcgaccttatatcaggtctgagaacaagctgtatgccatgtcaatcatttctctctgctgtgccgactgcttaatgggaatatatttattcgtgatcggaggctttgacctaaagtttcgtggagaatacaataagcatgcgcagctgtggatggagagtactcattgtcagcttgtaggatctttggccattctgtccacagaagtatcagttttactgttaacatttctgacattggaaaaatacatctgcattgtctatccttttagatgtgtgagacctggaaaatgcagaacaattacagttctgattctcatttggattactggttttatagtggctttcattccattgagcaataaggaatttttcaaaaactactatggcaccaatggagtatgcttccctcttcattcagaagatacagaaagtattggagcccagatttattcagtggcaatttttcttggtattaatttggccgcatttatcatcatagttttttcctatggaagcatgttttatagtgttcatcaaagtgccataacagcaactgaaatacggaatcaagttaaaaaagagatgatccttgccaaacgttttttctttatagtatttactgatgcattatgctggatacccatttttgtagtgaaatttctttcactgcttcaggtagaaataccaggtaccataacctcttgggtagtgatttttattctgcccattaacagtgctttgaacccaattctctatactctgaccacaagaccatttaaagaaatgattcatcggttttggtataactacagacaaagaaaatctatggacagcaaaggtcagaaaacatatgctccatcattcatctgggtggaaatgtggccactgcaggagatgccacctgagttaatgaagccggaccttttcacatacccctgtgaaatgtcactgatttctcaatcaacgagactcaattcctattcatga

SEQ ID NO: 175004 - DNA, 2735 bp, Homo sapiens
  Payload ID: 14360
  Gene Symbol: RXFP1
  Gene Name: relaxin/insulin-like family peptide receptor 1
  ENST ID: ENST00000460056
  CDS Start-End: 548-2578
aaccacaagatcataggccctaaagcagaaacaagcttaaactatggaggaatagaaagaagacaatgtgagtagggtgtgaagcaagggagaaagtcgtagggaatcgagactggacagacagaggcaacaaaaaccattgagaaccttgtacgtgttggacatatctagaaggagtcatctttgaagcagagagaaagccctctccagataccaaatctgctggcaccttgatcctggattcccagcctccagaactatcatctaacctatactgactgataagccttctaaaagcaaaaggaagaaaacagctttgttaatcgaggcctcttctgcaaagttcaccatagtttctcatgggggtggacaggatgtcaagtgctcccttggctatttcccctgtgggaacatcacaaagtgcttgcctcagctcctgcactgtaacggtgtggacgactgcgggaatcaggccgatgaggacaactgtggagacaacaatggatggtctctgcaatttgacaaatattttgccagttactacaaaatgacttcccaatatccttttgaggcagaaacacctgaatgtttggtcggttctgtgccagtgcaatgtctttgccaaggtctggagcttgactgtgatgaaaccaatttacgagctgttccatcggtttcttcaaatgtgactgcaatgtcacttcagtggaacttaataagaaagcttcctcctgattgcttcaagaattatcatgatcttcagaagctgtacctgcaaaacaataagattacatccatctccatctatgctttcagaggactgaatagccttactaaactgtatctcagtcataacagaataaccttcctgaagccgggtgtttttgaagatcttcacagactagaatggctgataattgaagataatcacctcagtcgaatttccccaccaacattttatggactaaattctcttattctcttagtcctgatgaataacgtcctcacccgtttacctgataaacctctctgtcaacacatgccaagactacattggctggaccttgaaggcaaccatatccataatttaagaaatttgacttttatttcctgcagtaatttaactgttttagtgatgaggaaaaacaaaattaatcacttaaatgaaaatacttttgcacctctccagaaactggatgaattggatttaggaagtaataagattgaaaatcttccaccgcttatattcaaggacctgaaggagctgtcacaattgaatctttcctataatccaatccagaaaattcaagcaaaccaatttgattatcttgtcaaactcaagtctctcagcctagaagggattgaaatttcaaatatccaacaaaggatgtttagacctcttatgaatctctctcacatatattttaagaaattccagtactgtgggtatgcaccacatgttcgcagctgtaaaccaaacactgatggaatttcatctctagagaatctcttggcaagcattattcagagagtatttgtctgggttgtatctgcagttacctgctttggaaacatttttgtcatttgcatgcgaccttatatcaggtctgagaacaagctgtatgccatgtcaatcatttctctctgctgtgccgactgcttaatgggaatatatttattcgtgatcggaggctttgacctaaagtttcgtggagaatacaataagcatgcgcagctgtggatggagagtactcattgtcagcttgtaggatctttggccattctgtccacagaagtatcagttttactgttaacatttctgacattggaaaaatacatctgcattgtctatccttttagatgtgtgagacctggaaaatgcagaacaattacagttctgattctcatttggattactggttttatagtggctttcattccattgagcaataaggaatttttcaaaaactactatggcaccaatggagtatgcttccctcttcattcagaagatacagaaagtattggagcccagatttattcagtggcaatttttcttggtattaatttggccgcatttatcatcatagttttttcctatggaagcatgttttatagtgttcatcaaagtgccataacagcaactgaaatacggaatcaagttaaaaaagagatgatccttgccaaacgttttttctttatagtatttactgatgcattatgctggatacccatttttgtagtgaaatttctttcactgcttcaggtagaaataccaggtaccataacctcttgggtagtgatttttattctgcccattaacagtgctttgaacccaattctctatactctgaccacaagaccatttaaagaaatgattcatcggttttggtataactacagacaaagaaaatctatggacagcaaaggtcagaaaacatatgctccatcattcatctgggtggaaatgtggccactgcaggagatgccacctgagttaatgaagccggaccttttcacatacccctgtgaaatgtcactgatttctcaatcaacgagactcaattcctattcatgactgactctgaaattcatttcttcgcagagaatactgtgggggtgcttcatgagggatttactggtatgaaatgaataccacaaaattaatttataataatagctaagataaatattttacaaggacatgaggaaaaataaaaatgactaatgctctt

SEQ ID NO: 175005 - DNA, 3676 bp, Homo sapiens
  Payload ID: 14360
  Gene Symbol: RXFP1
  Gene Name: relaxin/insulin-like family peptide receptor 1
  ENST ID: ENST00000342048
  CDS Start-End: 2-475
aatgacatctggttctgtcttcttctacatcttaatttttggaaaatatttttctcatgggggtggacaggatgtcaagtgctcccttggctatttcccctgtgggaacatcacaaagtgcttgcctcagctcctgcactgtaacggtgtggacgactgcgggaatcaggccgatgaggacaactgtggagacaacaatggatggtctctgcaatttgacaaatattttgccagttactacaaaatgacttcccaatatccttttgaggcagaaacacctgaatgtttggtcggttctgtgccagtgcaatgtctttgccaaggtctggagcttgactgtgatgaaaccaatttacgagctgttccatcggtttcttcaaatgtgactgcaatgtcacttcagtggaacttaataagaaagcttcctcctgattgcttcaagaattatcatgatcttcagaagctgacactctaaagaacaatggtgacctgcactcagaacatgaaggcagccttgaaatccttactttatcattcccgcaatctggggtacctgcaaaacaataagattacatccatctccatctatgctttcagaggactgaatagccttactaaactgtatctcagtcataacagaataaccttcctgaagccgggtgtttttgaagatcttcacagactagaatggctgataattgaagataatcacctcagtcgaatttccccaccaacattttatggactaaattctcttattctcttagtcctgatgaataacgtcctcacccgtttacctgataaacctctctgtcaacacatgccaagactacattggctggaccttgaaggcaaccatatccataatttaagaaatttgacttttatttcctgcagtaatttaactgttttagtgatgaggaaaaacaaaattaatcacttaaatgaaaatacttttgcacctctccagaaactggatgaattggatttaggaagtaataagattgaaaatcttccaccgcttatattcaaggacctgaaggagctgtcacaattgaatctttcctataatccaatccagaaaattcaagcaaaccaatttgattatcttgtcaaactcaagtctctcagcctagaagggattgaaatttcaaatatccaacaaaggatgtttagacctcttatgaatctctctcacatatattttaagaaattccagtactgtgggtatgcaccacatgttcgcagctgtaaaccaaacactgatggaatttcatctctagagaatctcttggcaagcattattcagagagtatttgtctgggttgtatctgcagttacctgctttggaaacatttttgtcatttgcatgcgaccttatatcaggtctgagaacaagctgtatgccatgtcaatcatttctctctgctgtgccgactgcttaatgggaatatatttattcgtgatcggaggctttgacctaaagtttcgtggagaatacaataagcatgcgcagctgtggatggagagtactcattgtcagcttgtaggatctttggccattctgtccacagaagtatcagttttactgttaacatttctgacattggaaaaatacatctgcattgtctatccttttagatgtgtgagacctggaaaatgcagaacaattacagttctgattctcatttggattactggttttatagtggctttcattccattgagcaataaggaatttttcaaaaactactatggcaccaatggagtatgcttccctcttcattcagaagatacagaaagtattggagcccagatttattcagtggcaatttttcttggtattaatttggccgcatttatcatcatagttttttcctatggaagcatgttttatagtgttcatcaaagtgccataacagcaactgaaatacggaatcaagttaaaaaagagatgatccttgccaaacgttttttctttatagtatttactgatgcattatgctggatacccatttttgtagtgaaatttctttcactgcttcaggtagaaataccaggtaccataacctcttgggtagtgatttttattctgcccattaacagtgctttgaacccaattctctatactctgaccacaagaccatttaaagaaatgattcatcggttttggtataactacagacaaagaaaatctatggacagcaaaggtcagaaaacatatgctccatcattcatctgggtggaaatgtggccactgcaggagatgccacctgagttaatgaagccggaccttttcacatacccctgtgaaatgtcactgatttctcaatcaacgagactcaattcctattcatgactgactctgaaattcatttcttcgcagagaatactgtgggggtgcttcatgagggatttactggtatgaaatgaataccacaaaattaatttataataatagctaagataaatattttacaaggacatgaggaaaaataaaaatgactaatgctcttacaaagggaagtaattatatcaataatgtatatatattagtagacattttgcataagaaattaagagaaatctacttcagtaacattcattcatttttctaacatgcatttattgagtacccactactatgtgcatagcattgcaatatagtcctggaagtagacagtgcagaacctttcaatctgtagatggtgtttaatgacaaaagactatacaaagtccatctgcagttcctagtttaaagtagagctttacctgtcatgtgcatcagcaagaatcataggcacttttaaataaaggtttaaagttttggaatactcagtgtatttgcatcatagaaaatgtctgactgtttgcaaaataatattctgttttaagaatccatcttacctctctttaagtttccatacacttgagagccaacacaacatatttattactaaaaagatgctttgctagaaactcaaaaacagcacttcttttggcacttcctgcccagttttctctttgctttaaatgaacatcatcatatggaattggaataggagagtatgagtacggcagagaagtggatcagaaaaactagaatgaggataaacatttacattagtggaaactcctgaaataaatccttgtattgtcagttaactgattttcaacaaggatgccaagacaaaaaggcttttcaacaaaccgtgctgttttaagaacagacctaagtggtttaattcacccactttagatgggtgaatgttatggtgtgtgaaatatctcagtaaagcagttaaaaggaaaaagagctggaatgcactgattcaggaacttaatttcaggaaggaaaggtctgtatgtacacatttcactttaagcagaaaatctttcttcaagaaatgactttactttctctttgcactgccagcacgtgagatactaactttttaactagttgttcttctctagtctctacgttattagaattttttgctttcataatgtgaaacctttaagcaggagaagaaaatgttttcagatagtttcaaatacaccaaaaatgtttgaaacacaaaaatactggaatcaaaccataatgcacttattgaatatatagttgtatagatttgttctgaaaataaattatctgaaatttaactattaaaaa

SEQ ID NO: 175006 - DNA, 1775 bp, Homo sapiens
  Payload ID: 14360
  Gene Symbol: RXFP1
  Gene Name: relaxin/insulin-like family peptide receptor 1
  Uniprot ID: Q9HBX9
  ENST ID: ENST00000471616
  CDS Start-End: 1-570
atgacatctggttctgtcttcttctacatcttaatttttggaaaatatttttctcatgggggtggacaggatgtcaagtgctcccttggctatttcccctgtgggaacatcacaaagtgcttgcctcagctcctgcactgtaacggtgtggacgactgcgggaatcaggccgatgaggacaactgtggagacaacaatggatggtctctgcaatttgacaaatattttgccagttactacaaaatgacttcccaatatccttttgaggcagaaacacctgaatgtttggtcggttctgtgccagtgcaatgtctttgccaaggtctggagcttgactgtgatgaaaccaatttacgagctgttccatcggtttcttcaaatgtgactgcaatgtcacttcagtggaacttaataagaaagcttcctcctgattgcttcaagaattatcatgatcttcagaagctgtacctgcaaaacaataagattacatccatctccatctatgctttcagaggactgaatagccttactaaactgtccagagcagtaaaggatggctctgaaaaatgaagaggactgggcaaaacaggtatctcagtcataacagaataaccttcctgaagccgggtgtttttgaagatcttcacagactagaatggctgataattgaagataatcacctcagtcgaatttccccaccaacattttatggactaaattctcttattctcttagtcctgatgaataacgtcctcacccgtttacctgataaacctctctgtcaacacatgccaagactacattggctggaccttgaaggcaaccatatccataatttaagaaatttgacttttatttcctgcagtaatttaactgttttagtgatgaggaaaaacaaaattaatcacttaaatgaaaatacttttgcacctctccagaaactggatgaattggatttaggaagtaataagattgaaaatcttccaccgcttatattcaaggacctgaaggagctgtcacaattgaatctttcctataatccaatccagaaaattcaagcaaaccaatttgattatcttgtcaaactcaagtctctcagcctagaagggattgaaatttcaaatatccaacaaaggatgtttagacctcttatgaatctctctcacatatattttaagaaattccagtactgtgggtatgcaccacatgttcgcagctgtaaaccaaacactgatggaatttcatctctagagaatctcttggcaagcattattcagagagtatttgtctgggttgtatctgcagttacctgctttggaaacatttttgtcatttgcatgcgaccttatatcaggtctgagaacaagctgtatgccatgtcaatcatttctctctgctgcttcagaattcagtcattattctatcataggaacttgtgaattactttctccaagattttatatgacaccttgagcttgttgcgttgggagaatttcagtggaagagcagaaccaagtaatgccatcctcatctgagtccctaactgaatgctctacgtgattgcattttgttcatttattcgacacttctatgtgatgggtctagaacaatagacaagatctgtgctgttagagacttgcactttaaaggaaaatgaagaaatgattgcataattaactgtagagagtaactttgagagtggttaccaaagagagtctatgaatagatcctcatctgtaaatgaattattaggagaataaaaattacctcttcct

SEQ ID NO: 175007 - DNA, 3771 bp, Homo sapiens
  Payload ID: 14360
  Gene Symbol: RXFP1
  Gene Name: relaxin/insulin-like family peptide receptor 1
  ENST ID: ENST00000613319
  CDS Start-End: 579-2459
gtgcgtgtgtgtaaagaaggagattaggacatttagagaaggagggcggggaggagagatcctgagaatagaaaggaggaaagaaaaaaagaggaatggaaagagacagagaaaggaaatgggagtggaaggagggaggactgctttgtaactgctaagattgcagacagaaatagcacacaaccactgtgagctgtatgcgattcagaaaccaagaccaaattttgctcactttcattaatcagttgctcagatagaaggaaatgacatctggttctgtcttcttctacatcttaatttttggaaaatatttttctcatgggggtggacaggatgtcaagtgctcccttggctatttcccctgtgggaacatcacaaagtgcttgcctcagctcctgcactgtaacggtgtggacgactgcgggaatcaggccgatgaggacaactgtggtgagtgaagcccctgcagtcacgtggtcggttctgtgccagtgcaatgtctttgccaaggtctggagcttgactgtgatgaaaccaatttacgagctgttccatcggtttcttcaaatgtgactgcaatgtcacttcagtggaacttaataagaaagcttcctcctgattgcttcaagaattatcatgatcttcagaagctgtacctgcaaaacaataagattacatccatctccatctatgctttcagaggactgaatagccttactaaactgtatctcagtcataacagaataaccttcctgaagccgggtgtttttgaagatcttcacagactagaatggctgataattgaagataatcacctcagtcgaatttccccaccaacattttatggactaaattctcttattctcttagtcctgatgaataacgtcctcacccgtttacctgataaacctctctgtcaacacatgccaagactacattggctggaccttgaaggcaaccatatccataatttaagaaatttgacttttatttcctgcagtaatttaactgttttagtgatgaggaaaaacaaaattaatcacttaaatgaaaatacttttgcacctctccagaaactggatgaattggatttaggaagtaataagattgaaaatcttccaccgcttatattcaaggacctgaaggagctgtcacaattgaatctttcctataatccaatccagaaaattcaagcaaaccaatttgattatcttgtcaaactcaagtctctcctagaagggattgaaatttcaaatatccaacaaaggatgtttagacctcttatgaatctctctcacatatattttaagaaattccagtactgtgggtatgcaccacatgttcgcagctgtaaaccaaacactgatggaatttcatctctagagaatctcttggcaagcattattcagagagtatttgtctgggttgtatctgcagttacctgctttggaaacatttttgtcatttgcatgcgaccttatatcaggtctgagaacaagctgtatgccatgtcaatcatttctctctgctgtgccgactgcttaatgggaatatatttattcgtgatcggaggctttgacctaaagtttcgtggagaatacaataagcatgcgcagctgtggatggagagtactcattgtcagcttgtaggatctttggccattctgtccacagaagtatcagttttactgttaacatttctgacattggaaaaatacatctgcattgtctatccttttagatgtgtgagacctggaaaatgcagaacaattacagttctgattctcatttggattactggttttatagtggctttcattccattgagcaataaggaatttttcaaaaactactatggcaccaatggagtatgcttccctcttcattcagaagatacagaaagtattggagcccagatttattcagtggcaatttttcttggtattaatttggccgcatttatcatcatagttttttcctatggaagcatgttttatagtgttcatcaaagtgccataacagcaactgaaatacggaatcaagttaaaaaagagatgatccttgccaaacgttttttctttatagtatttactgatgcattatgctggatacccatttttgtagtgaaatttctttcactgcttcaggtagaaataccaggtaccataacctcttgggtagtgatttttattctgcccattaacagtgctttgaacccaattctctatactctgaccacaagaccatttaaagaaatgattcatcggttttggtataactacagacaaagaaaatctatggacagcaaaggtcagaaaacatatgctccatcattcatctgggtggaaatgtggccactgcaggagatgccacctgagttaatgaagccggaccttttcacatacccctgtgaaatgtcactgatttctcaatcaacgagactcaattcctattcatgactgactctgaaattcatttcttcgcagagaatactgtgggggtgcttcatgagggatttactggtatgaaatgaataccacaaaattaatttataataatagctaagataaatattttacaaggacatgaggaaaaataaaaatgactaatgctcttacaaagggaagtaattatatcaataatgtatatatattagtagacattttgcataagaaattaagagaaatctacttcagtaacattcattcatttttctaacatgcatttattgagtacccactactatgtgcatagcattgcaatatagtcctggaagtagacagtgcagaacctttcaatctgtagatggtgtttaatgacaaaagactatacaaagtccatctgcagttcctagtttaaagtagagctttacctgtcatgtgcatcagcaagaatcataggcacttttaaataaaggtttaaagttttggaatactcagtgtatttgcatcatagaaaatgtctgactgtttgcaaaataatattctgttttaagaatccatcttacctctctttaagtttccatacacttgagagccaacacaacatatttattactaaaaagatgctttgctagaaactcaaaaacagcacttcttttggcacttcctgcccagttttctctttgctttaaatgaacatcatcatatggaattggaataggagagtatgagtacggcagagaagtggatcagaaaaactagaatgaggataaacatttacattagtggaaactcctgaaataaatccttgtattgtcagttaactgattttcaacaaggatgccaagacaaaaaggcttttcaacaaaccgtgctgttttaagaacagacctaagtggtttaattcacccactttagatgggtgaatgttatggtgtgtgaaatatctcagtaaagcagttaaaaggaaaaagagctggaatgcactgattcaggaacttaatttcaggaaggaaaggtctgtatgtacacatttcactttaagcagaaaatctttcttcaagaaatgactttactttctctttgcactgccagcacgtgagatactaactttttaactagttgttcttctctagtctctacgttattagaattttttgctttcataatgtgaaacctttaagcaggagaagaaaatgttttcagatagtttcaaatacaccaaaaatgtttgaaacacaaaaatactggaatcaaaccataatgcacttattgaatatatagttgtatagatttgttctgaaaataaattatctgaaatttaactatt

SEQ ID NO: 175008 - DNA, 3319 bp, Homo sapiens
  Payload ID: 14361
  Gene Symbol: RXFP2
  Gene Name: relaxin/insulin-like family peptide receptor 2
  Uniprot ID: Q8WXD0
  ENST ID: ENST00000298386
  CDS Start-End: 72-2336
tgaacttactacatcagaactcctgctgaggtataagaggatacgtctaataactcaattgctgtaaacctatgattgtttttctggtttttaaacatctcttcagcctcagattgattacaatgttctttctacttcatttcatcgttctgatcaatgtcaaagattttgcactgactcaaggtagcatgatcactccttcatgccaaaaaggatattttccctgtgggaatcttaccaagtgcttaccccgagcttttcactgtgatggcaaggatgactgtgggaacggggcggacgaagagaactgtggtgacactagtggatgggcgaccatatttggcacagtgcatggaaatgctaacagcgtggccttaacacaggagtgctttctaaaacagtatccacaatgctgtgactgcaaagaaactgaattggaatgtgtaaatggtgacttaaagtctgtgccgatgatttctaacaatgtgacattactgtctcttaagaaaaacaaaatccacagtcttccagataaagttttcatcaaatacacaaaacttaaaaagatatttcttcagcataattgcattagacacatatccaggaaagcattttttggattatgtaatctgcaaatattatatctcaaccacaactgcatcacaaccctcagacctggaatattcaaagacttacatcagctaacttggctaattctagatgacaatccaataaccagaatttcacagcgcttgtttacgggattaaattccttgtttttcctgtctatggttaataactacttagaagctcttcccaagcagatgtgtgcccaaatgcctcaactcaactgggtggatttggaaggcaatagaataaagtatctcacaaattctacgtttctgtcgtgcgattcgctcacagtgctgtttctgcctagaaatcaaattggttttgttccagagaagacattttcttcattaaaaaatttaggagaactggatctgtctagcaatacgataacggaactatcacctcacctttttaaagacttgaagcttctacaaaagctgaacctgtcatccaatcctcttatgtatcttcacaagaaccagtttgaaagtcttaaacaacttcagtctctagacctggaaaggatagagattccaaatataaacacacgaatgtttcaacccatgaagaatctttctcacatttatttcaaaaactttcgatactgctcctatgctccccatgtccgaatatgtatgcccttgacggacggcatttcttcatttgaggacctcttggctaacaatatcctcagaatatttgtctgggttatagctttcattacctgctttggaaatctttttgtcattggcatgagatctttcattaaagctgaaaatacaactcacgctatgtccatcaaaatcctttgttgtgctgattgcctgatgggtgtttacttgttctttgttggcattttcgatataaaataccgagggcagtatcagaagtatgccttgctgtggatggagagcgtgcagtgccgcctcatggggttcctggccatgctgtccaccgaagtctctgttctgctactgacctacttgactttggagaagttcctggtcattgtcttccccttcagtaacattcgacctggaaaacggcagacctcagtcatcctcatttgcatctggatggcgggatttttaatagctgtaattccattttggaataaggattattttggaaacttttatgggaaaaatggagtatgtttcccactttattatgaccaaacagaagatattggaagcaaagggtattctcttggaattttcctaggtgtgaacttgctggcttttctcatcattgtgttttcctatattactatgttctgttccattcaaaaaaccgccttgcagaccacagaagtaaggaattgttttggaagagaggtggctgttgcaaatcgtttcttttttatagtgttctctgatgccatctgctggattcctgtatttgtagttaaaatcctttccctcttccgggtggaaataccagacacaatgacttcctggatagtgatttttttccttccagttaacagtgctttgaatccaatcctctatactctcacaaccaacttttttaaggacaagttgaaacagctgctgcacaaacatcagaggaaatcaattttcaaaattaaaaaaaaaagtttatctacatccattgtgtggatagaggactcctcttccctgaaacttggggttttgaacaaaataacacttggagacagtataatgaaaccagtttcctagcaatcattttggatcactggactttcagtggactacctaaaacaggggacagcttttggaagatgacatctgcaatgcttttcatctttaccaacggcaagcctttctgcacagagagcacagcagaatggctcctgtcactgcattccaatggcagctgtactatctaccaaccatgctgaggacagcaccaaaggttcctctcctcaccccacatgcctgaaaagcacatgtgaattcgtgtatagtgggctgaggtgcagctgatctctagctaatcaacacaacccaccaacaaatgaccacaggttggcactgtgtggtctttcacatcgggttgcactgtccatgaaatagaaacactcacaacatctgattccagtgtggccataataacagaaatctaacaactctttccttgccttttcaatatcaaataaaaccatcagcatcctgctggattgatagcaaaggatttccaaaatattcatctacccgaagtcctcctctgtgaaggccggtggagtagccactttgaaaacagaacttccaaccaggttaccatgtctaacctatgaccagagagtcacactgatgaagcctcataccatttgccttttggattttatttaatatcagaagagatgaattcttaagatatttttctgaaggttgcccagggcacaaacaaattggacactttcactgctaaaaagtacactttaatattcttaaagtataatttctttagagcagtatccctattgctggcaagttctgctttcataaaatatgcagataagaagtgttaaatgggattcaagaattatggttttatttgggactgtttgcatactcacaatggttttgttctcattgtttttaacaaaaaagcaatgaagtttggggtggttttttgaaaacgaaactgaaaaaaattatatgtgaaaatgagaactgggtaaataaaattatattttgca

SEQ ID NO: 175009 - DNA, 2731 bp, Homo sapiens
  Payload ID: 14361
  Gene Symbol: RXFP2
  Gene Name: relaxin/insulin-like family peptide receptor 2
  Uniprot ID: Q8WXD0
  ENST ID: ENST00000380314
  CDS Start-End: 72-2264
tgaacttactacatcagaactcctgctgaggtataagaggatacgtctaataactcaattgctgtaaacctatgattgtttttctggtttttaaacatctcttcagcctcagattgattacaatgttctttctacttcatttcatcgttctgatcaatgtcaaagattttgcactgactcaaggtagcatgatcactccttcatgccaaaaaggatattttccctgtgggaatcttaccaagtgcttaccccgagcttttcactgtgatggcaaggatgactgtgggaacggggcggacgaagagaactgtggtgacactagtggatgggcgaccatatttggcacagtgcatggaaatgctaacagcgtggccttaacacaggagtgctttctaaaacagtatccacaatgctgtgactgcaaagaaactgaattggaatgtgtaaatggtgacttaaagtctgtgccgatgatttctaacaatgtgacattactgtctcttaagaaaaacaaaatccacagtcttccagataaagttttcatcaaatacacaaaacttaaaaagatatttcttcagcataattgcattagacacatatccaggaaagcattttttggattatgtaatctgcaaatattatatctcaaccacaactgcatcacaaccctcagacctggaatattcaaagacttacatcagctaacttggctaattctagatgacaatccaataaccagaatttcacagcgcttgtttacgggattaaattccttgtttttcctgtctatggttaataactacttagaagctcttcccaagcagatgtgtgcccaaatgcctcaactcaactgggtggatttggaaggcaatagaataaagtatctcacaaattctacgtttctgtcgtgcgattcgctcacagtgctggatctgtctagcaatacgataacggaactatcacctcacctttttaaagacttgaagcttctacaaaagctgaacctgtcatccaatcctcttatgtatcttcacaagaaccagtttgaaagtcttaaacaacttcagtctctagacctggaaaggatagagattccaaatataaacacacgaatgtttcaacccatgaagaatctttctcacatttatttcaaaaactttcgatactgctcctatgctccccatgtccgaatatgtatgcccttgacggacggcatttcttcatttgaggacctcttggctaacaatatcctcagaatatttgtctgggttatagctttcattacctgctttggaaatctttttgtcattggcatgagatctttcattaaagctgaaaatacaactcacgctatgtccatcaaaatcctttgttgtgctgattgcctgatgggtgtttacttgttctttgttggcattttcgatataaaataccgagggcagtatcagaagtatgccttgctgtggatggagagcgtgcagtgccgcctcatggggttcctggccatgctgtccaccgaagtctctgttctgctactgacctacttgactttggagaagttcctggtcattgtcttccccttcagtaacattcgacctggaaaacggcagacctcagtcatcctcatttgcatctggatggcgggatttttaatagctgtaattccattttggaataaggattattttggaaacttttatgggaaaaatggagtatgtttcccactttattatgaccaaacagaagatattggaagcaaagggtattctcttggaattttcctaggtgtgaacttgctggcttttctcatcattgtgttttcctatattactatgttctgttccattcaaaaaaccgccttgcagaccacagaagtaaggaattgttttggaagagaggtggctgttgcaaatcgtttcttttttatagtgttctctgatgccatctgctggattcctgtatttgtagttaaaatcctttccctcttccgggtggaaataccagacacaatgacttcctggatagtgatttttttccttccagttaacagtgctttgaatccaatcctctatactctcacaaccaacttttttaaggacaagttgaaacagctgctgcacaaacatcagaggaaatcaattttcaaaattaaaaaaaaaagtttatctacatccattgtgtggatagaggactcctcttccctgaaacttggggttttgaacaaaataacacttggagacagtataatgaaaccagtttcctagcaatcattttggatcactggactttcagtggactacctaaaacaggggacagcttttggaagatgacatctgcaatgcttttcatctttaccaacggcaagcctttctgcacagagagcacagcagaatggctcctgtcactgcattccaatggcagctgtactatctaccaaccatgctgaggacagcaccaaaggttcctctcctcaccccacatgcctgaaaagcacatgtgaattcgtgtatagtgggctgaggtgcagctgatctctagctaatcaacacaacccaccaacaaatgaccacaggttggcactgtgtggtctttcacatcgggttgcactgtccatgaaatagaaacactcacaacatctgattccagtgtggccataataacagaaatctaacaactctttccttgccttttcaatatcaaataaaaccatcagcatcctgctggattgata

SEQ ID NO: 175010 - DNA, 1852 bp, Homo sapiens
  Payload ID: 14362
  Gene Symbol: RXFP3
  Gene Name: relaxin/insulin-like family peptide receptor 3
  Uniprot ID: Q9NSD7
  ENST ID: ENST00000330120
  CDS Start-End: 356-1765
ggggagttatgcgccagtgccccagtgaccgcgggacacggagaggggaagtctgcgttgtacataaggacctagggactccgagcttggcctgagaacccttggacgccgagtgcttgccttacgggctgcactcctcaactctgctccaaagcagccgctgagctcaactcctgcgtccagggcgttcgctgcgcgccaggacgcgcttagtacccagttcctgggctctctcttcagtagctgctttgaaagctcccacgcacgtcccgcaggctagcctggcaacaaaactggggtaaaccgtgttatcttaggtcttgtcccccagaacatgacctagaggtacctgcgcatgcagatggccgatgcagccacgatagccaccatgaataaggcagcaggcggggacaagctagcagaactcttcagtctggtcccggaccttctggaggcggccaacacgagtggtaacgcgtcgctgcagcttccggacttgtggtgggagctggggctggagttgccggacggcgcgccgccaggacatcccccgggcagcggcggggcagagagcgcggacacagaggcccgggtgcggattctcatcagcgtggtgtactgggtggtgtgcgccctggggttggcgggcaacctgctggttctctacctgatgaagagcatgcagggctggcgcaagtcctctatcaacctcttcgtcaccaacctggcgctgacggactttcagtttgtgctcaccctgcccttctgggcggtggagaacgctcttgacttcaaatggcccttcggcaaggccatgtgtaagatcgtgtccatggtgacgtccatgaacatgtacgccagcgtgttcttcctcactgccatgagtgtgacgcgctaccattcggtggcctcggctctgaagagccaccggacccgaggacacggccggggcgactgctgcggccggagcctgggggacagctgctgcttctcggccaaggcgctgtgtgtgtggatctgggctttggccgcgctggcctcgctgcccagtgccattttctccaccacggtcaaggtgatgggcgaggagctgtgcctggtgcgtttcccggacaagttgctgggccgcgacaggcagttctggctgggcctctaccactcgcagaaggtgctgctgggcttcgtgctgccgctgggcatcattatcttgtgctacctgctgctggtgcgcttcatcgccgaccgccgcgcggcggggaccaaaggaggggccgcggtagccggaggacgcccgaccggagccagcgcccggagactgtcgaaggtcaccaaatcagtgaccatcgttgtcctgtccttcttcctgtgttggctgcccaaccaggcgctcaccacctggagcatcctcatcaagttcaacgcggtgcccttcagccaggagtatttcctgtgccaggtatacgcgttccctgtgagcgtgtgcctagcgcactccaacagctgcctcaaccccgtcctctactgcctcgtgcgccgcgagttccgcaaggcgctcaagagcctgctgtggcgcatcgcgtctccttcgatcaccagcatgcgccccttcaccgccactaccaagccggagcacgaggatcaggggctgcaggccccggcgccgccccacgcggccgcggagccggacctgctctactacccacctggcgtcgtggtctacagcggggggcgctacgacctgctgcccagcagctctgcctactgacgcaggcctcaggcccagggcgcgccgtcggggcaaggtggccttccccgggcggtaaagaggtgaaaggatgaaggagggctgggg

SEQ ID NO: 175011 - DNA, 1852 bp, Homo sapiens; identical to SEQ ID NO: 175010
  Payload ID: 14362
  Gene Symbol: RXFP3
  Gene Name: relaxin/insulin-like family peptide receptor 3
  Uniprot ID: Q9NSD7
  ENST ID: ENST00000616205
  CDS Start-End: 356-1765

SEQ ID NO: 175012 - DNA, 1240 bp, Homo sapiens
  Payload ID: 14363
  Gene Symbol: RXFP4
  Gene Name: relaxin/insulin-like family peptide receptor 4
  Uniprot ID: Q8TDU9
  ENST ID: ENST00000368318
  CDS Start-End: 1-1125
atgcccacactcaatacttctgcctctccacccacattcttctgggccaatgcctccggaggcagtgtgctgagtgctgatgatgctccgatgcctgtcaaattcctagccctgaggctcatggttgccctggcctatgggcttgtgggggccattggcttgctgggaaatttggcggtgctgtgggtactgagtaactgtgcccggagagcccctggcccaccttcagacaccttcgtcttcaacctggctctggcggacctgggactggcactcactctccccttttgggcagccgagtcggcactggactttcactggcccttcggaggtgccctctgcaagatggttctgacggccactgtcctcaacgtctatgccagcatcttcctcatcacagcgctgagcgttgctcgctactgggtggtggccatggctgcggggccaggcacccacctctcactcttctgggcccgaatagccaccctggcagtgtgggcggcggctgccctggtgacggtgcccacagctgtcttcggggtggagggtgaggtgtgtggtgtgcgcctttgcctgctgcgtttccccagcaggtactggctgggggcctaccagctgcagagggtggtgctggctttcatggtgcccttgggcgtcatcaccaccagctacctgctgctgctggccttcctgcagcggcggcaacggcggcggcaggacagcagggtcgtggcccgctctgtccgcatcctggtggcttccttcttcctctgctggtttcccaaccatgtggtcactctctggggtgtcctggtgaagtttgacctggtgccctggaacagtactttctatactatccagacgtatgtcttccctgtcactacttgcttggcacacagcaatagctgcctcaaccctgtgctgtactgtctcctgaggcgggagccccggcaggctctggcaggcaccttcagggatctgcggttgaggctgtggccccagggcggaggctgggtgcaacaggtggccctaaagcaggtaggcaggcggtgggtcgcaagcaacccccgggagagccgcccttctaccctgctcaccaacctggacagagggacacccgggtgaagggcgcaagctgaacacactcctctttctgagatccaccaagtgtaggatccttgagtcctggggagaagctgccctctctgccaggctgcagtgccctcagggaaaagtctga

SEQ ID NO: 175013 - DNA, 3535 bp, Homo sapiens
  Payload ID: 14364
  Gene Symbol: RELT
  Gene Name: RELT tumor necrosis factor receptor
  Uniprot ID: Q969Z4
  ENST ID: ENST00000064780
  CDS Start-End: 262-1554
agagcggcgagcccctccgcggctcggggtgagtcgggcgcggggcgcagaccgcgctctgacgtcgggggcggagcggccgtgacgcgcgggggcgggtctgcgcaccttcccggcccagccggcgattcattcaaaaggcgcgcaggctgcgcggctgtccgggcgctcgccgagccgggccgcggcgccgagtcgaacggggagccgagctggagctgccgcggcgcagccaggccggcgaccaccaggggcctgaggatgaagccaagtctgctgtgccggcccctgtcctgcttccttatgctgctgccctggcctctcgccaccctgacatcaacaaccctttggcagtgcccacctggggaggagcccgacctggacccagggcagggcacattatgcaggccctgccccccaggcaccttctcagctgcatggggctccagcccatgccagccccatgcccgttgcagcctttggaggaggctggaggcccaggtgggcatggcaactcgagatacactctgtggagactgctggcctgggtggtttgggccttggggggttccccgcgttccatgtcaaccatgttcctgggcacctctgggtactcatggctgtgatgagtgggggcggcgggcccgacgtggcgtggaggtggcagcaggggccagcagcggtggtgagacacggcagcctgggaacggcacccgggcaggtggcccagaggagacagccgcccagtacgcggtcatcgccatcgtccctgtcttctgcctcatggggctgttgggcatcctggtgtgcaacctcctcaagcggaagggctaccactgcacggcgcacaaggaggtcgggcccggccctggaggtggaggcagtggaatcaaccctgcctaccggactgaggatgccaatgaggacaccattggggtcctggtgcgcttgatcacagagaagaaagagaatgctgcggccctggaggagctgctgaaagagtaccacagcaaacagctggtgcagacgagccacaggcctgtgtccaagctgccgccagcgcccccgaacgtgccacacatctgcccgcaccgccaccatctccacaccgtgcagggcctggcctcgctctctggcccctgctgctcccgctgtagccagaagaagtggcccgaggtgctgctgtcccctgaggctgtagccgccactactcctgttcccagccttctgcctaacccgaccagggttcccaaggccggggccaaggcagggcgtcagggcgagatcaccatcttgtctgtgggcaggttccgcgtggctcgaattcctgagcagcggacaagttcaatggtgtctgaggtgaagaccatcacggaggctgggccctcgtggggtgatctccctgactccccacagcctggcctcccccctgagcagcaggccctgctaggaagtggcggaagccgtacaaagtggctgaagcccccagcagagaacaaggccgaggagaaccgctatgtggtccggctaagtgagagcaacctggtcatctgaggggcggtctagtctaaggacactgcggccctgccctgggaggttccgaaggcttcctggaggaggtggagctgcagctgggactgtgaggaccgagaagcaatggcccagcagacgagacagcaaagaccaaggcctggaggtgggagcgtctgccccagtgaggaggcaggtggccggcgggcactgtgtacaggagcaggctgagccccgcccctggccctgctgccatgttgctcccctgaaggatgccccgacccccgtgcctgccctggctggatcctaggagcccacgggattctctgtatcatcagaggctgggcttggcagaggggaggggcctgtgcccgtcacccctggccccattccttggtaattagccacacccttgcctctgtacagggccctagagcagatgtgcgtccccctcctcttccagcaggtctataaagggaaggggtagcagaaagtcctgggctaggagagtgagtccctgggttctaatcttgggcacatctgtggccatcgctgggtccatttttctgactgtgaagtaaggagagacgtctcagtacccagggcctcttcagctctttgtaggttctgggctgggttgtgggggactggggagctgggctctaccatccctcccattagtagctttatccagccccgtttttgctgcttccagggcctctgccttcaaggcccccatggggctgtccatccatggctctgcctacggaaggggcttaatgcatgtgcctgcccctcccccagctgtttttaatgaaactgaaaaaatagacttgatcccggcaggactgtgatacagagccctagcctgcccagccagccccaagatctcaggagctttagggagaagacttggtggggctggagcacaccttgggcctcagtggtttctgtgtccctgtggtgccagtgcttctgggcagtgcaggcggctgccaggcccagccctgacttccactctggctcagcaacctggttatttatgtggggccgtgcaggcatgggcccactgcctgtccatcctgtttctcttatttattgaaactcaccattgccctatccttgtgtctccacccccttccatgtgttgaataataaaaggtgggaaagtgctgtcacgaggagctccttttctctgtgcccttcccagcttatccgcctgttccacttgtacctgtccagccctgccctgtgttgggcaccgtgacaggctgccctcccctcacagttcctgcacctcagcagccagggaagcagggcccagaggagacccatcaactcatctggttctcaccaaagcccctagctagaggcagggctgtcccacagaaatagtgtgagccacatatgtgactttaaattttctgacagtcacatttcaaaaagtaaaaagaagcaggtgaacttaatttttttttaacccagtctatccaaaatattttcatttcaatataaaatcagtataaaaagtgtgaatgagctgtttttgcttttgctttgaaatctggagtgtatcttacacatcttgattggaactcaaatatttcaagggctccatagccacgtggccagcagctaccacactggtcagcgcagcacctgaggaaatgcactgtgtggagcccgggaggtaattgggggtgaggaagatgtgcgggccagggaatgtgttccacagagagggacagcatgtgcaaaggctgagcaccaacacatagtggtcacctgggccttatgcccagggagcctccaaagcattcagctcctgcttggccagtgtggagaggaaaggagccacaggagcgggtgctacacccggcaagacagagcgtctccatctaaaattcctagggcaagcttccaacccggcccaagggccgcatgtggcccaggatatggctttgaatggggcctaacacaaattcataaactttcttaaaacatt

SEQ ID NO: 175014 - DNA, 2669 bp, Homo sapiens
  Payload ID: 14364
  Gene Symbol: RELT
  Gene Name: RELT tumor necrosis factor receptor
  Uniprot ID: Q969Z4
  ENST ID: ENST00000393580
  CDS Start-End: 228-1520
cgcgtcctgtcccggcgccttccgcgcaccggccaccgccagtctccgagccccgtgacctgcaggtcctccggccgcgactccgggccggccctgcgtggtggctgtcggggggcgcgcggggaagcagcggaacttgcggtgtgaggggccggcggggcccggagcggtccccggcccgggaaacttggaccgagaccaggccggcgaccaccaggggcctgaggatgaagccaagtctgctgtgccggcccctgtcctgcttccttatgctgctgccctggcctctcgccaccctgacatcaacaaccctttggcagtgcccacctggggaggagcccgacctggacccagggcagggcacattatgcaggccctgccccccaggcaccttctcagctgcatggggctccagcccatgccagccccatgcccgttgcagcctttggaggaggctggaggcccaggtgggcatggcaactcgagatacactctgtggagactgctggcctgggtggtttgggccttggggggttccccgcgttccatgtcaaccatgttcctgggcacctctgggtactcatggctgtgatgagtgggggcggcgggcccgacgtggcgtggaggtggcagcaggggccagcagcggtggtgagacacggcagcctgggaacggcacccgggcaggtggcccagaggagacagccgcccagtacgcggtcatcgccatcgtccctgtcttctgcctcatggggctgttgggcatcctggtgtgcaacctcctcaagcggaagggctaccactgcacggcgcacaaggaggtcgggcccggccctggaggtggaggcagtggaatcaaccctgcctaccggactgaggatgccaatgaggacaccattggggtcctggtgcgcttgatcacagagaagaaagagaatgctgcggccctggaggagctgctgaaagagtaccacagcaaacagctggtgcagacgagccacaggcctgtgtccaagctgccgccagcgcccccgaacgtgccacacatctgcccgcaccgccaccatctccacaccgtgcagggcctggcctcgctctctggcccctgctgctcccgctgtagccagaagaagtggcccgaggtgctgctgtcccctgaggctgtagccgccactactcctgttcccagccttctgcctaacccgaccagggttcccaaggccggggccaaggcagggcgtcagggcgagatcaccatcttgtctgtgggcaggttccgcgtggctcgaattcctgagcagcggacaagttcaatggtgtctgaggtgaagaccatcacggaggctgggccctcgtggggtgatctccctgactccccacagcctggcctcccccctgagcagcaggccctgctaggaagtggcggaagccgtacaaagtggctgaagcccccagcagagaacaaggccgaggagaaccgctatgtggtccggctaagtgagagcaacctggtcatctgaggggcggtctagtctaaggacactgcggccctgccctgggaggttccgaaggcttcctggaggaggtggagctgcagctgggactgtgaggaccgagaagcaatggcccagcagacgagacagcaaagaccaaggcctggaggtgggagcgtctgccccagtgaggaggcaggtggccggcgggcactgtgtacaggagcaggctgagccccgcccctggccctgctgccatgttgctcccctgaaggatgccccgacccccgtgcctgccctggctggatcctaggagcccacgggattctctgtatcatcagaggctgggcttggcagaggggaggggcctgtgcccgtcacccctggccccattccttggtaattagccacacccttgcctctgtacagggccctagagcagatgtgcgtccccctcctcttccagcaggtctataaagggaaggggtagcagaaagtcctgggctaggagagtgagtccctgggttctaatcttgggcacatctgtggccatcgctgggtccatttttctgactgtgaagtaaggagagacgtctcagtacccagggcctcttcagctctttgtaggttctgggctgggttgtgggggactggggagctgggctctaccatccctcccattagtagctttatccagccccgtttttgctgcttccagggcctctgccttcaaggcccccatggggctgtccatccatggctctgcctacggaaggggcttaatgcatgtgcctgcccctcccccagctgtttttaatgaaactgaaaaaatagacttgatcccggcaggactgtgatacagagccctagcctgcccagccagccccaagatctcaggagctttagggagaagacttggtggggctggagcacaccttgggcctcagtggtttctgtgtccctgtggtgccagtgcttctgggcagtgcaggcggctgccaggcccagccctgacttccactctggctcagcaacctggttatttatgtggggccgtgcaggcatgggcccactgcctgtccatcctgtttctcttatttattgaaactcaccattgccctatccttgtgtctccacccccttccatgtgttgaataataaaaggtgggaaagtgc

SEQ ID NO: 175015 - DNA, 586 bp, Homo sapiens
  Payload ID: 14364
  Gene Symbol: RELT
  Gene Name: RELT tumor necrosis factor receptor
  ENST ID: ENST00000545687
  CDS Start-End: 283-586
aaaggcgcgcaggctgcgcggctgtccgggcgctcgccgagccgggccgcggcgccgagtcgaacggggagccgagctggagctgccgcggcgcagccagattcccaccagggcgaacccagcaccgcctgtataccagactctgtgccaggcactgaacgtaaataaaagccttaccacagccctctgcaggcaggccacagagccagtgcaagacagagcagagcaggactgcaccccatactttgtatccccaggccggcgaccaccaggggcctgaggatgaagccaagtctgctgtgccggcccctgtcctgcttccttatgctgctgccctggcctctcgccaccctgacatcaacaaccctttggcagtgcccacctggggaggagcccgacctggacccagggcagggcacattatgcaggccctgccccccaggcaccttctcagctgcatggggctccagcccatgccagccccatgcccgttgcagcctttggaggaggctggaggcccaggtgggcatggcaactcgagatacactctgtggagactgctggcctgggtggtttgggccttggg

SEQ ID NO: 175016 - DNA, 744 bp, Homo sapiens
  Payload ID: 14364
  Gene Symbol: RELT
  Gene Name: RELT tumor necrosis factor receptor
  ENST ID: ENST00000544075
  CDS Start-End: 118-429
gcaggctgcgcggctgtccgggcgctcgccgagccgggccgcggcgccgagtcgaacggggagccgagctggagctgccgcggcgcagccaggccggcgaccaccaggggcctgaggatgaagccaagtctgctgtgccggcccctgtcctgcttccttatgctgctgccctggcctctcgccaccctgacatcaacaaccctttggcagtgcccacctggggaggagcccgacctggacccagggcagggcacattatgcaggccctgccccccaggcaccttctcagctgcatggggctccagcccatgccagccccatgcccgttgcagcctttggaggaggctggaggcccaggtgggcatggcaactcgagatacactctgtggagactgctggcctgggaatcaaccctgcctaccggactgaggatgccaatgaggacaccattggggtcctggtgcgcttgatcacagagaagaaagagaatgctgcggccctggaggagctgctgaaagagtaccacagcaaacagctggtgcagacgagccacaggcctgtgtccaagtgagtgggctggtgggagataacggggccaaaacctacattaaccagcctgcctcctggggatctcccacttgggtctccctcaagtcaccctgttccctgctggggtctcctgcccctggcctggcctatggccacttctgcctgtgccccctgcaggctgccgccagcgccccc

SEQ ID NO: 175017 - DNA, 1326 bp, Homo sapiens
  Payload ID: 14365
  Gene Symbol: RELL1
  Gene Name: RELT-like 1
  Uniprot ID: Q8IUW5
  ENST ID: ENST00000314117
  CDS Start-End: 90-905
actcgatcagcccgccggctccggagcggctctgccttcccgagcgcgggacgcggcgccctgggggaggagggcgaagcgacgcggcgatggctccgcgggcactcccggggtccgccgtcctagccgctgctgtcttcgtgggaggcgccgtgagttcgccgctggtggctccggacaatgggagcagccgcacattgcactccagaacagagacgaccccgtcgcccagcaacgatactgggaatggacacccagaatatattgcatacgcgcttgtccctgtgttctttatcatgggtctctttggcgtcctcatttgccacctgcttaagaagaaaggctatcgttgtacaacagaagcagagcaagatatcgaagaggaaaaggttgaaaagatagaattgaatgacagtgtgaatgaaaacagtgacactgttgggcaaatcgtccactacatcatgaaaaatgaagcgaatgctgatgtcttaaaggcgatggtagcagataacagcctgtatgatcctgaaagccccgtgacccccagcacaccagggagcccgccagtgagtcctgggcctttgtcaccaggggggacgccagggaagcacgtctgtggccatcatctgcatacggtgggcggtgttgtcgagagggatgtgtgtcatcggtgtaggcacaagcggtggcactttataaagcccactaacaagtccagagagagcagaccacggcgccaaggcgaggtcacggtcctttctgttggcagatttagagttacaaaagtggagcacaagtcaaaccagaaggaacggagaagcctgatgtctgttagtggggctgaaaccgtcaatggggaggtgccggcaacacctgtgaagagagaacgcagtggcacagagtagcagtgtcctgaatgacagctcatctacacagagtgaaactccagatatgtgacaagcagcatgggacagatgctgacaatcagaacagatgctggatgtaaacaactggtaaggctgcactggtgcatgctggcagaatcacctgctatgcatccagggagcaaatgcatctgcatgctcagcatgacaccagcttacctccctgtgcaaatcccctcccctaatcagtctcatccaaatcttctcctgcagtagcagcttctaaagctgcaagggcctccgccaccgctgcatcctcgtccacaatctccccatccccatctccatcggagccatgggtatcctcctgcctgtttcctgagtcaaccacaggcatggcatgaacaggacccttctcattaaagcagatgcttagaacttc

SEQ ID NO: 175018 - DNA, 1350 bp, Homo sapiens
  Payload ID: 14365
  Gene Symbol: RELL1
  Gene Name: RELT-like 1
  Uniprot ID: Q8IUW5
  ENST ID: ENST00000454158
  CDS Start-End: 90-905
actcgatcagcccgccggctccggagcggctctgccttcccgagcgcgggacgcggcgccctgggggaggagggcgaagcgacgcggcgatggctccgcgggcactcccggggtccgccgtcctagccgctgctgtcttcgtgggaggcgccgtgagttcgccgctggtggctccggacaatgggagcagccgcacattgcactccagaacagagacgaccccgtcgcccagcaacgatactgggaatggacacccagaatatattgcatacgcgcttgtccctgtgttctttatcatgggtctctttggcgtcctcatttgccacctgcttaagaagaaaggctatcgttgtacaacagaagcagagcaagatatcgaagaggaaaaggttgaaaagatagaattgaatgacagtgtgaatgaaaacagtgacactgttgggcaaatcgtccactacatcatgaaaaatgaagcgaatgctgatgtcttaaaggcgatggtagcagataacagcctgtatgatcctgaaagccccgtgacccccagcacaccagggagcccgccagtgagtcctgggcctttgtcaccaggggggacgccagggaagcacgtctgtggccatcatctgcatacggtgggcggtgttgtcgagagggatgtgtgtcatcggtgtaggcacaagcggtggcactttataaagcccactaacaagtccagagagagcagaccacggcgccaaggcgaggtcacggtcctttctgttggcagatttagagttacaaaagtggagcacaagtcaaaccagaaggaacggagaagcctgatgtctgttagtggggctgaaaccgtcaatggggaggtgccggcaacacctgtgaagagagaacgcagtggcacagagtagcagcaatgacttgacttgaagagctctaagagactgaaaacttatatgaagttgccttgggaatatttttatatattttatacagtttctatcatggagtcagcaggcacgtggataaaacctaaaagggaatattattgctgtgccatatacagaattcagtttgctttgaaacaagttttggttgaaagagtctgttgaaaattttattatacttccagggaaggaaagagctgtttttatcttcttaaccactcccagcctctactcttcccagcccctaatcccaggccttggtgtacacactgtagtttttccattatgatgagtatgtgcagtgatactattcatgtacagtctgagcttatgctcaggggtgtgtgtgtatatgtgtatgcatgtgtgcacgtgagtgtgtgtttctttttccagttcctgcatccta

SEQ ID NO: 175019 - DNA, 771 bp, Homo sapiens
  Payload ID: 14365
  Gene Symbol: RELL1
  Gene Name: RELT-like 1
  ENST ID: ENST00000512114
  CDS Start-End: 29-771
tgcaaactggaaacttctgttgatttcgatgaacccaggagcatgctggtatatttacatccttcagaaaggacttacccaacaagggggtgaagcagtggggtgtatcagttgtccagctctgaaaagaatctacttatttatgtttgtaaaaactgttggcatttggcaaatggggtacaatgggagcagccgcacattgcactccagaacagagacgaccccgtcgcccagcaacgatactgggaatggacacccagaatatattgcatacgcgcttgtccctgtgttctttatcatgggtctctttggcgtcctcatttgccacctgcttaagaagaaaggctatcgttgtacaacagaagcagagcaagatatcgaagaggaaaaggttgaaaagatagaattgaatgacagtgtgaatgaaaacagtgacactgttgggcaaatcgtccactacatcatgaaaaatgaagcgaatgctgatgtcttaaaggcgatggtagcagataacagcctgtatgatcctgaaagccccgtgacccccagcacaccagggagcccgccagtgagtcctgggcctttgtcaccaggggggacgccagggaagcacgtctgtggccatcatctgcatacggtgggcggtgttgtcgagagggatgtgtgtcatcggtgtaggcacaagcggtggcactttataaagcccactaacaagtccagagagagcagaccacggcgccaaggcgaggtcacggtcctttctgttggcag

SEQ ID NO: 175020 - DNA, 2520 bp, Homo sapiens
  Payload ID: 14366
  Gene Symbol: RELL2
  Gene Name: RELT-like 2
  Uniprot ID: Q8NC24
  ENST ID: ENST00000297164
  CDS Start-End: 1201-2112
agcatagctcctaggatgcgagggccatttgtctccggccgggggtcagatcctcgggaagccgagccatcccatccagccgcttgccccaaaccgggcgcaggccgtggtcacttctctaggaagctccgaagatcccgccactccgtccctcaaaggtgcggaaagccggcttcccccagccctcggagaagattcctgactctccgctcggtcggggcatctgagggcaggagctgcgccaggcgtaccggatagaccagtggacaacacccacgccggaccgcctgtcccctacccggacccagactcggcgccgcacattgccccgggggggcccggcgcagtcacgcgcgcgcagagctcacgctctccgccccgcacacctgcgctccgccccctggtcctgggcccgcgacgggtgaaggcatttgggaagccagggcggctgcggaggcgatctccctgacccagggccggagttgcccggagcctgccaccgctctcagccagcccgcatccttctctgttcttccctccccccgcctgccacggcgcgggtatccgcagccacagcccggggccggtgaggcggcgaagggggaggggaggaatcaagggatgagcgccggaagggcgtcgggggccctgagccgcactaggacgcccctggagccggaaccccagcagaagccggaaccagaaccaaatcaccggtaccgggtcggccaggtggtcagggtgggagaaaccaaaaagggagaggggtgcgggagtactgagaggaaggggctgcagaggcctggctcaggccggcgtggaggaggtgcgggcgctgactcaggcaggatttctgctcccgccgcctaagaatgccgtcccatctcgtgctgcagtgtccttgggagggacagaagcgcgaacaagctggaaaggggaacgctcggggcgtcggggaagcgggaccagggtcgtggtagagagcttgcgttgccgctgacctcttgccgaaaggcgaaacagcactcctggcccggacagctccctggttgggtagggggtggggccggacctcagccggacgtcttagacgtgcttgtttcagatcctgaggacggcattcctacccctcccccattcccagctgcagccccctaaacccaggaggcgccctggcccgcgctcgccccccagggcctcatgtcggaaccacagcctgacctggaaccgccccaacatgggctatatatgctcttcctgcttgtgctggtcttcttcctcatgggcctggtaggcttcatgatctgccacgtgctcaagaagaagggctaccgctgccgcacgtcgaggggctctgagcctgacgatgcccagcttcagccccctgaggacgatgacatgaatgaggacacagtagagaggattgttcgctgcatcatccagaatgaagccaatgctgaggccttgaaggagatgctgggggacagtgaaggagaagggacagtgcagctgtccagtgtggatgccacctccagcctgcaggacggagccccctcccatcatcacacagtgcacctgggctctgcagccccttgcctccattgcagccgcagcaagaggcctccacttgtccgtcagggacgctccaaggaaggaaaaagccgcccccggacaggggagaccactgtgttctctgtgggcaggttccgggtgacacacattgagaagcgctatggactgcacgaacaccgtgatggctcccccacagacaggagctggggctctggtgggggacaggacccagggggtggtcaggggtctgggggagggcagcccaaggcagggatgcctgccatggagaggctgccccctgagaggccacagccccaggtcctagccagccccccagtacagaatggaggactcagggacagcagcctaacccctcgtgcacttgaagggaaccccagagcttctgcagagccaacactgagggccggagggaggggcccaagcccagggctgcccactcaagaggcaaatgggcagccaagcaaaccagacacttctgatcaccaggtgtctctaccacagggagcagggagtatgtgagtctccttcattgtgctgatggactaccagctggcagggccagggggtgggtgggcgtgaaagccctcccctccactggacagcactgccccccagctgagggaccagctctacttccacctggagttgcacagtctcaggctgggggcctcaggagaggtcacagcccctcagtctcttctccttcccctgcctgcaacaggctgcctgccccgccttccccaacacctcgctccatatgatagagcgtggcagctgggagcaggcccctgcccgtggtgggcccctaaagcaatagcaccgtaggccccctgccctcttagcacaagaggcccaggccctggcctggccttcgtgccctttattcattgtcaataaatccgctcagaccattacagctgcttcgca

SEQ ID NO: 175021 - DNA, 2154 bp, Homo sapiens
  Payload ID: 14366
  Gene Symbol: RELL2
  Gene Name: RELT-like 2
  Uniprot ID: Q8NC24
  ENST ID: ENST00000444782
  CDS Start-End: 849-1760
gagctccgcccctcgcccggctcagctctcccggtatctggggctttgagcgtcccgggttgggcagggaactggcagcatagctcctaggatgcgagggccatttgtctccggccgggggtcagatcctcgggaagccgagccatcccatccagccgcttgccccaaaccgggcgcaggccgtggtcacttctctaggaagctccgaagatcccgccactccgtccctcaaaggtgcggaaagccggcttcccccagccctcggagaagattcctgactctccgctcggtcggggcatctgagggcaggagctgcgccaggcgtaccggatagaccagtggacaacacccacgccggaccgcctgtcccctacccggacccagactcggcgccgcacattgccccgggggggcccggcgcagtcacgcgcgcgcagagctcacgctctccgccccgcacacctgcgctccgccccctggtcctgggcccgcgacgggtgaaggcatttgggaagccagggcggctgcggaggcgatctccctgacccagggccggagttgcccggagcctgccaccgctctcagccagcccgcatccttctctgttcttccctccccccgcctgccacggcgcgggtatccgcagccacagcccggggccggtgaggcggcgaagggggaggggaggaatcaagggatgagcgccggaagggcgtcgggggccctgagccgcactaggacgcccctggagccggaaccccagcagaagccggaaccagaaccaaatcaccgctgcagccccctaaacccaggaggcgccctggcccgcgctcgccccccagggcctcatgtcggaaccacagcctgacctggaaccgccccaacatgggctatatatgctcttcctgcttgtgctggtcttcttcctcatgggcctggtaggcttcatgatctgccacgtgctcaagaagaagggctaccgctgccgcacgtcgaggggctctgagcctgacgatgcccagcttcagccccctgaggacgatgacatgaatgaggacacagtagagaggattgttcgctgcatcatccagaatgaagccaatgctgaggccttgaaggagatgctgggggacagtgaaggagaagggacagtgcagctgtccagtgtggatgccacctccagcctgcaggacggagccccctcccatcatcacacagtgcacctgggctctgcagccccttgcctccattgcagccgcagcaagaggcctccacttgtccgtcagggacgctccaaggaaggaaaaagccgcccccggacaggggagaccactgtgttctctgtgggcaggttccgggtgacacacattgagaagcgctatggactgcacgaacaccgtgatggctcccccacagacaggagctggggctctggtgggggacaggacccagggggtggtcaggggtctgggggagggcagcccaaggcagggatgcctgccatggagaggctgccccctgagaggccacagccccaggtcctagccagccccccagtacagaatggaggactcagggacagcagcctaacccctcgtgcacttgaagggaaccccagagcttctgcagagccaacactgagggccggagggaggggcccaagcccagggctgcccactcaagaggcaaatgggcagccaagcaaaccagacacttctgatcaccaggtgtctctaccacagggagcagggagtatgtgagtctccttcattgtgctgatggactaccagctggcagggccagggggtgggtgggcgtgaaagccctcccctccactggacagcactgccccccagctgagggaccagctctacttccacctggagttgcacagtctcaggctgggggcctcaggagaggtcacagcccctcagtctcttctccttcccctgcctgcaacaggctgcctgccccgccttccccaacacctcgctccatatgatagagcgtggcagctgggagcaggcccctgcccgtggtgggcccctaaagcaatagcaccgtaggccccctgccctcttagcacaagaggcccaggccctggcctggccttcgtgccctttattcattgtcaataaatccgctcagaccatt

SEQ ID NO: 175022 - DNA, 1419 bp, Homo sapiens
  Payload ID: 14366
  Gene Symbol: RELL2
  Gene Name: RELT-like 2
  ENST ID: ENST00000518856
  CDS Start-End: 322-1035
gacgggtgaaggcatttgggaagccagggcggctgcggaggcgatctccctgacccagggccggagttgcccggagcctgccaccgctctcagccagcccgcatccttctctgttcttccctccccccgcctgccacggcgcgggtatccgcagccacagcccggggccggtgaggcggcgaagggggaggggaggaatcaagggatgagcgccggaagggcgtcgggggccctgagccgcactaggacgcccctggagccggaaccccagcagaagccggaaccagaaccaaatcaccggtaccggctgaggacgatgacatgaatgaggacacagtagagaggattgttcgctgcatcatccagaatgaagccaatgctgaggccttgaaggagatgctgggggacagtgaaggagaagggacagtgcagctgtccagtgtggatgccacctccagcctgcaggacggagccccctcccatcatcacacagtgcacctgggctctgcagccccttgcctccattgcagccgcagcaagaggcctccacttgtccgtcagggacgctccaaggaaggaaaaagccgcccccggacaggggagaccactgtgttctctgtgggcaggttccgggtgacacacattgagaagcgctatggactgcacgaacaccgtgatggctcccccacagacaggagctggggctctggtgggggacaggacccagggggtggtcaggggtctgggggagggcagcccaaggcagggatgcctgccatggagaggctgccccctgagaggccacagccccaggtcctagccagccccccagtacagaatggaggactcagggacagcagcctaacccctcgtgcacttgaagggaaccccagagcttctgcagagccaacactgagggccggagggaggggcccaagcccagggctgcccactcaagaggcaaatgggcagccaagcaaaccagacacttctgatcaccaggtgtctctaccacagggagcagggagtatgtgagtctccttcattgtgctgatggactaccagctggcagggccagggggtgggtgggcgtgaaagccctcccctccactggacagcactgccccccagctgagggaccagctctacttccacctggagttgcacagtctcaggctgggggcctcaggagaggtcacagcccctcagtctcttctccttcccctgcctgcaacaggctgcctgccccgccttccccaacacctcgctccatatgatagagcgtggcagctgggagcaggcccctgcccgtggtgggcccctaaagcaatagcaccgtaggccccctgccctcttagcacaagaggcccaggccctggcctggccttcgtgccctttattcattgtcaataaatccgc

SEQ ID NO: 175023 - DNA, 1780 bp, Homo sapiens
  Payload ID: 14366
  Gene Symbol: RELL2
  Gene Name: RELT-like 2
  ENST ID: ENST00000521367
  CDS Start-End: 752-1450
ggcagggaactggcagcatagctcctaggatgcgagggccatttgtctccggccgggggtcagatcctcgggaagccgagccatcccatccagccgcttgccccaaaccgggcgcaggccgtggtcacttctctaggaagctccgaagatcccgccactccgtccctcaaaggtgcggaaagccggcttcccccagccctcggagaagattcctgactctccgctcggtcggggcatctgagggcaggagctgcgccaggcgtaccggatagaccagtggacaacacccacgccggaccgcctgtcccctacccggacccagactcggcgccgcacattgccccgggggggcccggcgcagtcacgcgcgcgcagagctcacgctctccgccccgcacacctgcgctccgccccctggtcctgggcccgcgacgggtgaaggcatttgggaagccagggcggctgcggaggcgatctccctgacccagggccggagttgcccggagcctgccaccgctctcagccagcccgcatccttctctgttcttccctccccccgcctgccacggcgcgggtatccgcagccacagcccggggccggtgaggcggcgaagggggaggggaggaatcaagggatgagcgccggaagggcgtcgggggccctgagccgcactaggacgcccctggagccggaaccccagcagaagccggaaccagaaccaaatcaccggtaccggctgaggacgatgacatgaatgaggacacagtagagaggattgttcgctgcatcatccagaatgaagccaatgctgaggccttgaaggagatgctgggggacagtgaaggagaagggacagtgcagctgtccagtgtggatgccacctccagcctgcaggacggagccccctcccatcatcacacagtgcacctgggctctgcagccccttgcctccattgcagccgcagcaagaggcctccacttgtccgtcagggacgctccaaggaaggaaaaagccgcccccggacaggggagaccactgtgttctctgtgggcaggttccgggtgacacacattgagaagcgctatggactgcacgaacaccgtgatggctcccccacagacaggagctggggctctggtgggggacaggacccagggggtggtcaggggtctgggggagggcagcccaaggcagggatgcctgccatggagaggctgccccctgagaggccacagccccaggtcctagccagccccccagtacagaatggaggactcagggacagcagcctaacccctcgtgcacttgaagggaaccccagagcttctgcagagccaacactgagggccggagggaggggcccaagcccagggctgcccactcaagaggcaaatgggcagccaagcaaaccagacacttctgatcaccagtctccttcattgtgctgatggactaccagctggcagggccagggggtgggtgggcgtgaaagccctcccctccactggacagcactgccccccagctgagggaccagctctacttccacctggagttgcacagtctcaggctgggggcctcaggagaggtcacagcccctcagtctcttctccttcccctgcctgcaacaggctgcctgccccgccttccccaacacctcgctccatatgatagagcgtggcagctgggagcaggcccctgcccgtggtgggcccctaaagcaatagcaccgtaggccccctgccctcttagcacaagaggcccaggccctggcctgg

SEQ ID NO: 175024 - DNA, 1545 bp, Homo sapiens
  Payload ID: 14367
  Gene Symbol: RSG1
  Gene Name: REM2 and RAB-like small GTPase 1
  Uniprot ID: Q9BU20
  ENST ID: ENST00000375599
  CDS Start-End: 421-1197
gcggacgcaggcggggcggaagtgggcccggcgggctggggcggcgggagtgcgggtgggcgtttaaaggggccttcggcacccaggtcggttcgccgccgggactgctgacggggagggctaggtagccctgggagtcgggatctagaaggtagaggagaagcggggctgtctgacccccggaggtgacaaggggagaggggctgtgtgaataccctccatgggcagtaatgggatgactatccccagggagcattgcgaaggagagaggcggctgagggactgcactttctggggccccccgggagagtcagagggcagttaagagggatcacaggcccggcttggtactgtcactccccttcccactccctgctctcagcattctgtcacctccctaccccgtcgcggtgcccagccatggccagacctcccgtgcccggttcggtggttgtcccaaactggcacgagagtgccgagggcaaggagtacctggcttgcattctgcgcaagaaccgccggcgggtgtttgggctgcttgagcggccagtgctgctgccgcctgtgtccattgacactgccagctacaagatctttgtgtccgggaagagtggtgtgggcaagacggcgctggtggccaagctggctggcctggaggtgcctgtggtgcaccacgagaccaccggcatccagaccaccgtggtattttggccagccaagctgcaggccagcagccgtgtcgtcatgtttcgttttgagttctgggactgtggagagtctgcactcaaaaagttcgatcatatgctgctggcttgcatggagaacacagatgccttcctcttcctcttctccttcactgaccgtgcctcctttgaagacctccctggacagctggcccgcatagcaggtgaggcccctggtgtcgtcaggatggtcatcggctccaaatttgaccagtacatgcacacggacgtgcccgagcgggacctcacagccttccggcaggcctgggagctgcccctgctacgggtgaagagtgtgccggggcggcggctggctgatgggcgcacactggacgggcgggctgggctggccgacgttgcccacatactcaatggccttgctgagcagctgtggcaccaggaccaggtggcggctggcctgcttcccaaccccccagagagtgctcctgaatgagtcacgagtggttgcctgtgatcccacccccaaccctcaggtctcgacatagggctggaggctggggcaggaacatggatcctatctggaggactggccagcatggcctgatcagggaggatgtggccagagaaggcccacccgcgagcagcgctttccttgcagaattcatggcagggaggtggggaccaaggccctgagctcgaacatctcccgtggcctttccccctttggcagcaccgatggaggatgactgggagagggggtgcctctcaagttacttcaatcaagaacctgtattggttgaggtgacaccatctgttgtaacagataaaccccgaaatccca

SEQ ID NO: 175025 - DNA, 336 bp, Homo sapiens
  Payload ID: 14367
  Gene Symbol: RSG1
  Gene Name: REM2 and RAB-like small GTPase 1
  ENST ID: ENST00000434014
  CDS Start-End: 1-336
tctgcgcaagaaccgccggcgggtgtttgggctgcttgagcggccagtgctgctgccgcctgtgtccattgacactgccagctacaagatctttgtgtccgggaagagtggtgtgggcaagacggcgctggtggccaagctggctggcctggaggtgcctgtggtgcaccacgagaccaccggcttgcatggagaacacagatgccttcctcttcctcttctccttcactgaccgtgcctcctttgaagacctccctggacagctggcccgcatagcaggtgaggcccctggtgtcgtcaggatggtcatcggctccaaatttgaccagtacatgc

SEQ ID NO: 175026 - DNA, 11550 bp, Homo sapiens
  Payload ID: 14368
  Gene Symbol: RSF1
  Gene Name: remodeling and spacing factor 1
  Uniprot ID: Q96T23
  ENST ID: ENST00000308488
  CDS Start-End: 304-4629
ttgttttcattccccctgtcacacgaggcagtggcaagcccgaaggggaggagagaagggggcggaaagagggcggaaagtgaaaggcgccgagggccgctctgtctcccgtctgactcggttctcgactgctccgggccgccgatgtattgtgggatcgcggagccgtccctgagacgctgggatccgcagaggagcccacttgagagcgcctcctgtcgtctgtaaggttgccttgccatccctcggcaccacaacttcccccgcccccccatcgcctcctcctccatcctccagttcaaaatggcgacggcggcggcagcggcggcggtgatggctcctccgggctgcccgggttcgtgccccaacttcgccgtagtctgctccttcttggagcgctacgggccgctgctagacctgcctgagttgccgttccctgagctggagcgggtgctgcaggcgccgccgccggacgtcggcaacggagaagtaccaaaagaattggtggagctccatttgaagctgatgaggaaaattggcaaatctgttactgcagacagatgggaaaaatatttgatcaagatatgccaagagtttaacagtacctgggcatgggagatggagaagaagggctatcttgaaatgagtgttgaatgcaaactagcactcttaaagtacctctgtgagtgtcagtttgatgacaatctcaaattcaagaatattattaatgaggaggatgccgatactatgcgtctccagccaattggtcgagacaaagatggcctcatgtactggtaccaattggatcaagatcacaatgtcagaatgtacatagaagaacaagatgatcaagatggctcttcatggaaatgcattgtcagaaatcgaaacgagttggctgagactcttgcactcctgaaagcacaaattgatcctgtactattgaaaaactctagccaacaagacaactcttctcgggaaagtcccagcttagaggatgaggagactaaaaaagaggaagaaacacctaaacaagaggaacagaaagaaagtgaaaagatgaaaagtgaggagcagcctatggatttagaaaaccgttctacagccaatgttctagaagagactactgtgaaaaaagaaaaagaagatgaaaaggaacttgtgaaactgccagtcatagtgaagctagaaaaacctttgccagaaaatgaagaaaaaaagattatcaaagaagaaagtgattccttcaaggaaaatgtcaaacccattaaagttgaggtgaaggaatgtagagcagatcctaaagataccaaaagtagcatggagaagccagtggcacaggagcctgaaaggatcgaatttggtggcaatattaaatcttctcacgaaattactgagaaatctactgaagaaactgagaaacttaaaaatgaccagcaggccaagataccactaaaaaaacgagaaattaaactgagtgatgattttgacagtccagtcaagggacctttgtgtaaatcagttactccaacaaaagagtttttgaaagatgaaataaaacaagaggaagagacttgtaaaaggatctctacaatcactgctttgggtcatgaagggaaacagctggtaaatggagaagttagtgatgaaagggtagctccaaattttaagacagaaccaatagagacaaagttttatgagacaaaggaagagagctatagcccctctaaggacagaaatatcatcacggagggaaatggaacagagtccttaaattctgtcataacaagtatgaaaacaggtgagcttgagaaagaaacagcccctttgaggaaagatgcagatagttcaatatcagtcttagagatccatagtcaaaaagcacaaatagaggaacccgatcctccagaaatggaaacttctcttgattcttctgagatggcaaaagatctctcttcaaaaactgctttatcttccaccgagtcgtgtaccatgaaaggtgaagagaagtctcccaaaactaagaaggataagcgcccaccaatcctagaatgtcttgaaaagttagagaagtccaaaaagacttttcttgataaggacgcacaaagattgagtccaataccagaagaagttccaaagagtactctagagtcagaaaagcctggctctcctgaggcagctgaaacttctccaccatctaatatcattgaccactgtgagaaactagcctcagaaaaagaagtggtagaatgccagagtacaagtactgttggtggccagtctgtgaaaaaagtagacctagaaaccctaaaagaggattctgagttcacaaaggtagaaatggataatctggacaatgcccagacctctggcatagaggagccttctgagacaaagggttctatgcaaaaaagcaaattcaaatataagttggttcctgaagaagaaaccactgcctcagaaaatacagagataacctctgaaaggcagaaagagggcatcaaattaacaatcaggatatcaagtcggaaaaagaagcccgattctccccccaaagttctagaaccagaaaacaagcaagagaagacagaaaaggaagaggagaaaacaaatgtgggtcgtactttaagaagatctccaagaatatctagacccactgcaaaagtggctgagatcagagatcagaaagctgataaaaaaagaggggaaggagaagatgaggtggaagaagagtcaacagctttgcaaaaaactgacaaaaaggaaattttgaaaaaatcagagaaagatacaaattctaaagtaagcaaggtaaaacccaaaggcaaagttcgatggactggttctcggacacgtggcagatggaaatattccagcaatgatgaaagtgaagggtctggcagtgaaaaatcatctgcagcttcagaagaggaggaagaaaaggaaagtgaagaagccatcctagcagatgatgatgaaccatgcaaaaaatgtggccttccaaaccatcctgagctaattcttctgtgtgactcttgcgatagtggataccatactgcctgccttcgccctcctctgatgatcatcccagatggagaatggttctgcccaccttgccaacataaactgctctgtgaaaaattagaggaacagttgcaggatttggatgttgccttaaagaagaaagagcgtgccgaacgaagaaaagaacgcttggtgtatgttggtatcagtattgaaaacatcattcctccacaagagccagacttttctgaagatcaagaagaaaagaaaaaagattcaaaaaaatccaaagcaaacttgcttgaaaggaggtcaacaagaacaaggaaatgtataagctacagatttgatgagtttgatgaagcaattgatgaagctattgaagatgacatcaaagaagccgatggaggaggagttggccgaggaaaagatatctccaccatcacaggtcatcgtgggaaagacatctctactattttggatgaagaaagaaaagaaaataaacgaccccagagggcagctgctgctcgaaggaagaaacgccggcgattaaatgatctggacagtgatagcaacctggatgaagaagagagcgaggatgaattcaagatcagtgatggatctcaagatgagtttgttgtgtctgatgaaaacccagatgaaagtgaagaagatccgccatctaatgatgacagtgacactgacttttgtagccgtagactgaggcgacacccctctcggccaatgaggcagagcaggcgtttgcgaagaaagaccccaaagaaaaaatattccgatgatgatgaagaggaggaatctgaggagaatagtagagactctgaaagtgacttcagtgatgattttagtgatgattttgtagaaactcggcgaaggcggtcaaggagaaatcagaaaagacaaattaactacaaagaagactcagaaagtgacggttcccagaagagtttgcgacgtggtaaagaaataaggcgagtacacaagcgaagactttccagctcagagagtgaagagagctatttgtccaagaactctgaagatgatgagctagctaaagaatcaaagcggtcagttcgaaagcggggccgaagcacagacgagtattcagaagcagatgaggaggaggaggaagaggaaggcaaaccatcccgcaaacggctacaccggattgagacggatgaggaggagagttgtgacaatgctcatggagatgcaaatcagcctgcccgtgacagccagcctagggtcctgccctcagaacaagagagcaccaagaagccctaccggatagaaagtgatgaggaagaggactttgaaaatgtaggcaaagtggggagcccattggactatagcttagtggacttaccttcaaccaatggacagagccctggcaaagccattgagaacttgattggcaagcctactgagaagtctcagacccccaaggacaacagcacagccagtgcaagcctagcctccaatgggacaagtggtgggcaggaggcaggagcaccagaagaggaggaagatgagcttttgagagtgactgaccttgttgattatgtctgtaacagtgaacagttataagactttttttccatttttgtgctaatttattccacggtagctctcacaccagcgggccagttattaaaagctgtttaatttttcctagaaaactccactacagaatgacttttagaagaaaaatttcaacaaatcctgaagtctttctgtgaagtgaccagttctgaactttgaagataaataattgctgtaaattccttttgattttctttttccaggttcatggtccttggtaatttcattcatggaaaaaaatcttattataataacaacaaagatttgtatatttttgactttatatttcctgagctctcctgactttgtgaaaaagggtggatgaaaatgcattccgaatctgtgagggcccaaaacagaatttaggggtgggtgaaagcacttgtgctttagctttttcatattaaatatatattatatttaaacattcatggcatagatgatgatttacagacaatttaaaagttcaagtctgtactgttacagtttgagaattgtagataacatcatacataagtcatttagtaacagcctttgtgaaatgaacttgtttactattggagataaccacacttaataaagaagagacagtgaaagtaccatcataattaacctaaatttttgttatagcagagtttcttgtttaaaaaaaaataaaatcatctgaaaagcatttgtacagtaaaatgtataatgaagctttgccaaccagactgtgctagcaacaaatttttttaaataagctttatgcagtggtaataaggtggcctcaaatatattgtgtctgatggagagttattagtgaaatgaatgtggtctttcttaaggcctgggtggactgtaaactttgccaatagtataactcttgtcttctggccacttgatgtttaaatatctgaaatatcattttgaaaaaaatacatctatatataacatacatgaagagatgctaagctgacagtgatattttagcacatttgaagactgggaagagattttcaggtgaattttaactggtctattcttgcccttagtatctacttcaaattgaagtctacaaacaaagcagttcctttgggaggtttttagtttgagttttagcgtgtgtgtgtgtttgtgtgtgtgcgtgtgcgtgtgtgtgtgtgttggaatttcctatctgcctggatatattagcagagtttgaatgtagttttggcctttggccattagacttctattaaaattcattaatagtcatacaaccaacatagagttgaatgagaactgccgatgtaattaataggcatgacatccatttcaaacatctcaacactttaaagaaaagccctttgtttcaagaaaaaagggtttgtaactaactaaatacctaacatgtaattgacactaaaatatgaactttgtcttatttagtttctgttatagctgtaaaatttcaggcagagccataacattgtacagagtgtagcacttgtgattaaacctagcctgttaaatcctgaaaccttcaaccattacttctgtgaatactttagccctgggatttgggtttttctgttccggtgttgtgtctgttgccggcaatggacacaccatatctgctgctggcccaaggaacgtcattaatttttctttccaaattaagtattatgtgctagtcagtgtatagtaaagcacttctcttttttattactaaaaagctggcattagatttgcattataaatacctctctaggaactttatactccttttccttcttcaacaggtattgcccttaaatcttatcttttggccttgaaagtttatagctattgtttttcagttgttcgttgttttgttttgtttcactttagttctgtagtacctgcccattaatatttttgctttgattctagcaatgtgtatgtatctgtataaaaaataaaataatgaaagcaacctaaaaataggatgcaccaatagcatgtggttccaagtaagttgtgatttttattttgagacagtgttccactggaagggagggaagggcttacattcacagacagtaaagcagggctgtgtaaggagctacatttacttaacagtctcctttccagctaggtttgttttatttatttgcaagtcagctaagaattaaccttttaaaccatctaaaacaggcaagcaatataaagatttctactagtgcaaggtaagtggtttgaatatacaagtgccctttcctgccacccagtctcactaccgttttagtcctgcagctgggtaaagccactattgtgtggaaactctcccatgtgccctgtctctacctctggacacaccagctccttcttccacctattctattcctcagttaagccaagtgatcagaagtagtattaaatgggtagataattttaacaggatgcctaatgtgaaataaggagttatttttactcttctactatagaaagcctaaggtaattcttaccatctcaaagactgagtattccatttaggtttggagaccacttgtgctgtgctgcctgatatttaccaaacttgaataagtgttcgtcaacttgatagtgaatgtaccccttctcaccttatattttgattaaatcaattaactataggtcatctaccaagaatgtaatccaagcggttgataaaacattattaggcagatagattattgattattaaattttgagcagtgcaaaaacggttttgctgcttggagttcagattcagtccctcaaagagtttatgatcactgaaatacactctgaaggtattctgaagaagttaaaaaattttagaaaacgaaatgttctgtatacaaagacaatacagtcactacgaactgcagaaagtataggaaagcagtaattgatgtagagtttagacagtcttggatcttttttagagcactaaccatggatttagactcaaaatagctgctacataatagagccctttaataatttaaaccccccttgttgaaatacaagttggactcccagtgtcaaactctagactgtagctaatgtattaaagggagatgtagattaatattcagtatatttagtttgcaatttctgaaaaggtttgaaaactagtcagcttttcacacagcagaagctttgaactgaaatatgtgtgaaaaggacgcagactgaaaacgttttggttttgtacatcagtgctgatgaaattagtgtaaaacattttccatcattggcacattactgcaaaatgatggcagagatattttcaagaatgtacatcaagttatatttccttgacatccttttttcaattggtcaaggttacagattcagaggataaagggtagtttcatttagaataaattcatgtctactggcaatctatatataaaagtgacctgcccaagaaccaaaaactttaaatgctaatgaagcttttgaaaaataatttttaaacaaattaattttaaaagggtgttacacgtacccagtttttactttttagttgatgaaacccatcctataatatacatttgagcaaagtacacatattaagaaaaacatggacatttacttgtttaatagtcaaaatgatgaggaaatgttagctgtttttaagtgggactggtggggtgtcctttgtcacaaggaatgcttttttagcttgtttgtgggcataagagatgttaaccctttgctgattctaccacacaactgtaaagaacctaatgaatctacaagtttaatattcagaaaaagctaggaactccgctctttaccagtacagtggaacaggcccgttattcaaggtgatgcctcacagctatagaacaactattcaaagacccagagttaaatggtacatgtgtatatgtgtgtgtgtgtgtgcacacgcacacacttcagataagtatcagaaaaaataaaaatgaatccatcattaacttgaaagaaataagatggctgcattgcaacagatacaaatattatgaacatcatttaattacagaaaatctagacaacagtttctcctgatgtttgacattctcaaaatatattcctcattctcgaagaagcagagaatgccaaggctgcatatctgctgtaatctacctagccctcttctgcttaatatgatccattattgaatcttctcagattaaaatccattcctatatcatctacctttcccaaagtgtgtgcctgtaaacctaccttggaagtggcaagttaactgatttttttgtgtcatttttataccaatccttaaggtcaaagccttttgctatcaatgtatttaaactgagttgctatatgttcactaatttgttttcaaaatgttttgctccaacttaaattatcttttaacatcttttgagtgccaagaattgctaagtaactgtaatatgttgaagagagtaattgccaagcaagcagtcataagccaaaatgtaatgagcttagtatataaccactttagagtatacactcaccactttttgtattcattcatgcaaaccctcctggaagtcgattagaagaggatccaatttgtggaccttttttcctccttttggacacctgagcacaattttttttttcctttcatatttataccactttggaaaattcagtaaacccaattctggcacatcataatggtttcagttagtgaagatgtttattttaataactttaaaatatgactatcctatacataagttatataagagggcataacaatagatgagtagaaatttataaaatttcttggatattttgaatgagaaaaaaacatttttaaaggaattttgttttttccttttttggccaaaccggtacaagttagaaagtgtgctaaggactgaatacttgcctcgtgctttttgccactggatgatgtaagttaagaatggaattgttaatcctaagtatatattttcttgactttcatcagtttctaaagaaatctaatttaagtgttttgcggttttgtttgatctgtatttattgagttctggtcatagaccagcagcttgcacgtcatgctcatgaacagccagaacatagttattggggaacttcatggctcaaaaccttctgaatcatttaacttattttgtatgttgcaaaaaaaaaaaaaaagtttattttgcttgagagtcacctttttttaaaaaaaataactgtacagcttttaagggatgggaggtgggaaaataccctaaaataggatgtagattttttacaattgtgtttatgctagatcatctacaggtgcattatgtaattaaacctaaaattgtttaaaaatttgtgccatgtctttttcattctcctgccctttagcagaattggtgcatgtcaactgctatgtggacaagccttgaaattagagtaacaagccctgtctccaaagctttaaggtcactgcatgaaaattgcacacacacacacacacacacacacatctagcttatattagtaaatggattttcaggatcagaacagctacagtagcccagatttggctgttaacagcatattcttacagcacatgatttttgtgatgcctaactagggtattctcaatgttagtctggtgttctattctctttcaaagtagcttcttgagatggtatctgttgtagcttgcccaaacctgccatgaggttgtgtgtacactttgaaagggtatgtcctatgctaagatggtggtagagcagggcttgattttaatctattcatataaaagaaggaaaaaactagaattggtctatttggttattcagtggacttaattccacaggaatagttgtctgctgaagcgtggcagcaagagaagtcaaattcaagtttcagttccttccttattcactaagtattttgaaatcttgtagaacttctgattctagcacagtcttttacatggcacattttaccatggtatattcacagcttcgtttaaatgtcagtactttttcccatctgataattttgccattctaatttctcacctttgtagtacaagtgtattcttgaaaataattaaattcatctaagtgtgtcataatttcaatcaaagctatattcatgtgttgccagcgtcagttttttgctatcctcattcagaagggaagcctgcagatcatgagtttccatatgaagaatacaaattccacataaaaatttataaatggtatctttagaattttgatttaaagtaatagctggaattcagggactgatcagaatgcctcttgaattttccaacatgcttatatgaaatgctttattttcctatgcgttaaaaaaaatattcctggaataggttctcagaatgttttatttggtttctaggagatgagatttaaagcagaagctccaagattggcataaaactaactcttgaggtaatcaggaccatgctgttagtcaaatagaagctggagtgctctctgtcacataatgtactgcatgtgtgtgggggtgggggggcagggaagatcagaaaactggaaatgtaattctgataacacgcaaagtaaattgtgcattaaaagtatgggaattcttggtagcttaaagcttcaggggttaacttcagtgtatgaacacctagtgtgttagaattgcagtgcatagttgtttaaatacaatattccttgtaagtgacaaccaaaatatgttgtggctggtgccagtatttttgttaatgaaatgttcagtgtctcactacagtctgatcagaactcttggtgttataagccaggcctaaagccattttatagctattggcctaattgtgtaactttttctttcaaaatgttttattataatacttctgtcatttctttcacttaatatgtcaattgtcataataaaaatttaaatttgaattatttagcatga

SEQ ID NO: 175027 - DNA, 604 bp, Homo sapiens
  Payload ID: 14368
  Gene Symbol: RSF1
  Gene Name: remodeling and spacing factor 1
  ENST ID: ENST00000440064
  CDS Start-End: 1-604
ggcggcggcagcggcggcggtgatggctcctccgggctgcccgggttcgtgccccaacttcgccgtagtctgctccttcttggagcgctacgggccgctgctagacctgcctgagttgccgttccctgagctggagcgggtgctgcaggcgccgccgccggacgtcggcaacggagaagtaccaaaagaattggtggagctccatttgaagctgatgaggaaaattggcaaatctgttactgcagacagatgggaaaaatatttgatcaagtacctctgtgagtgtcagtttgatgacaatctcaaattcaagaatattattaatgaggaggatgccgatactatgcgtctccagccaattggtcgagacaaagatggcctcatgtactggtaccaattggatcaagatcacaatgtcagaatgtacatagaagaacaagatgatcaagatggctcttcatggaaatgcattgtcagaaatcgaaacgagttggctgagactcttgcactcctgaaagcacaaattgatcctgtactattgaaaaactctagccaacaagacaactcttctcgggaaagtcccagcttagaggatgaggagact

SEQ ID NO: 175028 - DNA, 2409 bp, Homo sapiens
  Payload ID: 14368
  Gene Symbol: RSF1
  Gene Name: remodeling and spacing factor 1
  ENST ID: ENST00000526324
  CDS Start-End: 1-2409
gagactcttgcactcctgaaagcacaaattgatcctgtactattgaaaaactctagccaacaagacaactcttctcgggaaagtcccagcttagaggatgaggagactaaaaaagaggaagaaacacctaaacaagaggaacagaaagaaagtgaaaagatgaaaagtgaggagcagcctatggatttagaaaaccgttctacagccaatgttctagaagagactactgtgaaaaaagaaaaagaagatgaaaaggaacttgtgaaactgccagtcatagtgaagctagaaaaacctttgccagaaaatgaagaaaaaaagattatcaaagaagaaagtgattccttcaaggaaaatgtcaaacccattaaagttgaggtgaaggaatgtagagcagatcctaaagataccaaaagtagcatggagaagccagtggcacaggagcctgaaaggatcgaatttggtggcaatattaaatcttctcacgaaattactgagaaatctactgaagaaactgagaaacttaaaaatgaccagcaggccaagataccactaaaaaaacgagaaattaaactgagtgatgattttgacagtccagtcaagggacctttgtgtaaatcagttactccaacaaaagagtttttgaaagatgaaataaaacaagaggaagagacttgtaaaaggatctctacaatcactgctttgggtcatgaagggaaacagctggtaaatggagaagttagtgatgaaagggtagctccaaattttaagacagaaccaatagagacaaagttttatgagacaaaggaagagagctatagcccctctaaggacagaaatatcatcacggagggaaatggaacagagtccttaaattctgtcataacaagtatgaaaacaggtgagcttgagaaagaaacagcccctttgaggaaagatgcagatagttcaatatcagtcttagagatccatagtcaaaaagcacaaatagaggaacccgatcctccagaaatggaaacttctcttgattcttctgagatggcaaaagatctctcttcaaaaactgctttatcttccaccgagtcgtgtaccatgaaaggtgaagagaagtctcccaaaactaagaaggataagcgcccaccaatcctagaatgtcttgaaaagttagagaagtccaaaaagacttttcttgataaggacgcacaaagattgagtccaataccagaagaagttccaaagagtactctagagtcagaaaagcctggctctcctgaggcagctgaaacttctccaccatctaatatcattgaccactgtgagaaactagcctcagaaaaagaagtggtagaatgccagagtacaagtactgttggtggccagtctgtgaaaaaagtagacctagaaaccctaaaagaggattctgagttcacaaaggtagaaatggataatctggacaatgcccagacctctggcatagaggagccttctgagacaaagggttctatgcaaaaaagcaaattcaaatataagttggttcctgaagaagaaaccactgcctcagaaaatacagagataacctctgaaaggcagaaagagggcatcaaattaacaatcaggatatcaagtcggaaaaagaagcccgattctccccccaaagttctagaaccagaaaacaagcaagagaagacagaaaaggaagaggagaaaacaaatgtgggtcgtactttaagaagatctccaagaatatctagacccactgcaaaagtggctgagatcagagatcagaaagctgataaaaaaagaggggaaggagaagatgaggtggaagaagagtcaacagctttgcaaaaaactgacaaaaaggaaattttgaaaaaatcagagaaagatacaaattctaaagtaagcaaggtaaaacccaaaggcaaagttcgatggactggttctcggacacgtggcagatggaaatattccagcaatgatgaaagtgaagggtctggcagtgaaaaatcatctgcagcttcagaagaggaggaagaaaaggaaagtgaagaagccatcctagcagatgatgatgaaccatgcaaaaaatgtggccttccaaaccatcctgagctaattcttctgtgtgactcttgcgatagtggataccatactgcctgccttcgccctcctctgatgatcatcccagatggagaatggttctgcccaccttgccaacataaactgctctgtgaaaaattagaggaacagttgcaggatttggatgttgccttaaagaagaaagagcgtgccgaacgaagaaaagaacgcttggtgtatgttggtatcagtattgaaaacatcattcctccacaagagccagacttttctgaagatcaagaagaaaagaaaaaagattcaaaaaaa

SEQ ID NO: 175029 - DNA, 830 bp, Homo sapiens
  Payload ID: 14368
  Gene Symbol: RSF1
  Gene Name: remodeling and spacing factor 1
  ENST ID: ENST00000531026
  CDS Start-End: 1-830
gaaccatgcaaaaaatgtggccttccaaaccatcctgagctaattcttctgtgtgactcttgcgatagtggataccatactgcctgccttcgccctcctctgatgatcatcccagatggagaatggttctgcccaccttgccaacataaactgctctgtgaaaaattagaggaacagttgcaggatttggatgttgccttaaagaagaaagagcgtgccgaacgaagaaaagaacgcttggtgtatgttggtatcagtattgaaaacatcattcctccacaagagccagacttttctgaagatcaagaagaaaagaaaaaagattcaaaaaaatccaaagcaaacttgcttgaaaggaggtcaacaagaacaaggaaatgtataagctacagatttgatgagtttgatgaagcaattgatgaagctattgaagatgacatcaaagaagccgatggaggaggagttggccgaggaaaagatatctccaccatcacaggtcatcgtgggaaagacatctctactattttggatgaagaaagaaaagaaaataaacgaccccagagggcagctgctgctcgaaggaagaaacgccggcgattaaatgatctggacagtgatagcaacctggatgaagaagagagcgaggatgaattcaagatcagtgatggatctcaagatgagtttgttgtgtctgatgaaaacccagatgaaagtgaagaagatccgccatctaatgatgacagtgacactgacttttgtagccgtagactgaggcgacacccctctcggccaatgaggcagagcaggcgtttgcgaagaaagaccccaaa

SEQ ID NO: 175030 - DNA, 5318 bp, Homo sapiens
  Payload ID: 14368
  Gene Symbol: RSF1
  Gene Name: remodeling and spacing factor 1
  Uniprot ID: Q96T23
  ENST ID: ENST00000480887
  CDS Start-End: 1062-4631
ctggtttatcaacttgacgagaatcatttcaaaattttaggaaaaaaatttatgtctcagtaaaactttgtttagaattaggtttttcagtagcaaggataaggtgaagggattaaaaatgtacgtaaaattagtagtcaatgaattctggaatgcagtctgtataatcctattcagagattatgctatttactgaatatagctttggttgtgtttaaatctgcactagtattaggtgctccttaaaagttgaaaatatatagccaataaggtataaagaagaattgacagataaatctaaacagtttctttgtatagtactaacttctgaaatgttcagtggtggcatttgataaagtaagttgtaatatgatcacattgaggaatgttatataattattaaactcaatttttataaaaggcatcattttataaaagtatcataagaaagtgccaatgtttcaatgaataaattgaggcaacatgataccaacttagtgaaaaatatacaagaccagaaggaagtaacctaaaatattactagtgattgcctctgggtaataggatatgggctttttgtctttctatatttttcattttcccactgccgtgttcctggtacctcagtgaaatgaagtgctcagttcttttaacagttgtcagtttttaaaacaaatatagtcttctggaaatgttttaggtagcattttcaattttatgtttttaagccatctcttgaatttgaataaattatttgaactgcataaatatttgcaatccattgagaacaccaaaacaaaaagtaaaaagcagaaacctaaatttttctaaattttttttaatatctagaagttgtatctcaaagtttttgtaattttcttcattgtcagattttattttttactgtcaaatatccaatgacagaggccacctcttttaaaatagaaactttaaatggaaatatacattatactaagtcttatattttatagccttgaaagtttctattcatgtaattaagctttttctgatttttagaggaacagaaagaaagtgaaaagatgaaaagtgaggagcagcctatggatttagaaaaccgttctacagccaatgttctagaagagactactgtgaaaaaagaaaaagaagatgaaaaggaacttgtgaaactgccagtcatagtgaagctagaaaaacctttgccagaaaatgaagaaaaaaagattatcaaagaagaaagtgattccttcaaggaaaatgtcaaacccattaaagttgaggtgaaggaatgtagagcagatcctaaagataccaaaagtagcatggagaagccagtggcacaggagcctgaaaggatcgaatttggtggcaatattaaatcttctcacgaaattactgagaaatctactgaagaaactgagaaacttaaaaatgaccagcaggccaagataccactaaaaaaacgagaaattaaactgagtgatgattttgacagtccagtcaagggacctttgtgtaaatcagttactccaacaaaagagtttttgaaagatgaaataaaacaagaggaagagacttgtaaaaggatctctacaatcactgctttgggtcatgaagggaaacagctggtaaatggagaagttagtgatgaaagggtagctccaaattttaagacagaaccaatagagacaaagttttatgagacaaaggaagagagctatagcccctctaaggacagaaatatcatcacggagggaaatggaacagagtccttaaattctgtcataacaagtatgaaaacaggtgagcttgagaaagaaacagcccctttgaggaaagatgcagatagttcaatatcagtcttagagatccatagtcaaaaagcacaaatagaggaacccgatcctccagaaatggaaacttctcttgattcttctgagatggcaaaagatctctcttcaaaaactgctttatcttccaccgagtcgtgtaccatgaaaggtgaagagaagtctcccaaaactaagaaggataagcgcccaccaatcctagaatgtcttgaaaagttagagaagtccaaaaagacttttcttgataaggacgcacaaagattgagtccaataccagaagaagttccaaagagtactctagagtcagaaaagcctggctctcctgaggcagctgaaacttctccaccatctaatatcattgaccactgtgagaaactagcctcagaaaaagaagtggtagaatgccagagtacaagtactgttggtggccagtctgtgaaaaaagtagacctagaaaccctaaaagaggattctgagttcacaaaggtagaaatggataatctggacaatgcccagacctctggcatagaggagccttctgagacaaagggttctatgcaaaaaagcaaattcaaatataagttggttcctgaagaagaaaccactgcctcagaaaatacagagataacctctgaaaggcagaaagagggcatcaaattaacaatcaggatatcaagtcggaaaaagaagcccgattctccccccaaagttctagaaccagaaaacaagcaagagaagacagaaaaggaagaggagaaaacaaatgtgggtcgtactttaagaagatctccaagaatatctagacccactgcaaaagtggctgagatcagagatcagaaagctgataaaaaaagaggggaaggagaagatgaggtggaagaagagtcaacagctttgcaaaaaactgacaaaaaggaaattttgaaaaaatcagagaaagatacaaattctaaagtaagcaaggtaaaacccaaaggcaaagttcgatggactggttctcggacacgtggcagatggaaatattccagcaatgatgaaagtgaagggtctggcagtgaaaaatcatctgcagcttcagaagaggaggaagaaaaggaaagtgaagaagccatcctagcagatgatgatgaaccatgcaaaaaatgtggccttccaaaccatcctgagctaattcttctgtgtgactcttgcgatagtggataccatactgcctgccttcgccctcctctgatgatcatcccagatggagaatggttctgcccaccttgccaacataaactgctctgtgaaaaattagaggaacagttgcaggatttggatgttgccttaaagaagaaagagcgtgccgaacgaagaaaagaacgcttggtgtatgttggtatcagtattgaaaacatcattcctccacaagagccagacttttctgaagatcaagaagaaaagaaaaaagattcaaaaaaatccaaagcaaacttgcttgaaaggaggtcaacaagaacaaggaaatgtataagctacagatttgatgagtttgatgaagcaattgatgaagctattgaagatgacatcaaagaagccgatggaggaggagttggccgaggaaaagatatctccaccatcacaggtcatcgtgggaaagacatctctactattttggatgaagaaagaaaagaaaataaacgaccccagagggcagctgctgctcgaaggaagaaacgccggcgattaaatgatctggacagtgatagcaacctggatgaagaagagagcgaggatgaattcaagatcagtgatggatctcaagatgagtttgttgtgtctgatgaaaacccagatgaaagtgaagaagatccgccatctaatgatgacagtgacactgacttttgtagccgtagactgaggcgacacccctctcggccaatgaggcagagcaggcgtttgcgaagaaagaccccaaagaaaaaatattccgatgatgatgaagaggaggaatctgaggagaatagtagagactctgaaagtgacttcagtgatgattttagtgatgattttgtagaaactcggcgaaggcggtcaaggagaaatcagaaaagacaaattaactacaaagaagactcagaaagtgacggttcccagaagagtttgcgacgtggtaaagaaataaggcgagtacacaagcgaagactttccagctcagagagtgaagagagctatttgtccaagaactctgaagatgatgagctagctaaagaatcaaagcggtcagttcgaaagcggggccgaagcacagacgagtattcagaagcagatgaggaggaggaggaagaggaaggcaaaccatcccgcaaacggctacaccggattgagacggatgaggaggagagttgtgacaatgctcatggagatgcaaatcagcctgcccgtgacagccagcctagggtcctgccctcagaacaagagagcaccaagaagccctaccggatagaaagtgatgaggaagaggactttgaaaatgtaggcaaagtggggagcccattggactatagcttagtggacttaccttcaaccaatggacagagccctggcaaagccattgagaacttgattggcaagcctactgagaagtctcagacccccaaggacaacagcacagccagtgcaagcctagcctccaatgggacaagtggtgggcaggaggcaggagcaccagaagaggaggaagatgagcttttgagagtgactgaccttgttgattatgtctgtaacagtgaacagttataagactttttttccatttttgtgctaatttattccacggtagctctcacaccagcgggccagttattaaaagctgtttaatttttcctagaaaactccactacagaatgacttttagaagaaaaatttcaacaaatcctgaagtctttctgtgaagtgaccagttctgaactttgaagataaataattgctgtaaattccttttgattttctttttccaggttcatggtccttggtaatttcattcatggaaaaaaatcttattataataacaacaaagatttgtatatttttgactttatatttcctgagctctcctgactttgtgaaaaagggtggatgaaaatgcattccgaatctgtgagggcccaaaacagaatttaggggtgggtgaaagcacttgtgctttagctttttcatattaaatatatattatatttaaacattcatggcatagatgatgatttacagacaatttaaaagttcaagtctgtactgttacagtttgagaattgtagataacatcatacataagtcatttagtaacagcctttgtgaaatgaacttgtttactattggagataaccacacttaataaagaagagacagtgaaagtaccatcataattaacctaaatttttgttatagcagagtttcttgtttaaaaaaaaataaaatcatctgaaaagc

SEQ ID NO: 175031 - DNA, 2107 bp, Homo sapiens
  Payload ID: 14368
  Gene Symbol: RSF1
  Gene Name: remodeling and spacing factor 1
  ENST ID: ENST00000528095
  CDS Start-End: 1-2107
gcgacggcggcggcagcggcggcggtgatggctcctccgggctgcccgggttcgtgccccaacttcgccgtagtctgctccttcttggagcgctacgggccgctgctagacctgcctgagttgccgttccctgagctggagcgggtgctgcaggcgccgccgccggacgtcggcaacggagaagtaccaaaagaattggtggagctccatttgaagctgatgaggaaaattggcaaatctgttactgcagacagatgggaaaaatatttgatcaagatatgccaagagtttaacagtacctgggcatgggagatggagaagaagggctatcttgaaatgagtgttgaatgcaaactagcactcttaaagtacctctgtgagtgtcagtttgatgacaatctcaaattcaagaatattattaatgaggaggatgccgatactatgcgtctccagccaattggtcgagacaaagatggcctcatgtactggtaccaattggatcaagatcacaatgtcagaatgtacatagaagaacaagatgatcaagatggctcttcatggaaatgcattgtcagaaatcgaaacgagttggctgagactcttgcactcctgaaagcacaaattgatcctgtactattgaaaaactctagccaacaagacaactcttctcgggaaagtcccagcttagaggatgaggagactaaaaaagaggaagaaacacctaaacaagaggaacagaaagaaagtgaaaagatgaaaagtgaggagcagcctatggatttagaaaaccgttctacagccaatgttctagaagagactactgtgaaaaaagaaaaagaagatgaaaaggaacttgtgaaactgccagtcatagtgaagctagaaaaacctttgccagaaaatgaagaaaaaaagattatcaaagaagaaagtgattccttcaaggaaaatgtcaaacccattaaagttgaggtgaaggaatgtagagcagatcctaaagataccaaaagtagcatggagaagccagtggcacaggagcctgaaaggatcgaatttggtggcaatattaaatcttctcacgaaattactgagaaatctactgaagaaactgagaaacttaaaaatgaccagcaggccaagataccactaaaaaaacgagaaattaaactgagtgatgattttgacagtccagtcaagggacctttgtgtaaatcagttactccaacaaaagagtttttgaaagatgaaataaaacaagaggaagagacttgtaaaaggatctctacaatcactgctttgggtcatgaagggaaacagctggtaaatggagaagttagtgatgaaagggtagctccaaattttaagacagaaccaatagagacaaagttttatgagacaaaggaagagagctatagcccctctaaggacagaaatatcatcacggagggaaatggaacagagtccttaaattctgtcataacaagtatgaaaacaggtgagcttgagaaagaaacagcccctttgaggaaagatgcagatagttcaatatcagtcttagagatccatagtcaaaaagcacaaatagaggaacccgatcctccagaaatggaaacttctcttgattcttctgagatggcaaaagatctctcttcaaaaactgctttatcttccaccgagtcgtgtaccatgaaaggtgaagagaagtctcccaaaactaagaaggataagcgcccaccaatcctagaatgtcttgaaaagttagagaagtccaaaaagacttttcttgataaggacgcacaaagattgagtccaataccagaagaagttccaaagagtactctagagtcagaaaagcctggctctcctgaggcagctgaaacttctccaccatctaatatcattgaccactgtgagaaactagcctcagaaaaagaagtggtagaatgccagagtacaagtactgttggtggccagtctgtgaaaaaagtagacctagaaaccctaaaagaggattctgagttcacaaaggtagaaatggataatctggacaatgcccagacctctggcatagaggagccttctgagacaaagggttctatgcaaaaaa

SEQ ID NO: 175032 - DNA, 495 bp, Homo sapiens
  Payload ID: 14368
  Gene Symbol: RSF1
  Gene Name: remodeling and spacing factor 1
  ENST ID: ENST00000532556
  CDS Start-End: 1-495
agaagcccgattctccccccaaagttctagaaccagaaaacaagcaagagaagacagaaaaggaagaggagaaaacaaatgtgggtcgtactttaagaagatctccaagaatatctagacccactgcaaaagtggctgagatcagagatcagaaagctgataaaaaaagaggggaaggagaagatgaggtggaagaagagtcaacagctttgcaaaaaactgacaaaaaggaaattttgaaaaaatcagagaaagatacaaattctaaagtaaaacccaaaggcaaagttcgatggactggttctcggacacgtggcagatggaaatattccagcaatgatgaaagtgaagggtctggcagtgaaaaatcatctgcagcttcagaagaggaggaagaaaaggaaagtgaagaagccatcctagcagatgatgatgaaccatgcaaaaaatgtggccttccaaaccatcctgagctaattcttctgtgtgactctt

SEQ ID NO: 175033 - DNA, 1447 bp, Homo sapiens
  Payload ID: 14369
  Gene Symbol: RNLS
  Gene Name: renalase, FAD-dependent amine oxidase
  Uniprot ID: Q5VYX0
  ENST ID: ENST00000331772
  CDS Start-End: 24-1052
gcggatcgctgctccctctcgccatggcgcaggtgctgatcgtgggcgccgggatgacaggaagcttgtgcgctgcgctgctgaggaggcagacgtccggtcccttgtaccttgctgtgtgggacaaggctgaggactcagggggaagaatgactacagcctgcagtcctcataatcctcagtgcacagctgacttgggtgctcagtacatcacctgcactcctcattatgccaaaaaacaccaacgtttttatgatgaactgttagcctatggcgttttgaggcctctaagctcgcctattgaaggaatggtgatgaaagaaggagactgtaactttgtggcacctcaaggaatttcttcaattattaagcattacttgaaagaatcaggtgcagaagtctacttcagacatcgtgtgacacagatcaacctaagagatgacaaatgggaagtatccaaacaaacaggctcccctgagcagtttgatcttattgttctcacaatgccagttcctgagattctgcagcttcaaggtgacatcaccaccttaattagtgaatgccaaaggcagcaactggaggctgtgagctactcctctcgatatgctctgggcctcttttatgaagctggtacgaagattgatgtcccttgggctgggcagtacatcaccagtaatccctgcatacgcttcgtctccattgataataagaagcgcaatatagagtcatcagaaattgggccttccctcgtgattcacaccactgtcccatttggagttacatacttggaacacagcattgaggatgtgcaagagttagtcttccagcagctggaaaacattttgccgggtttgcctcagccaattgctaccaaatgccaaaaatggagacattcacaggttacaaatgctgctgccaactgtcctggccaaatgactctgcatcacaaacctttccttgcatgtggaggggatggatttactcagtccaactttgatggctgcatcacttctgccctatgtgttctggaagctttaaagaattatatttagtgcctatatccttattctctacatgtgtattgggtttttattttcacaattttctgttattgattattttgttttctattttgctaagaaaaattactggaaaattgttcttcacttattatcatttttcatgtggagtataaaatcaattttgtaattttgatagttacaacccatgctagaatggaaattcctcacaccttgcaccttccctacttttctgaattgctatgactactccttgttggaggaaaagtggtacttaaaaaataacaaacgactctctcaaaaaaattacattaaatcacaataacagtttgtgtgccaaaaacttgattatccttatgaaaatttcaattctgaataaagaataatcacattatcaaagccccatc

SEQ ID NO: 175034 - DNA, 3385 bp, Homo sapiens
  Payload ID: 14369
  Gene Symbol: RNLS
  Gene Name: renalase, FAD-dependent amine oxidase
  Uniprot ID: Q5VYX0
  ENST ID: ENST00000371947
  CDS Start-End: 1341-2288
ttggacttacgtatttctttttattcaagaactctatccaatatatacacattttccttttggcttttgtcatttgtgtctttaagactttgaataatgtttttaaataatattaactttaatctttcatacacctttcagaaatttactatttgtattttgttttgtgtattttgtaacacacaagttgtaaatgattatgtattttctgttcaattccatctttcatttttatgcttaaaaatgtcttcttagtcatatatgcccgtctacattttcttctagttcttttattagatatatctagtattaattcgtcacccatttgatacatggtaatttttttcatgatgtggacatgaagtaaatattctgatttttaaatgtttccattataattggctaccattgtcaattttcttattggttctgatacttattcggtttcttagttttccaggtaataatttatctgcaagtcagcgtaacttaattatttgttttttaatagttcagtattaccattgcctttgttgtttcattgagaacttccagtacaatgtcaggagggggaaaaaaacaacggcaatggcaccaatccttctcttgttgttcatctttatattccttagaacatacggaatgcgttctgacatagaacttattgaagagtaatttggaattttctgatgaatcaactgtctttaatctttacaagtttgaaaggtatacgttattgtttccatttcccagatggagaaattgaggttcaggaaggttacacaaagtcccaggtctaagaaaaatgtctcccagattccaaaagatgtttctattatgctaatagtggccgttcaagcattagaggaaaggttgcccgtggtatcgctggtaaattcttcttcccactttcaaatctagaatagtaaaacagcaaaaatcccaacaggcatgagagttatcgcagtagataggttaagctgcttctctgctgtggtcaacgtcagctctgttgcgaggcgggttctcccaacaatagcccacaccatttccaggcttttctgggcgaggggcagggcgcccggcccccaaagcgagaagacagacagccccggttctccgcagccccaggtttgctcctcaaggacggaggggcctctcagctccggccgcctcctttccgccccctgcaggccggccggaggaaagctcagggcccaggtcggcccagggagcacggaaccaaagagcgctagcgccggttcggccgcctttccagaaagcccgggccgaacggccccgccgcagagactcagcgcggatcgctgctccctctcgccatggcgcaggtgctgatcgtgggcgccgggatgacaggaagcttgtgcgctgcgctgctgaggaggcagacgtccggtcccttgtaccttgctgtgtgggacaaggctgaggactcagggggaagaatgactacagcctgcagtcctcataatcctcagtgcacagctgacttgggtgctcagtacatcacctgcactcctcattatgccaaaaaacaccaacgtttttatgatgaactgttagcctatggcgttttgaggcctctaagctcgcctattgaaggaatggtgatgaaagaaggagactgtaactttgtggcacctcaaggaatttcttcaattattaagcattacttgaaagaatcaggtgcagaagtctacttcagacatcgtgtgacacagatcaacctaagagatgacaaatgggaagtatccaaacaaacaggctcccctgagcagtttgatcttattgttctcacaatgccagttcctgagattctgcagcttcaaggtgacatcaccaccttaattagtgaatgccaaaggcagcaactggaggctgtgagctactcctctcgatatgctctgggcctcttttatgaagctggtacgaagattgatgtcccttgggctgggcagtacatcaccagtaatccctgcatacgcttcgtctccattgataataagaagcgcaatatagagtcatcagaaattgggccttccctcgtgattcacaccactgtcccatttggagttacatacttggaacacagcattgaggatgtgcaagagttagtcttccagcagctggaaaacattttgccgggtttgcctcagccaattgctaccaaatgccaaaaatggagacattcacaggtaccaagtgctggtgtgattctaggatgtgcgaagagcccctggatgatggcgattggatttcccatctgacttcctggaaattggagcacacagtcaggttttatttgatttttttttttaaggataccacttcacagcctttaggatagctattatttagaagcaaaacagaagataaatgttggcaaggatgtggagatattggattcccttgtgcagtgccggtgggaatgtaaaatgatgtagctactatggaaaatgatacggcaatttctttagaaatgaaatatagaattgctgtatgatctgcagttccacatctggatatctatccaaaagaagtgaaagtagggacttgaacgaacatttgtacaccaatgttcacagcggctttattcacaacagccaaaaggtggaagcaacccagtgtccatggatagatgaatagataaataaaatgtggtataaacatacaatgggctattgtttagccttaaaagggaaggaaattctgacatgctgcaatatggatgaagcttaaagtcattatgcaaagtggaataagcctatcacaaaaaataatattacataattctacttatatgaggaatctagagcagtcagtttcacagagacagaaaatagaatggtggttgccaagggctgggagaagagggcaatggagagtgagtgtttagtgggtcagagttttagtttgggaaggtaaaaagttctggagatggatgatggttatgggtgctcaacagtgtgaatgtacttaatgccacagaactgcacatttaaatgtggttaaaatcatcacttttatgttatgtatatttaccacaataaataaagaagttgatatttcttatacttacaaagaggagaagggcatttgcaaatcaacaagaagtgtgaggcccctctctctagcagaaaaatagactaaatctatttctttatcttttaacatcctgtttaagggaaatgccaaaacaaatgggaaaaaatacacacacacaaatatatatgaacatgttttgcctcatgagtaatcaaaatgtgtacatatgtatgtttatgtatgtgtgtttatatttaaaatcgtgttctgccttatgagtaaacaaaaagtatacaaattaaaaactataatgaaacgt

SEQ ID NO: 175035 - DNA, 525 bp, Homo sapiens
  Payload ID: 14369
  Gene Symbol: RNLS
  Gene Name: renalase, FAD-dependent amine oxidase
  ENST ID: ENST00000437752
  CDS Start-End: 1-525
atggcgcaggtgctgatcgtgggcgccgggatgacaggaagcttgtgcgctgcgctgctgaggaggcagacgtccggtcccttgtaccttgctgtgtgggacaaggctgaggactcagggggaagaatgactacagcctgcagtcctcataatcctcagtgcacagctgacttgggtgctcagtacatcacctgcactcctcattatgccaaaaaacaccaacgtttttatgatgaactgttagcctatggcgttttgaggcctctaagctcgcctattgaaggaatggtgatgaaagaaggagactgtaactttgtggcacctcaaggaatttcttcaattattaagcattacttgaaagaatcaggtgcagaagtctacttcagacatcgtgtgacacagatcaacctaagagatgacaaatgggaagtatccaaacaaacaggctcccctgagcagtttgatcttattgttctcacaatgccagttcctgagattctgcagcttcaaggtgacatcaccacc

SEQ ID NO: 175036 - DNA, 1447 bp, Homo sapiens
  Payload ID: 14370
  Gene Symbol: REN
  Gene Name: renin
  Uniprot ID: P00797
  ENST ID: ENST00000272190
  CDS Start-End: 30-1250
ctcagagagagccccagactgagggaagcatggatggatggagaaggatgcctcgctggggactgctgctgctgctctggggctcctgtacctttggtctcccgacagacaccaccacctttaaacggatcttcctcaagagaatgccctcaatccgagaaagcctgaaggaacgaggtgtggacatggccaggcttggtcccgagtggagccaacccatgaagaggctgacacttggcaacaccacctcctccgtgatcctcaccaactacatggacacccagtactatggcgagattggcatcggcaccccaccccagaccttcaaagtcgtctttgacactggttcgtccaatgtttgggtgccctcctccaagtgcagccgtctctacactgcctgtgtgtatcacaagctcttcgatgcttcggattcctccagctacaagcacaatggaacagaactcaccctccgctattcaacagggacagtcagtggctttctcagccaggacatcatcaccgtgggtggaatcacggtgacacagatgtttggagaggtcacggagatgcccgccttacccttcatgctggccgagtttgatggggttgtgggcatgggcttcattgaacaggccattggcagggtcacccctatcttcgacaacatcatctcccaaggggtgctaaaagaggacgtcttctctttctactacaacagagattccgagaattcccaatcgctgggaggacagattgtgctgggaggcagcgacccccagcattacgaagggaatttccactatatcaacctcatcaagactggtgtctggcagattcaaatgaagggggtgtctgtggggtcatccaccttgctctgtgaagacggctgcctggcattggtagacaccggtgcatcctacatctcaggttctaccagctccatagagaagctcatggaggccttgggagccaagaagaggctgtttgattatgtcgtgaagtgtaacgagggccctacactccccgacatctctttccacctgggaggcaaagaatacacgctcaccagcgcggactatgtatttcaggaatcctacagtagtaaaaagctgtgcacactggccatccacgccatggatatcccgccacccactggacccacctgggccctgggggccaccttcatccgaaagttctacacagagtttgatcggcgtaacaaccgcattggcttcgccttggcccgctgaggccctctgccacccaggcaggccctgccttcagccctggcccagagctggaacactctctgagatgcccctctgcctgggcttatgccctcagatggagacattggatgtggagctcctgctggatgcgtgccctgacccctgcaccagcccttccctgctttgaggacaaagagaataaagacttcatgttcaca

SEQ ID NO: 175037 - DNA, 1322 bp, Homo sapiens
  Payload ID: 14371
  Gene Symbol: RENBP
  Gene Name: renin binding protein
  ENST ID: ENST00000369997
  CDS Start-End: 78-1319
gggcgcggctgtgtcagctgagtgacagtcacgggaccgcgaccaactctgtctggcttcctagaggagcaggagggatgagcaagggtctcccagcgcgacaggacatggagaaagagcgagagactctgcaggcctggaaggagcgcgtggggcaggagctggaccgcgtggtggctttctggatggagcactcccacgaccaggagcacgggggcttcttcacgtgccttggccgcgaggggcgggtatggatgtattgtcgcctgtaccgcactttcgagcgcttccgccatgctcagcttctggacgcagcaaaagcaggtggtgagttcttgctgcggtatgcccgggtggcacctcctggcaagaagtgtgcctttgtgctgactcgggacggccgcccggtcaaggtgcagcgaaccatcttcagtgagtgtttctacaccatggccatgaacgagctgtggagagccacaggggaagtgcggtaccagacggaagcggtggagatgatggatcagatcgtccactgggtgcaggaggacgcgtcgggactgggccggccccagctccagggggccccggctgcggagcccatggcggtgcccatgatgctactgaacctggtggagcagctcggggaggcagatgaggagctggcgggcaaatacgcagagctgggggactggtgcgcccggaggattctgcagcacgtgcagagggatggacaagctgtgctggagaatgtgtcagagggtggcaaggaacttcctggctgcctggggagacagcagaacccaggccacacgctggaagccggctggtttctgctccgtcattgcattcggaaaggcgaccccgaacttcgagcccacgtgattgacaagttcctattgttgcccttccactccggatgggaccctgaccacggaggcctcttttacttccaggatgctgataacttctgccccacccagctggagtgggccatgaagctctggtggccacacagtgaagccatgattgccttcctcatgggttacagtgacagtggggaccctgtgctgctgcgcctcttctaccaagtggctgagtacaccttccgccagtttcgcgatcccgagtacggggaatggtttggctacctgagccgagagggcaaggtggccctctccatcaagggaggtcctttcaaaggctgcttccacgtgccgcggtgcctagccatgtgcgaggagatgctgggcgccctgctgagccgccccgcccccgccccctcccccgcccccacccccgcctgccgaggcgcggaataaagg

SEQ ID NO: 175038 - DNA, 1388 bp, Homo sapiens
  Payload ID: 14371
  Gene Symbol: RENBP
  Gene Name: renin binding protein
  Uniprot ID: P51606
  ENST ID: ENST00000393700
  CDS Start-End: 82-1365
agccgggcgcggctgtgtcagctgagtgacagtcacgggaccgcgaccaactctgtctggcttcctagaggagcaggagggatgagcaagggtctcccagcgcgacaggacatggagaaagagcgagagactctgcaggcctggaaggagcgcgtggggcaggagctggaccgcgtggtggctttctggatggagcactcccacgaccaggagcacgggggcttcttcacgtgccttggccgcgaggggcgggtgtatgatgacctcaagtatgtgtggctgcaggggaggcaggtatggatgtattgtcgcctgtaccgcactttcgagcgcttccgccatgctcagcttctggacgcagcaaaagcaggtggtgagttcttgctgcggtatgcccgggtggcacctcctggcaagaagtgtgcctttgtgctgactcgggacggccgcccggtcaaggtgcagcgaaccatcttcagtgagtgtttctacaccatggccatgaacgagctgtggagagccacaggggaagtgcggtaccagacggaagcggtggagatgatggatcagatcgtccactgggtgcaggaggacgcgtcgggactgggccggccccagctccagggggccccggctgcggagcccatggcggtgcccatgatgctactgaacctggtggagcagctcggggaggcagatgaggagctggcgggcaaatacgcagagctgggggactggtgcgcccggaggattctgcagcacgtgcagagggatggacaagctgtgctggagaatgtgtcagagggtggcaaggaacttcctggctgcctggggagacagcagaacccaggccacacgctggaagccggctggtttctgctccgtcattgcattcggaaaggcgaccccgaacttcgagcccacgtgattgacaagttcctattgttgcccttccactccggatgggaccctgaccacggaggcctcttttacttccaggatgctgataacttctgccccacccagctggagtgggccatgaagctctggtggccacacagtgaagccatgattgccttcctcatgggttacagtgacagtggggaccctgtgctgctgcgcctcttctaccaagtggctgagtacaccttccgccagtttcgcgatcccgagtacggggaatggtttggctacctgagccgagagggcaaggtggccctctccatcaagggaggtcctttcaaaggctgcttccacgtgccgcggtgcctagccatgtgcgaggagatgctgggcgccctgctgagccgccccgcccccgccccctcccccgcccccacccccgcctgccgaggcgcggaataaaggctgagtccgctccacctgcg

SEQ ID NO: 175039 - DNA, 1304 bp, Homo sapiens
  Payload ID: 14371
  Gene Symbol: RENBP
  Gene Name: renin binding protein
  ENST ID: ENST00000423624
  CDS Start-End: 17-199
tagaggagcaggagggatgagcaagggtctcccagcgcgacaggccagacatggagaaagagcgagagactctgcaggcctggaaggagcgcgtggggcaggagctggaccgcgtggtggctttctggatggagcactcccacgaccaggagcacgggggcttcttcacgtgccttggccgcgaggggcgggtgtatgatgacctcaagtatgtgtggctgcaggggaggcaggtatggatgtattgtcgcctgtaccgcactttcgagcgcttccgccatgctcagcttctggacgcagcaaaagcaggtggtgagttcttgctgcggtatgcccgggtggcacctcctggcaagaagtgtgcctttgtgctgactcgggacggccgcccggtcaaggtgcagcgaaccatcttcagtgagtgtttctacaccatggccatgaacgagctgtggagagccacaggggaagtgcggtaccagacggaagcggtggagatgatggatcagatcgtccactgggtgcaggaggacgcgtcgggactgggccggccccagctccagggggccccggctgcggagcccatggcggtgcccatgatgctactgaacctggtggagcagctcggggaggcagatgaggagctggcgggcaaatacgcagagctgggggactggtgcgcccggaggattctgcagcacgtgcagagggatggacaagctgtgctggagaatgtgtcagagggtggcaaggaacttcctggctgcctggggagacagcagaacccaggccacacgctggaagccggctggtttctgctccgtcattgcattcggaaaggcgaccccgaacttcgagcccacgtgattgacaagttcctattgttgcccttccactccggatgggaccctgaccacggaggcctcttttacttccaggatgctgataacttctgccccacccagctggagtgggccatgaagctctggtggccacacagtgaagccatgattgccttcctcatgggttacagtgacagtggggaccctgtgctgctgcgcctcttctaccaagtggctgagtacaccttccgccagtttcgcgatcccgagtacggggaatggtttggctacctgagccgagagggcaaggtggccctctccatcaagggaggtcctttcaaaggctgcttccacgtgccgcggtgcctagccatgtgcgaggagatgctgggcgccctgctgagccgccccgcccccgccccctcccccgcccccacccccgcctgccgaggcgcggaataa

SEQ ID NO: 175040 - DNA, 817 bp, Homo sapiens
  Payload ID: 14371
  Gene Symbol: RENBP
  Gene Name: renin binding protein
  ENST ID: ENST00000442361
  CDS Start-End: 1-480
actttcgagcgcttccgccatgctcagcttctggacgcagcaaaagcaggtggtgagttcttgctgcggtatgcccgggtggcacctcctggcaagaagtgtgcctttgtgctgactcgggacggccgcccggtcaaggtgcagcgaaccatcttcagtgagtgtttctacaccatggccatgaacgagctgtggagagccacaggggaagtgcggtaccaggaggacgcgtcgggactgggccggccccagctccagggggccccggctgcggagcccatggcggtgcccatgatgctactgaacctggtggagcagctcggggaggcagatgaggagctggcgggcaaatacgcagagctgggggactggtgcgcccggaggattctgcagcacgtgcaggccacacgctggaagccggctggtttctgctccgtcattgcattcggaaaggcgaccccgaacttcgagcccacgtgattgacaagttcctattgttgcccttccactccggatgggaccctgaccacggaggcctcttttacttccaggatgctgataacttctgccccacccagctggagtgggccatgaagctctggtggccacacagtgaagccatgattgccttcctcatgggttacagtgacagtggggaccctgtgctgctgcgcctcttctaccaagtggctgagtacaccttccgccaggctggagcgcaatggcgtgatctcagctcactgcaacctccgcctcctgtgttcaagctattctcccgcctcagcctcccgagtatactgctgggattacaagtgcg

SEQ ID NO: 175041 - DNA, 745 bp, Homo sapiens
  Payload ID: 14371
  Gene Symbol: RENBP
  Gene Name: renin binding protein
  ENST ID: ENST00000457282
  CDS Start-End: 1-349
ggggagacagcagaacccaggccacacgctggaagccggctggtttctgctccgtcattgcattcggaaaggcgaccccgaacttcgagcccacgtgattgacaagttcctattgttgcccttccactccggatgggaccctgaccacggaggcctcttttacttccaggatgctgataacttctgccccacccagctggagtgggccatgaagctctggtggccacacagtgaagccatgattgccttcctcatgggttacagtgacagtggggaccctgtgctgctgcgcctcttctaccaagtggctgagtacaccttccgccagggtctctatcgcccaggctgagtgcagtggcacaatcatggctcagtgcagcctcaacctcctgggctcaagcgatccttccacctcagccacccaggctggagcgcaatggcgtgatctcagctcactgcaacctccgcctcctgtgttcaagctattctcccgcctcagcctcccgagtatactgctgggattacaatttcgcgatcccgagtacggggaatggtttggctacctgagccgagagggcaaggtggccctctccatcaagggaggtcctttcaaaggctgcttccacgtgccgcggtgcctagccatgtgcgaggagatgctgggcgccctgctgagccgccccgcccccgccccctcccccgcccccacccccgcctgccgaggcgcggaataaaggctgagtcc

SEQ ID NO: 175042 - DNA, 376 bp, Homo sapiens
  Payload ID: 14371
  Gene Symbol: RENBP
  Gene Name: renin binding protein
  ENST ID: ENST00000451114
  CDS Start-End: 1-376
ctctggtggccacacagtgaagccatgattgccttcctcatgggttacagtgacagtggggaccctgtgctgctgcgcctcttctaccaagtggctgagtacaccttccgccaggctggagcgcaatggcgtgatctcagctcactgcaacctccgcctcctgtgttcaagctattctcccgcctcagcctcccgagtatactgctgggattacaatttcgcgatcccgagtacggggaatggtttggctacctgagccgagagggcaaggtggccctctccatcaagggaggtcctttcaaaggctgcttccacgtgccgcggtgcctagccatgtgcgaggagatgctgggcgccctgctgagccgccccgccc

SEQ ID NO: 175043 - DNA, 3569 bp, Homo sapiens
  Payload ID: 14372
  Gene Symbol: RPTN
  Gene Name: repetin
  Uniprot ID: Q6XPR3
  ENST ID: ENST00000316073
  CDS Start-End: 66-2420
atcctctctgactcctgaatcttctgctccttcctcctcaagcaggttcacccgtacttgtcaaaatggctcaactcctgaatagcatactcagtgtgattgacgtattccacaaatatgccaaagggaatggggactgtgccttactatgcaaggaagagttgaaacaactgctcttggctgagtttggagacatcctccagagaccaaatgacccagagactgtggaaaccatcttgaacctcttagatcaagaccgagatggacatattgattttcatgagtacctcttgttggtgttccagttggtccaagcctgctatcataagctagacaataagtcacatggaggcaggacctcacagcaagaaagggggcaggaaggagcacaagactgtaagttcccaggaaacacaggcagacaacacagacagaggcacgaggaagaaaggcagaactcccaccacagtcagcctgagagacaagacggagattcccaccatggtcagcctgagagacaagacagagattcccaccatggtcagtctgagaaacaagacagagattcccaccacagtcagcctgagagacaagacagagattctcaccacaatcagtctgagagacaagacaaggatttcagctttgatcagtcagagagacaaagtcaagactccagctctggtaaaaaagtgagtcacaaatctaccagtggccaggctaaatggcagggacatatctttgccttaaatcggtgtgaaaaaccaattcaggattctcattatggtcagtctgaaagacatacacaacaatctgaaacacttggacaagcctctcactttaaccagacaaatcaacagaaatcaggctcttattgtggacagtctgagaggctaggtcaggaattaggctgtggtcagacagacagacaaggccagagttcccactacggtcagacggacagacaagaccagagttatcattatggtcagacagacagacaaggccagagttcccactacagtcagacggacagacaaggccagagttcccactacagtcagccagacagacaaggtcagagttcccactatggtcaaatggacagaaaaggccagtgttatcattatgatcagacaaacagacaaggccagggttcccactacagtcaaccaaacagacaaggtcagagttcccactatggtcagccagacacacaagatcagagttctcactatggtcagacagacagacaagaccaaagttctcactatggtcagacagagagacaaggccagagttcccactacagtcagatggaccgacaaggccagggttctcactacggtcagacagacagacaaggccagagttcccactatggtcagccagacagacaaggccagaattcccactatggtcagacagacagacaaggccagagttcccactatggtcagacagacagacaaggccagagttcccactacagtcagccagacaaacaaggccagagttcccactatggtaagatagacagacaagaccagagttatcattatggtcagccagacggacaaggccaaagttcccactatggtcagacagacagacaaggccagagtttccactatggtcagccagacagacaaggccagagttcccactacagtcagatggacagacaaggccagagttcccactatggtcagacagacagacaaggccagagttcccactacggtcagacagacagacaaggccagagctatcattatggtcagacagacagacaaggccagagttcccactatattcaatcacagactggggaaatacaagggcaaaataagtacttccaagggactgaaggaacaagaaaagcctcttatgttgaacaatcaggaagatcagggaggctaagtcaacagactccaggacaggaagggtaccaaaaccagggacagggattccagtctagggactcacagcagaacggccaccaggtatgggagcctgaagaggatagccaacatcaccaacacaaactcttagcacaaatccaacaagaaagaccactttgtcacaaagggagagactggcaatcatgcagtagtgagcagggccacagacaggcccagaccaggcagagtcatggtgaggggctgagccactgggcagaggaagagcagggccatcaaacttgggatagacacagccatgagagtcaggaaggtccatgtgggacacaggacaggcgaacccataaagatgagcagaaccatcagagacgagacagacaaacccatgaacatgagcagagccatcagagacgagacaggcaaacccatgaagacaagcagaaccgtcagagacgagacaggcaaacccatgaagacgagcagaaccatcagagatgagacaggcaaactcatgaagaggatcaaaaccatcagcaacaacataatagacaaaactatgaggagaaagagaggtatcaaggatctcagaatcaaaaatcccaagtgacccacagaagctgtcctaacagagaaaaattccacatgaaagaggatgaccagagccaaggctcacagaaaagacacactgaaccatccttctatccaacccagagcagtgggaggccccaaaccagagaacagcgtggtcaccctgccaagggagctactgttcccaaccccccctatgactatgtgcaagagcagaaatcctacccatactaggctatgtgagcaccagaggtaaagcaacacaaagccaaaaaagaaacctatatgtcgagttcacctttaattcgatttaagagattgagaatgtatttcttccctctatcctctgctgtatctccctgcaaggatgtttttgagtactagcattcacgtaagggcttttggttctttgagcagcaattctagggttttctgattcagtgaaatctaggtggtaaattgggtgaaataatcatatcttaatgttgatcagtttgggtatttaaatcatttcctgctttgccctctgtgtagatgagacctggttgaatcattgaaaggtagaacacttctccctaaagttcagaaacagaaaagatattctgaagatttacattacatccaaggattatactacatctccactcctcaaggaaccctagatttggtgagctttggctcctgtggataaaacatcaggaatttcaagcctcatagtctagactagaatgaaactcagttcaaggctgctacaagagccgagaacatagagtgcatctctgatgtttactacatctcccatgccaggctcttattccacaccagagggactgtccattagtgcctatcactagagctgaatggacccattccaattcaatacctttctagtttctgattatataaaataaagagaaagtatatgtcatatgtttgcaaattccaggggatcaagactattgattcatagctcctaagacctgaaaactcttctcaagaaaatctatgtgcagattatgaattgtattaaaatatctaataaataattgatgagcaata

SEQ ID NO: 175044 - DNA, 4859 bp, Homo sapiens
  Payload ID: 14373
  Gene Symbol: RFC1
  Gene Name: replication factor C (activator 1) 1, 145kDa
  Uniprot ID: P35251
  ENST ID: ENST00000349703
  CDS Start-End: 111-3554
cttgcacttcgcgggagaagttgttggcgcgaatggatcctgagcctcgataacagattcctcaaccggcccacccgccagccagccagcgccttcatcctggggctgcgatggacattcggaaattctttggagtaataccaagtggaaagaaacttgtaagtgaaacagtaaagaagaatgagaaaacaaagtctgatgaagaaactttaaaagcaaagaaaggaataaaggaaatcaaggtaaatagctcccgtaaagaggatgacttcaaacaaaagcaaccaagcaagaaaaagaggatcatctatgattcagattcagagtcagaggagacgttgcaggtaaaaaatgccaaaaagccaccagaaaaactgccagtatcttctaaacctggtaaaatttcacggcaggatcctgttacatacatttcagaaacagatgaagaagatgactttatgtgtaagaaggcggcctctaaatcaaaagagaatggaagatctacaaatagtcatcttggaacatcaaacatgaaaaagaatgaagaaaacactaagaccaagaataagcctttatcaccaataaaacttacacccacatcagtacttgattattttggaactggaagtgtccaaagatctaataagaagatggtggcaagcaaaagaaaagagctttcacaaaatacagatgagtctggattaaatgatgaagccatcgccaagcaattacagcttgatgaagatgcggagctggagaggcagttgcatgaagatgaagagtttgccagaacattagccatgttggatgaagaacccaagaccaaaaaggctcgaaaggacacagaagcgggagaaacgttttcatctgtccaagccaatttaagtaaagcagaaaaacataaatatcctcataaagtaaaaacagcacaagtttcagatgaaagaaagagctacagtcctaggaagcaaagtaaatatgaaagttcaaaagaatctcagcaacattccaagtcatcagctgacaaaataggagaagtctcttctcccaaggccagttctaagctggcaattatgaaaagaaaagaagagagctcttataaagaaatagagcctgtggcctcaaaaagaaaagaaaatgccattaaattgaaaggagagacaaaaactcctaagaaaaccaaaagttctccagctaaaaaagagtctgtaagtcctgaagattctgaaaagaaacgcactaattatcaagcttatcgaagctacttaaatcgagaaggtcccaaggctctgggctccaaagaaataccaaagggagctgaaaattgcttggaaggccttatatttgtaatcacaggcgtgctggagtctattgaacgagatgaggccaagtctctaattgaacgttatgggggaaaagtaacaggaaatgtcagcaagaaaacaaattatcttgtcatgggtcgtgatagtggacagtccaagagtgataaggccgcagccttggggacaaaaattattgatgaagatggcctgttgaatctgattcggactatgccaggcaagaaatccaagtatgaaatagcagttgaaactgagatgaagaaagagtccaaactggagagaacaccccaaaaaaatgtccaaggaaaaagaaaaattagtccatctaaaaaggaatcagaatctaaaaagagcaggccgacttccaaaagggacagtttggcaaagacaataaaaaaggaaacagatgtgttttggaaaagcctggatttcaaggagcaggtggctgaggagacaagtggtgacagcaaggctaggaatttggctgatgacagcagtgaaaacaaagtggaaaatttgctctgggtggataaatataagccaacctcgctcaagaccataattggacagcaaggtgaccagagctgtgccaacaaactcctacgctggctccgaaactggcaaaagagttcttccgaagataaaaaacacgcaaagtttggtaaattttccggcaaagatgatggctctagttttaaagcagcgttgctgtcaggccctcctggtgttggcaaaaccaccacagcttccctggtgtgtcaggagttgggatacagctacgtggaactgaatgcaagtgacacccggagtaagagcagtttgaaggcgattgttgctgagtcactgaacaataccagcatcaaaggcttttattcaaatggagcagcctcttcagtaagcacgaaacatgctctcatcatggatgaagtagatggcatggcaggcaatgaggataggggaggaattcaggaattaattggcctgataaaacatactaaaattcccattatttgtatgtgcaatgatagaaatcatcccaagattcgctctctggttcattattgttttgatcttcgttttcaaagacctcgggttgaacagattaagggtgctatgatgtctattgcatttaaagaaggtttaaagattccccctccagctatgaatgaaataattttgggagccaatcaagatatcagacaggttttacataatctgagtatgtggtgtgcacgaagtaaagcattaacctatgaccaggccaaagctgattctcacagagccaaaaaggatatcaaaatgggcccatttgatgttgcccggaaagtgtttgcagctggagaggagactgctcacatgtcacttgtggacaagtcagatctcttttttcatgattattcaatagcacccctcttcgtccaggaaaattacatacacgtgaagcctgtagcagcagggggtgacatgaaaaagcacctgatgcttttaagcagagcagcagacagcatatgcgatggtgacctagtggacagccagatccggagtaagcaaaactggagtcttctgcctgcgcaggccatttatgccagtgttcttcctggagagttgatgagggggtacatgacccagtttcccaccttcccaagctggctggggaagcactcgtctacaggcaaacatgatcgtattgttcaggacctggccttgcatatgagtctcagaacttactccagcaaaaggactgtaaacatggattatctgtcgcttctaagggatgcacttgtacagcccttgacctcacaaggagtagacggagtacaggatgttgttgcacttatggacacatattatttgatgaaagaagactttgagaatatcatggaaatcagcagctggggtggcaaacctagtcccttttcaaagctggatcccaaggtgaaagcagccttcacaagagcttacaataaggaagcccaccttactccatactcacttcaagctataaaggcatctagacacagcacaagcccatccctggattcggaatacaatgaagaattaaatgaagatgactctcaatctgatgagaaagaccaagatgctatagaaactgatgccatgatcaagaaaaagacaaaatcttcaaagccttcaaaaccagaaaaagataaggagcccagaaaaggaaaaggaaaaagttcgaagaaatgaaaccatttttcactagcgacagccactttttactctccctcctgaccagtccagctggtctagagaaagccttgttttttcccagagcaaccatgttttagcataatgggatgacctggtgtcccattataaataaagggtggtatggctagaagggtatgagcagtaggcttatgtacacctcttatagaggttgataggactgcttgggtcctccactgtcctctgtcaatctagttagacgtgcttctgaatgactgtagaattggaactagaaactacacctgggctttggagtcagattttagttaacaataatgagcctgggagcagtagtactaaggcgtcttttgtaggcttaagaatttatcctaatggcctttataggaccaatgctgattttttttaaaggcagttcctattatgtggtgaaattttgtaaataaatgattatacaaaacagtcaccacctagaactgggtattctttgtacattgtcagatatctttcaaagtataaattaggaataaaaatgttccacatgatatgtgtacaaattctttttaagattgtcatcttgtacagcaaaatattatgttggtatattacttccttattaatttgcaaatgattggattaaaaaagctcactgtattccttactaacctgttgtgtgaaacataacattggcagtcgaggagtcagaactcggattcccagcctcactccctctgtgtgtgttgaccacgtctctgctgtgaataggatttcatgcagtggtctgttatggggctttgcagcgtggggggctgcagaagattctcagacattcttatccttctggagtctcaacccatcaggttcagaccagtaggaaccaggctgggtcaggctcttaatttcactatggtgggggacaaaatgaacactggcttttgttcactttgcccctgagagatctagtcctgtcctgtgatggcttccacaaaccctgttggaagtttgggttattcctataactgtatgtgttgagtggccgtgaggctatggacctagcctggaatttagatgtctagctattttttaatcttgttggtaaatgctcagaggtctgtgctacctctgtgaggtatatactaaaatgaatgtaaaataaggatcgtattccctgctttaaggaactggtagtcttgtttgggtgatgagacaaagttcttgagacatttaaactgtatttaccagtgtgaaaaatgtcatttatggagattaattcattatggaaataaaacattgcctaagcccttg

SEQ ID NO: 175045 - DNA, 4886 bp, Homo sapiens
  Payload ID: 14373
  Gene Symbol: RFC1
  Gene Name: replication factor C (activator 1) 1, 145kDa
  Uniprot ID: P35251
  ENST ID: ENST00000381897
  CDS Start-End: 135-3581
accgcgcgccactgtcttcgccttcttgcacttcgcgggagaagttgttggcgcgaatggatcctgagcctcgataacagattcctcaaccggcccacccgccagccagccagcgccttcatcctggggctgcgatggacattcggaaattctttggagtaataccaagtggaaagaaacttgtaagtgaaacagtaaagaagaatgagaaaacaaagtctgatgaagaaactttaaaagcaaagaaaggaataaaggaaatcaaggtaaatagctcccgtaaagaggatgacttcaaacaaaagcaaccaagcaagaaaaagaggatcatctatgattcagattcagagtcagaggagacgttgcaggtaaaaaatgccaaaaagccaccagaaaaactgccagtatcttctaaacctggtaaaatttcacggcaggatcctgttacatacatttcagaaacagatgaagaagatgactttatgtgtaagaaggcggcctctaaatcaaaagagaatggaagatctacaaatagtcatcttggaacatcaaacatgaaaaagaatgaagaaaacactaagaccaagaataagcctttatcaccaataaaacttacacccacatcagtacttgattattttggaactggaagtgtccaaagatctaataagaagatggtggcaagcaaaagaaaagagctttcacaaaatacagatgagtctggattaaatgatgaagccatcgccaagcaattacagcttgatgaagatgcggagctggagaggcagttgcatgaagatgaagagtttgccagaacattagccatgttggatgaagaacccaagaccaaaaaggctcgaaaggacacagaagcgggagaaacgttttcatctgtccaagccaatttaagtaaagcagaaaaacataaatatcctcataaagtaaaaacagcacaagtttcagatgaaagaaagagctacagtcctaggaagcaaagtaaatatgaaagttcaaaagaatctcagcaacattccaagtcatcagctgacaaaataggagaagtctcttctcccaaggccagttctaagctggcaattatgaaaagaaaagaagagagctcttataaagaaatagagcctgtggcctcaaaaagaaaagaaaatgccattaaattgaaaggagagacaaaaactcctaagaaaaccaaaagttctccagctaaaaaagagtctgtaagtcctgaagattctgaaaagaaacgcactaattatcaagcttatcgaagctacttaaatcgagaaggtcccaaggctctgggctccaaagaaataccaaagggagctgaaaattgcttggaaggccttatatttgtaatcacaggcgtgctggagtctattgaacgagatgaggccaagtctctaattgaacgttatgggggaaaagtaacaggaaatgtcagcaagaaaacaaattatcttgtcatgggtcgtgatagtggacagtccaagagtgataaggccgcagccttggggacaaaaattattgatgaagatggcctgttgaatctgattcggactatgccaggcaagaaatccaagtatgaaatagcagttgaaactgagatgaagaaagagtccaaactggagagaacaccccaaaaaaatgtccaaggaaaaagaaaaattagtccatctaaaaaggaatcagaatctaaaaagagcaggccgacttccaaaagggacagtttggcaaagacaataaaaaaggaaacagatgtgttttggaaaagcctggatttcaaggagcaggtggctgaggagacaagtggtgacagcaaggctaggaatttggctgatgacagcagtgaaaacaaagtggaaaatttgctctgggtggataaatataagccaacctcgctcaagaccataattggacagcaaggtgaccagagctgtgccaacaaactcctacgctggctccgaaactggcaaaagagttcttccgaagataaaaaacacgcagcaaagtttggtaaattttccggcaaagatgatggctctagttttaaagcagcgttgctgtcaggccctcctggtgttggcaaaaccaccacagcttccctggtgtgtcaggagttgggatacagctacgtggaactgaatgcaagtgacacccggagtaagagcagtttgaaggcgattgttgctgagtcactgaacaataccagcatcaaaggcttttattcaaatggagcagcctcttcagtaagcacgaaacatgctctcatcatggatgaagtagatggcatggcaggcaatgaggataggggaggaattcaggaattaattggcctgataaaacatactaaaattcccattatttgtatgtgcaatgatagaaatcatcccaagattcgctctctggttcattattgttttgatcttcgttttcaaagacctcgggttgaacagattaagggtgctatgatgtctattgcatttaaagaaggtttaaagattccccctccagctatgaatgaaataattttgggagccaatcaagatatcagacaggttttacataatctgagtatgtggtgtgcacgaagtaaagcattaacctatgaccaggccaaagctgattctcacagagccaaaaaggatatcaaaatgggcccatttgatgttgcccggaaagtgtttgcagctggagaggagactgctcacatgtcacttgtggacaagtcagatctcttttttcatgattattcaatagcacccctcttcgtccaggaaaattacatacacgtgaagcctgtagcagcagggggtgacatgaaaaagcacctgatgcttttaagcagagcagcagacagcatatgcgatggtgacctagtggacagccagatccggagtaagcaaaactggagtcttctgcctgcgcaggccatttatgccagtgttcttcctggagagttgatgagggggtacatgacccagtttcccaccttcccaagctggctggggaagcactcgtctacaggcaaacatgatcgtattgttcaggacctggccttgcatatgagtctcagaacttactccagcaaaaggactgtaaacatggattatctgtcgcttctaagggatgcacttgtacagcccttgacctcacaaggagtagacggagtacaggatgttgttgcacttatggacacatattatttgatgaaagaagactttgagaatatcatggaaatcagcagctggggtggcaaacctagtcccttttcaaagctggatcccaaggtgaaagcagccttcacaagagcttacaataaggaagcccaccttactccatactcacttcaagctataaaggcatctagacacagcacaagcccatccctggattcggaatacaatgaagaattaaatgaagatgactctcaatctgatgagaaagaccaagatgctatagaaactgatgccatgatcaagaaaaagacaaaatcttcaaagccttcaaaaccagaaaaagataaggagcccagaaaaggaaaaggaaaaagttcgaagaaatgaaaccatttttcactagcgacagccactttttactctccctcctgaccagtccagctggtctagagaaagccttgttttttcccagagcaaccatgttttagcataatgggatgacctggtgtcccattataaataaagggtggtatggctagaagggtatgagcagtaggcttatgtacacctcttatagaggttgataggactgcttgggtcctccactgtcctctgtcaatctagttagacgtgcttctgaatgactgtagaattggaactagaaactacacctgggctttggagtcagattttagttaacaataatgagcctgggagcagtagtactaaggcgtcttttgtaggcttaagaatttatcctaatggcctttataggaccaatgctgattttttttaaaggcagttcctattatgtggtgaaattttgtaaataaatgattatacaaaacagtcaccacctagaactgggtattctttgtacattgtcagatatctttcaaagtataaattaggaataaaaatgttccacatgatatgtgtacaaattctttttaagattgtcatcttgtacagcaaaatattatgttggtatattacttccttattaatttgcaaatgattggattaaaaaagctcactgtattccttactaacctgttgtgtgaaacataacattggcagtcgaggagtcagaactcggattcccagcctcactccctctgtgtgtgttgaccacgtctctgctgtgaataggatttcatgcagtggtctgttatggggctttgcagcgtggggggctgcagaagattctcagacattcttatccttctggagtctcaacccatcaggttcagaccagtaggaaccaggctgggtcaggctcttaatttcactatggtgggggacaaaatgaacactggcttttgttcactttgcccctgagagatctagtcctgtcctgtgatggcttccacaaaccctgttggaagtttgggttattcctataactgtatgtgttgagtggccgtgaggctatggacctagcctggaatttagatgtctagctattttttaatcttgttggtaaatgctcagaggtctgtgctacctctgtgaggtatatactaaaatgaatgtaaaataaggatcgtattccctgctttaaggaactggtagtcttgtttgggtgatgagacaaagttcttgagacatttaaactgtatttaccagtgtgaaaaatgtcatttatggagattaattcattatggaaataaaacattgcctaagcccttg

SEQ ID NO: 175046 - DNA, 561 bp, Homo sapiens
  Payload ID: 14373
  Gene Symbol: RFC1
  Gene Name: replication factor C (activator 1) 1, 145kDa
  ENST ID: ENST00000504554
  CDS Start-End: 1-561
cctgaagattctgaaaagaaacgcactaattatcaagcttatcgaagctacttaaatcgagaaggtcccaaggctctgggctccaaagaaataccaaagggagctgaaaattgcttggaaggccttatatttgtaatcacaggcgtgctggagtctattgaacgagatgaggccaagtctctaattgaacgttatgggggaaaagtaacaggaaatgtcagcaagaaaacaaattatcttgtcatgggtcgtgatagtggacagtccaagagtgataaggccgcagccttggggacaaaaattattgatgaagatggcctgttgaatctgattcggactatgccaggcaagaaatccaagtatgaaatagcagttgaaactgaggagttgggatacagctacgtggaactgaatgcaagtgacacccggagtaagagcagtttgaaggcgattgttgctgagtcactgaacaataccagcatcaaaggcttttattcaaatggagcagcctcttcagtaagcacgaaacatgctctcatcatggatgaagtagatggcatg

SEQ ID NO: 175047 - DNA, 841 bp, Homo sapiens
  Payload ID: 14373
  Gene Symbol: RFC1
  Gene Name: replication factor C (activator 1) 1, 145kDa
  ENST ID: ENST00000512275
  CDS Start-End: 99-491
gggagaagttgttggcgcgaatggatcctgagcctcgataacagattcctcaaccggcccacccgccagccagccagcgccttcatcctggggctgcgatggacattcggaaattctttggagtaataccaagtggaaagaaacttgtaagtgaaacagtaaagaagaatgagaaaacaaagtctgatgaagaaactttaaaagcaaagaaaggaataaaggaaatcaaggtaaatagctcccgtaaagaggatgacttcaaacaaaagcaaccaagcaagaaaaagaggatcatctatgattcagattcagagtcagaggagacgttgcaggtaaaaaatgccaaaaagccaccagaaaaactgccagtatcttctaaacctggtaaaatttcacggcaggatcctgttacatacatttcagaaacagaggagacaataaccggaataatacgggatgctgtacgtgaaagggccagacccagtgcctgacacattgagtagcagtccaaaggaaaaaataaaaagaaaaacaaagtccataggtgaactttgtaggttacgtgaaacatttgttgatgaaactgttcaaaatatcaaagacaaaaaatgaagaagatgactttatgtgtaagaaggcggcctctaaatcaaaagagaatggaagatctacaaatagtcatcttggaacatcaaacatgaaaaagaatgaagaaaacactaagaccaagaataagcctttatcaccaataaaacttacacccacatcagtacttgattattttggaactggaagtgtccaaagatctaataagaagatggtggcaagcaaaagaaaagag

SEQ ID NO: 175048 - DNA, 504 bp, Homo sapiens
  Payload ID: 14373
  Gene Symbol: RFC1
  Gene Name: replication factor C (activator 1) 1, 145kDa
  ENST ID: ENST00000503784
  CDS Start-End: 109-504
tgcacttcgcgggagaagttgttggcgcgaatggatcctgagcctcgataacagattcctcaaccggcccacccgccagccagccagcgccttcatcctggggctgcgatggacattcggaaattctttggagtaataccaagtggaaagaaacttgtaaatagctcccgtaaagaggatgacttcaaacaaaagcaaccaagcaagaaaaagaggatcatctatgattcagattcagagtcagaggagacgttgcaggtaaaaaatgccaaaaagccaccagaaaaactgccagtatcttctaaacctggtaaaatttcacggcaggatcctgttacatacatttcagaaacagatgaagaagatgactttatgtgtaagaaggcggcctctaaatcaaaagagaatggaagatctacaaatagtcatcttggaacatcaaacatgaaaaagaatgaagaaaacactaagaccaagaataagcctttatcaccaataaaactt

SEQ ID NO: 175049 - DNA, 584 bp, Homo sapiens
  Payload ID: 14373
  Gene Symbol: RFC1
  Gene Name: replication factor C (activator 1) 1, 145kDa
  ENST ID: ENST00000514572
  CDS Start-End: 1-304
tatggacacatattatttgatgaaagaagactttgagaatatcatggaaatcagcagctggggtggcaaacctagtcccttttcaaagctggatcccaaggtgaaagcagccttcacaagagcttacaataaggaagcccaccttactccatactcacttcaagctataaaggcatctagacacagcacaagcccatccctggattcggaatacaatgaagaattaaatgaagatgactctcaatctgatgagaaagaccaagatgctatagaaactgatgccatgatcaaggtagtattttaagccacagacaggagaacctcaaaatagatgatctttccttgcctggtgaataatagggccttttcagcacatagcagaataacttgaaaatacttcttaagtttttttgttcatcatggttgagggtggagaaggtagagatttcatttttataaagtttcttatggtagtcgaagagccaaacagcaagaaaacaggccatgatattgacggccatatgttctgttagaaaaagtaccatttttatttatctagccattggtgtatgctttcaagaaaa

SEQ ID NO: 175050 - DNA, 1695 bp, Homo sapiens
  Payload ID: 14374
  Gene Symbol: RFC2
  Gene Name: replication factor C (activator 1) 2, 40kDa
  Uniprot ID: P35250
  ENST ID: ENST00000055077
  CDS Start-End: 62-1126
ggggcttgcgtggcggcgtcaaggggcggtgcctcgggtggcgggaagaggaggcgcgagaatggaggtggaggccgtctgtggtggcgcgggcgaggtggaggcccaggactctgaccctgcccctgccttcagcaaggcccccggcagcgccggccactacgaactgccgtgggttgaaaaatataggccagtaaagctgaatgaaattgtcgggaatgaagacaccgtgagcaggctagaggtctttgcaagggaaggaaatgtgcccaacatcatcattgcgggccctccaggaaccggcaagaccacaagcattctgtgcttggcccgggccctgctgggcccagcactcaaagatgccatgttggaactcaatgcttcaaatgacaggggcattgacgttgtgaggaataaaattaaaatgtttgctcaacaaaaagtcactcttcccaaaggccgacataagatcatcattctggatgaagcagacagcatgaccgacggagcccagcaagccttgaggagaaccatggaaatctactctaaaaccactcgcttcgcccttgcttgtaatgcttcggataagatcatcgagcccattcagtcccgctgtgcagtcctccggtacacaaagctgaccgacgcccagatcctcaccaggctgatgaatgttatcgagaaggagagggtaccctacactgatgacggcctagaagccatcatcttcacggcccagggagacatgaggcaggcgctgaacaacctgcagtccaccttctcaggatttggcttcattaacagtgagaacgtgttcaaggtctgtgacgagccccacccactgctggtaaaggagatgatccagcactgtgtgaatgccaacattgacgaagcctacaagattcttgctcacttgtggcatctgggctactcaccagaagatatcattggcaacatctttcgagtgtgtaaaactttccaaatggcagaatacctgaaactggagtttatcaaggaaattggatacactcacatgaaaatagcggaaggagtgaactctcttttgcagatggcaggcctcctggcaaggctgtgtcagaagacaatggccccggtggccagttagagcagagacttcactgactgacttacaggtgccctattctgaggtacaggagccgcggctttctgatgggggaaaatgccgccttaggctggagccaacatgactgtcctttaaactccagtggctggccaggcacggtagctcacgcctgtaatcccaacactttgggaggccgaggcaggtggatcacctgaggtcagaagttcaagaccagcctggccaacatggggaaaccctgtctttactaaaaatataaaaattagctgggtgtggtggcgggcacctgtaatcccagctactcgggaggctgtggcaggagaatcgcttgaacccaggaggtggaggttgcagtgagccaagatcacaccattgcactccagcctgggcgacagagtctccatctggggaaaaaaattaaataaataaactcccgtgacttgcatgtttgcttctgggacgtctgtgccccgcaagtgtttgagtttggcctccaccccattgatgcggtgacggggcggaaaggcgcagagaagctgagggcggtctctgatctgtgtgtgggttgacat

SEQ ID NO: 175051 - DNA, 1576 bp, Homo sapiens
  Payload ID: 14374
  Gene Symbol: RFC2
  Gene Name: replication factor C (activator 1) 2, 40kDa
  Uniprot ID: P35250
  ENST ID: ENST00000352131
  CDS Start-End: 7-969
gcgagaatggaggtggaggccgtctgtggtggcgcgggcgaggtggaggcccaggactctgaccctgcccctgccttcagcaaggcccccggcagcgccggccactacgaactgccgtgggttgaaaaatataggccagtaaagctgaatgaaattgtcgggaatgaagacaccgtgagcaggctagaggtctttgcaagggaaggaaatgtgcccaacatcatcattgcgggccctccaggaaccggcaagaccacaagcattctgtgcttggcccgggccctgctgggcccagcactcaaagatgccatgttggaactcaatgcttcaaatgacagcatgaccgacggagcccagcaagccttgaggagaaccatggaaatctactctaaaaccactcgcttcgcccttgcttgtaatgcttcggataagatcatcgagcccattcagtcccgctgtgcagtcctccggtacacaaagctgaccgacgcccagatcctcaccaggctgatgaatgttatcgagaaggagagggtaccctacactgatgacggcctagaagccatcatcttcacggcccagggagacatgaggcaggcgctgaacaacctgcagtccaccttctcaggatttggcttcattaacagtgagaacgtgttcaaggtctgtgacgagccccacccactgctggtaaaggagatgatccagcactgtgtgaatgccaacattgacgaagcctacaagattcttgctcacttgtggcatctgggctactcaccagaagatatcattggcaacatctttcgagtgtgtaaaactttccaaatggcagaatacctgaaactggagtttatcaaggaaattggatacactcacatgaaaatagcggaaggagtgaactctcttttgcagatggcaggcctcctggcaaggctgtgtcagaagacaatggccccggtggccagttagagcagagacttcactgactgacttacaggtgccctattctgaggtacaggagccgcggctttctgatgggggaaaatgccgccttaggctggagccaacatgactgtcctttaaactccagtggctggccaggcacggtagctcacgcctgtaatcccaacactttgggaggccgaggcaggtggatcacctgaggtcagaagttcaagaccagcctggccaacatggggaaaccctgtctttactaaaaatataaaaattagctgggtgtggtggcgggcacctgtaatcccagctactcgggaggctgtggcaggagaatcgcttgaacccaggaggtggaggttgcagtgagccaagatcacaccattgcactccagcctgggcgacagagtctccatctggggaaaaaaattaaataaataaactcccgtgacttgcatgtttgcttctgggacgtctgtgccccgcaagtgtttgagtttggcctccaccccattgatgcggtgacggggcggaaaggcgcagagaagctgagggcggtctctgatctgtgtgtgggttgacattttagctaataaagccttgcagtgtttgttggcaataa

SEQ ID NO: 175052 - DNA, 871 bp, Homo sapiens
  Payload ID: 14374
  Gene Symbol: RFC2
  Gene Name: replication factor C (activator 1) 2, 40kDa
  ENST ID: ENST00000480432
  CDS Start-End: 25-258
gtggcgggaagaggaggcgcgagaatggaggtggaggccgtctgtggtggcgcgggcgaggtggaggcccaggactctgaccctgcccctgccttcagcaaggcccccggcagcgccggccactacgaactgccgtgggttgaaaaatataggccagtaaagctgaatgaaattgtcgggaatgaagacaccgtgagcaggctagaggtctttgcaagggaaggaaatgtgcccaacatcatcattgcggggcattgacgttgtgaggaataaaattaaaatgtttgctcaacaaaaagtcactcttcccaaaggccgacataagatcatcattctggatgaagcagacagcatgaccgacggagcccagcaagccttgaggagaaccatggaaatctactctaaaaccactcgcttcgcccttgcttgtaatgcttcggataagatcatcgagcccattcagtcccgctgtgcagtcctccggtacacaaagctgaccgacgcccagatcctcaccaggctgatgaatgttatcgagaaggagagggtaccctacactgatgacggcctagaagccatcatcttcacggcccagggagacatgaggcaggcgctgaacaacctgcagtccaccttctcaggatttggcttcattaacagtgagaacgtgttcaaggtctgtgacgagccccacccactgctggtaaaggagatgatccagcactgtgtgaatgccaacattgacgaagcctacaagattcttgctcacttgtggcatctgggctactcaccagaagatatcattggcaacatctttcgagtgtgtaaaactttccaaatggcagaatacctgaaactggagtttatcaag

SEQ ID NO: 175053 - DNA, 847 bp, Homo sapiens
  Payload ID: 14374
  Gene Symbol: RFC2
  Gene Name: replication factor C (activator 1) 2, 40kDa
  ENST ID: ENST00000485545
  CDS Start-End: 1-361
ggagagggtaccctacactgatgacggcctagaagccatcatcttcacggcccagggagacatgaggcaggcgctgaacaacctgcagtccaccttctcaggatttggcttcattaacagtgagaacgtgttcaaggtctgtgacgagccccacccactgctggtaaaggagatgatccagcactgtgtgaatgccaacattgacgaagcctacaaggttggcctccttccccccgtcctggcagaggaaccgctcacttcttgggcagaggagagcgggagcccttctgattcttgctcacttgtggcatctgggctactcaccagaagatatcattggcaacatctttcgagtgtgtaaaactttccaaatggcagaatacctgaaactggagtttatcaaggaaattggatacactcacatgaaaatagcggaaggagtgaactctcttttgcagatggcaggcctcctggcaaggctgtgtcagaagacaatggccccggtggccagttagagcagagacttcactgactgacttacaggtgccctattctgaggtacaggagccgcggctttctgatgggggaaaatgccgccttaggctggagccaacatgactgtcctttaaactccagtggctggccaggcacggtagctcacgcctgtaatcccaacactttgggaggccgaggcaggtggatcacctgaggtcagaagttcaagaccagcctggccaacatggggaaaccctgtctttactaaaaatataaaaattagctgggtgtggtggcgggcacctgtaatcccagctactcgggaggctgtggcaggagaatcgcttgaacc

SEQ ID NO: 175054 - DNA, 730 bp, Homo sapiens
  Payload ID: 14374
  Gene Symbol: RFC2
  Gene Name: replication factor C (activator 1) 2, 40kDa
  ENST ID: ENST00000494019
  CDS Start-End: 1-263
tctgtggtggcgcgggcgaggtggaggcccaggactctgaccctgcccctgccttcagcaaggcccccggcagcgccggccactacgaactgccgtgggttgaaaaatataggccagtaaagctgaatgaaattgtcgggaatgaagacaccgtgagcaggctagaggtctttgcaagggaaggaaatgtgcccaacatcatcattgcgcatgaccgacggagcccagcaagccttgaggagaaccatggaaatctactctaaaaccactcgcttcgcccttgcttgtaatgcttcggataagatcatcgagcccattcagtcccgctgtgcagtcctccggtacacaaagctgaccgacgcccagatcctcaccaggctgatgaatgttatcgagaaggagagggtaccctacactgatgacggcctagaagccatcatcttcacggcccagggagacatgaggcaggcgctgaacaacctgcagtccaccttctcaggatttggcttcattaacagtgagaacgtgttcaaggtctgtgacgagccccacccactgctggtaaaggagatgatccagcactgtgtgaatgccaacattgacgaagcctacaagattcttgctcacttgtggcatctgggctactcaccagaagatatcattggcaacatctttcgagtgtgtaaaactttccaaatggcagaatacctgaaactggagtttatcaagg

SEQ ID NO: 175055 - DNA, 853 bp, Homo sapiens
  Payload ID: 14374
  Gene Symbol: RFC2
  Gene Name: replication factor C (activator 1) 2, 40kDa
  ENST ID: ENST00000463194
  CDS Start-End: 1-306
gcgagaatggaggtggaggccgtctgtggtggcgcgggcgaggtggaggcccaggactctgaccctgcccctgccttcagcaaggcccccggcagcgccggccactacgaactgccgtgggttgaaaaatataggccagtaaagctgaatgaaattgtcgggaatgaagacaccgtgagcaggctagaggtctttgcaagggaaggaaatgtgcccaacatcatcattgcggggtcagaggtgacggagatgcaaacagcagtgaacataactcaagagctacctgaggtccttctggtggtttgaagtctttactggagatctcattcccagggccctccaggaaccggcaagaccacaagcattctgtgcttggcccgggccctgctgggcccagcactcaaagatgccatgttggaactcaatgcttcaaatgacaggggcattgacgttgtgaggaataaaattaaaatgtttgctcaacaaaaagtcactcttcccaaaggccgacataagatcatcattctggatgaagcagacagcatgaccgacggagcccagcaagccttgaggagaaccatggaaatctactctaaaaccactcgcttcgcccttgcttgtaatgcttcggataagatcatcgagcccattcagtcccgctgtgcagtcctccggtacacaaagctgaccgacgcccagatcctcaccaggctgatgaatgttatcgagaaggagagggtaccctacactgatgacggcctagaagccatcatcttcacggcccagggagacatgaggcaggcgctgaacaacctgcagtccaccttctcaggatttggcttcattaacagtg

SEQ ID NO: 175056 - DNA, 957 bp, Homo sapiens
  Payload ID: 14374
  Gene Symbol: RFC2
  Gene Name: replication factor C (activator 1) 2, 40kDa
  ENST ID: ENST00000479105
  CDS Start-End: 1-158
aggactctgaccctgcccctgccttcagcaaggcccccggcagcgccggccactacgaactgccgtgggttgaaaaatataggccagtaaagctgaatgaaattgtcgggaatgaagacaccgtgagcaggctagagtcatccagaagcaagttttaaccggttttaatgatcattttcgccgtaggtctttgcaagggaaggaaatgtgcccaacatcatcattgcggggtcagaggtgacggagatgcaaacagcagtgaacataactcaagagctacctgaggtccttctggtggtttgaagtctttactggagatctcattcccagggccctccaggaaccggcaagaccacaagcattctgtgcttggcccgggccctgctgggcccagcactcaaagatgccatgttggaactcaatgcttcaaatgacaggggcattgacgttgtgaggaataaaattaaaatgtttgctcaacaaaaagtcactcttcccaaaggccgacataagatcatcattctggatgaagcagacagcatgaccgacggagcccagcaagccttgaggagaaccatggaaatctactctaaaaccactcgcttcgcccttgcttgtaatgcttcggataagatcatcgagcccattcagtcccgctgtgcagtcctccggtacacaaagctgaccgacgcccagatcctcaccaggctgatgaatgttatcgagaaggagagggtaccctacactgatgacggcctagaagccatcatcttcacggcccagggagacatgaggcaggcgctgaacaacctgcagtccaccttctcaggatttggcttcattaacagtgagaacgtgttcaaggtctgtgacgagccccacccactgctggtaaaggagatgatccagcactgtgtgaatgccaacattgacgaagcctacaaggttggcctcctt

SEQ ID NO: 175057 - DNA, 753 bp, Homo sapiens
  Payload ID: 14374
  Gene Symbol: RFC2
  Gene Name: replication factor C (activator 1) 2, 40kDa
  ENST ID: ENST00000497430
  CDS Start-End: 1-595
catgaccgacggagcccagcaagccttgaggagaaccatggaaatctactctaaaaccactcgcttcgcccttgcttgtaatgcttcggataagatcatcgagcccattcagtcccgctgtgcagtcctccggtacacaaagctgaccgacgcccagatcctcaccaggctgatgaatgttatcgagaaggagagggtaccctacactgatgacggcctagaagccatcatcttcacggcccagggagacatgaggcaggcgctgaacaacctgcagtccaccttctcaggatttggcttcattaacagtgagaacgtgttcaaggtctgtgacgagccccacccactgctggtaaaggagatgatccagcactgtgtgaatgccaacattgacgaagcctacaagattcttgctcacttgtggcatctgggctactcaccagaagatatcattggcaacatctttcgagtgtgtaaaactttccaaatggcagaatacctgaaactggagtttatcaaggaactgccaaacggttttccgaagtggctgcagcacgtgcattcccaccagcattccggaggatcctcaacctagccaccacatggagtgctcagtttggtttttaagccattctaataggaaattggatacactcacatgaaaatagcggaaggagtgaactctcttttgcagatggcaggcctcctggcaaggctgtgtcagaagacaatggccccggtggccagttagag

SEQ ID NO: 175058 - DNA, 881 bp, Homo sapiens
  Payload ID: 14374
  Gene Symbol: RFC2
  Gene Name: replication factor C (activator 1) 2, 40kDa
  ENST ID: ENST00000470266
  CDS Start-End: 1-226
caaggcccccggcagcgccggccactacgaactgccgtgggttgaaaaatataggccagtaaagctgaatgaaattgtcgggaatgaagacaccgtgagcaggctagaggtctttgcaagggaaggaaatgtgcccaacatcatcattgcggggtcagaggtgacggagatgcaaacagcagtgaacataactcaagagctacctgaggtccttctggtggtttgaagtctttactggagatctcattcccagggccctccaggaaccggcaagaccacaagcattctgtgcttggcccgggccctgctgggcccagcactcaaagatgccatgttggaactcaatgcttcaaatgacagcatgaccgacggagcccagcaagccttgaggagaaccatggaaatctactctaaaaccactcgcttcgcccttgcttgtaatgcttcggataagatcatcgagcccattcagtcccgctgtgcagtcctccggtacacaaagctgaccgacgcccagatcctcaccaggctgatgaatgttatcgagaaggagagggtaccctacactgatgacggcctagaagccatcatcttcacggcccagggagacatgaggcaggcgctgaacaacctgcagtccaccttctcaggatttggcttcattaacagtgagaacgtgttcaaggtctgtgacgagccccacccactgctggtaaaggagatgatccagcactgtgtgaatgccaacattgacgaagcctacaagattcttgctcacttgtggcatctgggctactcaccagaagatatcattggcaacatctttcgagtgtgtaaaactttccaaatggcagaatacctgaaactggagtttatcaagg

SEQ ID NO: 175059 - DNA, 782 bp, Homo sapiens
  Payload ID: 14374
  Gene Symbol: RFC2
  Gene Name: replication factor C (activator 1) 2, 40kDa
  ENST ID: ENST00000493156
  CDS Start-End: 7-120
gcgagaatggaggtggaggccgtctgtggtggcgcgggcgaggtggaggcccaggactctgaccctgcccctgccttcagcaaggcccccggcagcgccggccactacgaactgccgtgatggagtcacactttgtcacacaggctggagtgcagtggtgtgatttctgctcactacaacctgcatctccctggttcaatcaattctgcctcagccttcctagtagctgggattacagggttgaaaaatataggccagtaaagctgaatgaaattgtcgggaatgaagacaccgtgagcaggctagaggtctttgcaagggaaggaaatgtgcccaacatcatcattgcgggccctccaggaaccggcaagaccacaagcattctgtgcttggcccgggccctgctgggcccagcactcaaagatgccatgttggaactcaatgcttcaaatgacagcatgaccgacggagcccagcaagccttgaggagaaccatggaaatctactctaaaaccactcgcttcgcccttgcttgtaatgcttcggataagatcatcgagcccattcagtcccgctgtgcagtcctccggtacacaaagctgaccgacgcccagatcctcaccaggctgatgaatgttatcgagaaggagagggtaccctacactgatgacggcctagaagccatcatcttcacggcccagggagacatgaggcaggcgctgaacaacctgcagtccaccttctcaggatttggcttcattaacagtgagaacgtgttcaag

SEQ ID NO: 175060 - DNA, 726 bp, Homo sapiens
  Payload ID: 14374
  Gene Symbol: RFC2
  Gene Name: replication factor C (activator 1) 2, 40kDa
  ENST ID: ENST00000491206
  CDS Start-End: 1-87
gaaaaatataggccagtaaagctgaatgaaattgtcgggaatgaagacaccgtgagcaggctagagtcatccagaagcaagttttaaccggttttaatgatcattttcgccgtaggtctttgcaagggaaggaaatgtgcccaacatcatcattgcgggccctccaggaaccggcaagaccacaagcattctgtgcttggcccgggccctgctgggcccagcactcaaagatgccatgttggaactcaatgcttcaaatgacaggggcattgacgttgtgaggaataaaattaaaatgtttgctcaacaaaaagtcactcttcccaaaggccgacataagatcatcattctggatgaagcagacagcatgaccgacggagcccagcaagccttgaggagaaccatggaaatctactctaaaaccactcgcttcgcccttgcttgtaatgcttcggataagatcatcgagcccattcagtcccgctgtgcagtcctccggtacacaaagctgaccgacgcccagatcctcaccaggctgatgaatgttatcgagaaggagagggtaccctacactgatgacggcctagaagccatcatcttcacggcccagggagacatgaggcaggcgctgaacaacctgcagtccaccttctcaggatttggcttcattaacagtgagaacgtgttcaaggtctgtgacgagccccacccactgctggtaaagga

SEQ ID NO: 175061 - DNA, 1635 bp, Homo sapiens
  Payload ID: 14374
  Gene Symbol: RFC2
  Gene Name: replication factor C (activator 1) 2, 40kDa
  ENST ID: ENST00000621097
  CDS Start-End: 278-1033
ggaagccagggggcggggcttgcgtggcggcgtcaaggggcggtgcctcgggtggcgggaagaggaggcgcgagaatggaggtggaggccgtctgtggtggcgcgggcgaggtggaggcccaggactctgaccctgcccctgccttcagcaaggcccccggcagcgccggccactacgaactgccgtgggttgaaaaatataggccagtaaagctgaatgaaattgtcgggaatgaagacaccgtgagcaggctagaggtctttgcaagggaaggaaatgtgcccaacatcatcattgcggggcattgacgttgtgaggaataaaattaaaatgtttgctcaacaaaaagtcactcttcccaaaggccgacataagatcatcattctggatgaagcagacagcatgaccgacggagcccagcaagccttgaggagaaccatggaaatctactctaaaaccactcgcttcgcccttgcttgtaatgcttcggataagatcatcgagcccattcagtcccgctgtgcagtcctccggtacacaaagctgaccgacgcccagatcctcaccaggctgatgaatgttatcgagaaggagagggtaccctacactgatgacggcctagaagccatcatcttcacggcccagggagacatgaggcaggcgctgaacaacctgcagtccaccttctcaggatttggcttcattaacagtgagaacgtgttcaaggtctgtgacgagccccacccactgctggtaaaggagatgatccagcactgtgtgaatgccaacattgacgaagcctacaagattcttgctcacttgtggcatctgggctactcaccagaagatatcattggcaacatctttcgagtgtgtaaaactttccaaatggcagaatacctgaaactggagtttatcaaggaaattggatacactcacatgaaaatagcggaaggagtgaactctcttttgcagatggcaggcctcctggcaaggctgtgtcagaagacaatggccccggtggccagttagagcagagacttcactgactgacttacaggtgccctattctgaggtacaggagccgcggctttctgatgggggaaaatgccgccttaggctggagccaacatgactgtcctttaaactccagtggctggccaggcacggtagctcacgcctgtaatcccaacactttgggaggccgaggcaggtggatcacctgaggtcagaagttcaagaccagcctggccaacatggggaaaccctgtctttactaaaaatataaaaattagctgggtgtggtggcgggcacctgtaatcccagctactcgggaggctgtggcaggagaatcgcttgaacccaggaggtggaggttgcagtgagccaagatcacaccattgcactccagcctgggcgacagagtctccatctggggaaaaaaattaaataaataaactcccgtgacttgcatgtttgcttctgggacgtctgtgccccgcaagtgtttgagtttggcctccaccccattgatgcggtgacggggcggaaaggcgcagagaagctgagggcggtctctgatctgtgtgtgggttgacattttagctaataaagccttgcagtgtttgttggc

SEQ ID NO: 175062 - DNA, 2402 bp, Homo sapiens
  Payload ID: 14375
  Gene Symbol: RFC3
  Gene Name: replication factor C (activator 1) 3, 38kDa
  Uniprot ID: P40938
  ENST ID: ENST00000380071
  CDS Start-End: 131-1201
tttacgcggccgcgaccggtagtgacgtcacgagatttggagctcgcgggaaaacttgtctctgcgttgtggggaggacgcgcgctcgcgcgggattttcaagcgtaggcccccgggaactcgagctgccatgagcctctgggtggacaagtatcggccctgctccttgggacggctggactatcacaaggagcaggcggcccagctgcggaacctggtgcagtgtggtgactttcctcatctgttagtgtacggaccatcaggtgctggaaaaaagacaagaattatgtgtattctacgtgaactttatggtgttggagtggaaaaattgagaattgaacatcagaccatcacaactccatctaaaaaaaaaattgaaattagcaccattgcaagtaactaccaccttgaagttaatcctagtgatgctggaaatagtgaccgagtagtcattcaggagatgttgaaaacagtggcacaatcacaacaacttgaaacaaactctcaaagggattttaaagtggtattattgacagaagttgacaaactcaccaaagatgctcagcatgccttgcgaagaaccatggaaaaatatatgtctacctgcagattgatcttgtgctgcaattctacatctaaagtgatcccacctattcgtagtaggtgcttggcggttcgtgtgcctgctcccagcattgaagatatttgccacgtgttatctactgtgtgtaagaaggaaggtctgaatcttccttcacaactggctcatagacttgcagagaagtcttgtagaaatctcagaaaagccctgcttatgtgtgaagcctgcagagtgcaacaatatccttttactgcagatcaagaaatccctgagacagattgggaggtgtatctgagggagactgcaaatgctattgtcagtcagcaaactccacaaaggctccttgaagttcgtggaaggctgtatgagcttctaactcattgtattcctcctgagataataatgaagggccttctctcagaactgttacataattgtgatggacaactgaaaggggaggtggcacaaatggcagcttactatgagcatcgtctacagctgggtagcaaagccatttatcacttggaagcgtttgtggccaaattcatggcactttataagaagttcatggaggatggattggaaggcatgatgttctgacttctgtcagttattcttgcaaagatttctcagtatcagtatttacatacagcttatattaaaagagctgtgggtaaattaactgaacttaatcatgtcgtatttgcgtttttttggtaataacttctctgtgaactattaatcatcctctgagttaaataattgctcctatactattgaagtatgtagttttgtacataacttagagactttagagtctaagaaaatgatcttaatttactttaagcattggttattcaagtattcattgttgatcctcctattctcttccgtctaatctctcacctgctaaaggagatttacacattagaaagcaaagattattttcatttatccagatgaccattttctgccacaggtaacatgattgtttgacacaccattatatttaattctagtttctctcaatgaataattgtatttttgtaggaaatgtaagatttcattctgaaacataattattggtatggacaaaattgcagataccatttctgttgaggctgcagatttccaacttttatttcagtggttcagattagtattaggtcggtactaagaaataagcatgttttcactaatttaagtacttgagactcttgaagaaaattcagaatgaagttctggagaaaggtatgttactgtagtaattactctttgaacaggttttgtgttttgtcattagctctgccctttttaattaaatattttggttcatggaccaaagggtttacttgacaaatttgtgtgacagactccgaacaattcctttactacgaagtataatttataaaataaaatatacccattttaagggtacagtttgatttttgaccagtgaaactatgatcccaatcaaggtatagatgccgtcaccccaaaaagttccctccatatccctttgcagtcagttcatccctaccctggcccagatgatcactgatcttgtcattatagatgagttttgccagttcaagaatttaatggaatcagatattgtaagcattcttgtgtaatacttcattctctctcattattgagattcatccatattgttgaatgtttcactagttaatgtttattgttcaatatttttgtatatacttttaaagcctattcacttgctgatggatctttggtttgtttccaggtttggttattatgaataaagttgctgtgaata

SEQ ID NO: 175063 - DNA, 1461 bp, Homo sapiens
  Payload ID: 14375
  Gene Symbol: RFC3
  Gene Name: replication factor C (activator 1) 3, 38kDa
  Uniprot ID: P40938
  ENST ID: ENST00000434425
  CDS Start-End: 111-1028
agtgacgtcacgagatttggagctcgcgggaaaacttgtctctgcgttgtggggaggacgcgcgctcgcgcgggattttcaagcgtaggcccccgggaactcgagctgccatgagcctctgggtggacaagtatcggccctgctccttgggacggctggactatcacaaggagcaggcggcccagctgcggaacctggtgcagtgtggtgactttcctcatctgttagtgtacggaccatcaggtgctggaaaaaagacaagaattatgtgtattctacgtgaactttatggtgttggagtggaaaaattgagaattgaacatcagaccatcacaactccatctaaaaaaaaaattgaaattagcaccattgcaagtaactaccaccttgaagttaatcctagtgatgctggaaatagtgaccgagtagtcattcaggagatgttgaaaacagtggcacaatcacaacaacttgaaacaaactctcaaagggattttaaagtggtattattgacagaagttgacaaactcaccaaagatgctcagcatgccttgcgaagaaccatggaaaaatatatgtctacctgcagattgatcttgtgctgcaattctacatctaaagtgatcccacctattcgtagtaggtgcttggcggttcgtgtgcctgctcccagcattgaagatatttgccacgtgttatctactgtgtgtaagaaggaaggtctgaatcttccttcacaactggctcatagacttgcagagaagtcttgtagaaatctcagaaaagccctgcttatgtgtgaagcctgcagagtgcaacaatatccttttactgcagatcaagaaatccctgagacagattgggaggtgtatctgagggagactgcaaatgctattgtcagtcagcaaactccacaaaggctccttgaagttcgtggaaggctgtatgagcttctaactcattgtattcctcctgagataataatgaaggcatgtaaggaggaatcaagaagctgtgacatattctgaggacctccaaagaacaacttgctactgactggacttctctcatcttttagcatgtgaagttttgcaaatataatccactttgctctgaatgtcctgacacctgcttcagagctcaagattcagactccagcctgaatgttatttcctgagaaaatccctccctgacccactgtgctggttaggtccacctgctaatcacatccacaaaaccctctgcttctccttcaaaacactcatctcctctgtaatgatcagatgaactcatgtctttctcagaggacaataaatttgatgaatggggaccatggaagtttatttccatctgtatccctacatctaactcatctgctggtacctatttgtcatgtatttaataagtacaactacctatgccaccctgcaataaaatgatattgttactttctcttcttta

SEQ ID NO: 175064 - DNA, 612 bp, Homo sapiens
  Payload ID: 14375
  Gene Symbol: RFC3
  Gene Name: replication factor C (activator 1) 3, 38kDa
  ENST ID: ENST00000616236
  CDS Start-End: 1-312
gaaggtctgaatcttccttcacaactggctcatagacttgcagagaagtcttgtagaaatctcagaaaagccctgcttatgtgtgaagcctgcagagtgcaacaatatccttttactgcagatcaagaaatccctgagacagattgggaggtgtatctgagggagactgcaaatgctattgtcagtcagcaaactccacaaaggctccttgaagttcgtggaaggctgtatgagcttctaactcattgtattcctcctgagataataatgaaggcatgtaaggaggaatcaagaagctgtgacatattctgaggacctccaaagaacaacttgctactgactggacttctctcatcttttagcatgtgaagttttgcaaatataatccactttgctctgaatgtcctgacacctgcttcagagctcaagattcagactccagcctgaatgttatttcctgagaaaatccctccctgacccactgtgctggttaggtccacctgctaatcacatccacaaaaccctctgcttctccttcaaaacactcatctcctctgtaatgatcagatgaactcatgtctttctcagaggacaataaatttgatgaatggg

SEQ ID NO: 175065 - DNA, 1384 bp, Homo sapiens
  Payload ID: 14376
  Gene Symbol: RFC4
  Gene Name: replication factor C (activator 1) 4, 37kDa
  Uniprot ID: P35249
  ENST ID: ENST00000296273
  CDS Start-End: 224-1315
accggcgtattcccgccctgcttttcgcccgccgttccgtggcgggaactgaggcgactgtggggacatcagtgatcgtaagtctcctgggcccgttattctcagattaggtgacggagctaagacttcgagaccatctcgtcctttttgtatcgcggaaacctgaggaacgagccggcggcggtgacctgcacgagaagccaggctaactgggtgaagtaccatgcaagcatttcttaaaggtacatccatcagtactaaacccccgctgaccaaggatcgaggagtagctgccagtgcgggaagtagcggagagaacaagaaagccaaacccgttccctgggtggaaaaatatcgcccaaaatgtgtggatgaagttgctttccaggaagaagtggttgcagtgctgaaaaaatctttagaaggagcagatcttcctaatctcttgttttacggaccacctggaactggaaaaacatccactattttggcagcagctagagaactctttgggcctgaacttttccgattaagagttcttgagttaaatgcatctgatgaacgtggaatacaagtagttcgagagaaagtgaaaaattttgctcaattaactgtgtcaggaagtcgctcagatgggaagccgtgtccgccttttaagattgtgattctggatgaagcagattctatgacctcagctgctcaggcagctttaagacgtaccatggagaaggagtcgaaaaccacccgattctgtcttatctgtaactatgtcagtcgaataattgaacccctgacctctagatgttcaaaattccgcttcaagcctctgtcagataaaattcaacagcagcgattactagacattgccaagaaggaaaatgtcaaaattagtgatgagggaatagcttatcttgttaaagtgtcagaaggagacttaagaaaagccattacatttcttcaaagcgctactcgattaacaggtggaaaggagatcacagagaaagtgattacagacattgccggggtaataccagctgagaaaattgatggagtatttgctgcctgtcagagtggctcttttgacaaactagaagctgtggtcaaggatttaatagatgagggtcatgcagcaactcagctcgtcaatcaactccatgatgtggttgtagaaaataacttatctgataaacagaagtctattatcacagaaaaacttgccgaagttgacaaatgcctagcagatggtgctgatgaacatttgcaactcatcagcctttgtgcaactgtgatgcagcagttatctcagaattgttaacgtgaatatatctggatggggggttttgtaaataatgaagttgtaataaaaataaaatgaccaaaagca

SEQ ID NO: 175066 - DNA, 1448 bp, Homo sapiens
  Payload ID: 14376
  Gene Symbol: RFC4
  Gene Name: replication factor C (activator 1) 4, 37kDa
  Uniprot ID: P35249
  ENST ID: ENST00000392481
  CDS Start-End: 283-1374
cgcgctcacgtctgaagtgggagcaatgcaccgggacagggacacctcctaggccatgcctgttccagtccagttctgcctgaaagtccggctggctcatcacctgcctaaataaaaccgtatacgggcaaactccctccgcaagcagcgcgccccagcaccggaagtgacgcgttacgtgcccgcgtattcctaccggcgtattcccgccctgcttttcgcccgccgttccgtggcgggaactgaggcgactgtggggacatcagtgatcggtgaagtaccatgcaagcatttcttaaaggtacatccatcagtactaaacccccgctgaccaaggatcgaggagtagctgccagtgcgggaagtagcggagagaacaagaaagccaaacccgttccctgggtggaaaaatatcgcccaaaatgtgtggatgaagttgctttccaggaagaagtggttgcagtgctgaaaaaatctttagaaggagcagatcttcctaatctcttgttttacggaccacctggaactggaaaaacatccactattttggcagcagctagagaactctttgggcctgaacttttccgattaagagttcttgagttaaatgcatctgatgaacgtggaatacaagtagttcgagagaaagtgaaaaattttgctcaattaactgtgtcaggaagtcgctcagatgggaagccgtgtccgccttttaagattgtgattctggatgaagcagattctatgacctcagctgctcaggcagctttaagacgtaccatggagaaggagtcgaaaaccacccgattctgtcttatctgtaactatgtcagtcgaataattgaacccctgacctctagatgttcaaaattccgcttcaagcctctgtcagataaaattcaacagcagcgattactagacattgccaagaaggaaaatgtcaaaattagtgatgagggaatagcttatcttgttaaagtgtcagaaggagacttaagaaaagccattacatttcttcaaagcgctactcgattaacaggtggaaaggagatcacagagaaagtgattacagacattgccggggtaataccagctgagaaaattgatggagtatttgctgcctgtcagagtggctcttttgacaaactagaagctgtggtcaaggatttaatagatgagggtcatgcagcaactcagctcgtcaatcaactccatgatgtggttgtagaaaataacttatctgataaacagaagtctattatcacagaaaaacttgccgaagttgacaaatgcctagcagatggtgctgatgaacatttgcaactcatcagcctttgtgcaactgtgatgcagcagttatctcagaattgttaacgtgaatatatctggatggggggttttgtaaataatgaagttgtaataaaaataaaatgaccaaaagcaccttt

SEQ ID NO: 175067 - DNA, 799 bp, Homo sapiens
  Payload ID: 14376
  Gene Symbol: RFC4
  Gene Name: replication factor C (activator 1) 4, 37kDa
  ENST ID: ENST00000449502
  CDS Start-End: 181-474
gggaactgaggcgactgtggggacatcagtgatcgtaagtctcctgggcccgttattctcagattaggtgacggagctaagacttcgagaccatctcgtcctttttgtatcgcggaaacctgaggaacgagccggcggcggtgacctgcacgagaagccaggctaactgggtgaagtaccatgcaagcatttcttaaaggtacatccatcagtactaaacccccgctgaccaaggatcgaggagtagctgccagtgcgggaagtagcggagagaacaagaaagccaaacccgttccctgggtggaaaaatatcgcccaaaatgtgtggatgaagttgctttccaggaagaagtggttgcagtgctgaaaaaatctttagaaggagcagatcttcctaatctcttgttttacggaccacctggaactggaaaaacatccactattttggcagcagctagagaactctttggataggcctgaacttttccgattaagagttcttgagttaaatgcatctgatgaacgtggaatacaagtagttcgagagaaagtgaaaaattttgctcaattaactgtgtcaggaagtcgctcagatgggaagccgtgtccgccttttaagattgtgattctggatgaagcagattctatgacctcagctgctcaggcagctttaagacgtaccatggagaaggagtcgaaaaccacccgattctgtcttatctgtaactatgtcagtcgaataattgaacccctgacctctagatgttcaaaattccgcttcaagcctctgtcagataaa

SEQ ID NO: 175068 - DNA, 560 bp, Homo sapiens
  Payload ID: 14376
  Gene Symbol: RFC4
  Gene Name: replication factor C (activator 1) 4, 37kDa
  ENST ID: ENST00000411792
  CDS Start-End: 430-560
agatttctaagtggggctcaggaattataatagatgtccacagctgcatggtcttctctctccacaacacgcagacactattagaagtaaaagccacgtgtcctcaagagggcaaggcaaagcatcttcagatgtctctgcccttaaagcacacgcgttctgctctgcgacgaagcaggacaaggaggacagggacctgcacctccggaggcccgcacctacgaagatagcgggctcgggaccttcggtggaccggcagggttccagaggcccgcgcgccgccgccccgccctcattgctgagcctgccagattaggtgacggagctaagacttcgagaccatctcgtcctttttgtatcgcggaaacctgaggaacgagccggcggcggtgacctgcacgagaagccaggctaactgggtgaagtaccatgcaagcatttcttaaaggtacatccatcagtactaaacccccgctgaccaaggatcgaggagtagctgccagtgcgggaagtagcggagagaacaagaaagccaaacccgttccctgggtggaaaaata

SEQ ID NO: 175069 - DNA, 1111 bp, Homo sapiens
  Payload ID: 14376
  Gene Symbol: RFC4
  Gene Name: replication factor C (activator 1) 4, 37kDa
  ENST ID: ENST00000433496
  CDS Start-End: 12-1022
ggtgaagtaccatgcaagcatttcttaaaggtacatccatcagtactaaacccccgctgaccaaggatcgaggagtagctgccagtgcgggaagtagcggagagaacaagaaagccaaacccgttccctgggtggaaaaatatcgcccaaaatgtgtggatgaagttgctttccaggaagaagtggttgcagtgctgaaaaaatctttagaaggagcagatcttcctaatctcttgttttacggaccacctggaactggaaaaacatccactattttggcagcagctagagaactctttgggcctgaacttttccgattaagagttcttgagttaaatgcatctgatgaacgtggaatacaagtagttcgagagaaagtgaaaaattttgctcaattaactgtgtcaggaagtcgctcagatgggaagccgtgtccgccttttaagattgtgattctggatgaagcagattctatgacctcagctgctcaggcagctttaagacgtaccatggagaaggagtcgaaaaccacccgattctgtcttatctgtaactatgtcagtcgaataattgaacccctgacctctagatgttcaaaattccgcttcaagcctctgtcagataaaattcaacagcagcgattactagacattgccaagaaggaaaatgtcaaaattagtgatgagggaatagcttatcttgttaaagtgtcagaaggagacttaagaaaagccattacatttcttcaaagcgctactcgattaacaggtggaaaggagatcacagagaaagtgattacagacattgccggggatttaatagatgagggtcatgcagcaactcagctcgtcaatcaactccatgatgtggttgtagaaaataacttatctgataaacagaagtctattatcacagaaaaacttgccgaagttgacaaatgcctagcagatggtgctgatgaacatttgcaactcatcagcctttgtgcaactgtgatgcagcagttatctcagaattgttaacgtgaatatatctggatggggggttttgtaaataatgaagttgtaataaaaataaaatgaccaaaagcacctttaaagtgaatatacaa

SEQ ID NO: 175070 - DNA, 479 bp, Homo sapiens
  Payload ID: 14376
  Gene Symbol: RFC4
  Gene Name: replication factor C (activator 1) 4, 37kDa
  ENST ID: ENST00000417876
  CDS Start-End: 1-336
ggaatagcttatcttgttaaagtgtcagaaggagacttaagaaaagccattacatttcttcaaagcgctactcgattaacaggtggaaaggagatcacagagaaagtgattacagacattgccggggtaataccagctgagaaaattgatggagtatttgctgcctgtcagagtggctcttttgacaaactagaagctgtggtcaaggatttaatagatgagggtcatgcagcaactcagctcgtcaatcaactccatgatgtggttgtagaaaataacttatctgataaacagaagtctattatcacagaaaaacttgccttgacaaatgcctagcagatggtgctgatgaacatttgcaactcatcagcctttgtgcaactgtgatgcagcagttatctcagaattgttaacgtgaatatatctggatggggggttttgtaaataatgaagttgtaataaaaataaaatgaccaaaa

SEQ ID NO: 175071 - DNA, 485 bp, Homo sapiens
  Payload ID: 14376
  Gene Symbol: RFC4
  Gene Name: replication factor C (activator 1) 4, 37kDa
  ENST ID: ENST00000427785
  CDS Start-End: 117-485
tttgtatcgcggaaacctgaggaacgagccggcggcggtgacctgcacgagaagccaggctaactgagtcccccaccttcccttccccacagaaagtctctgaagggtgaagtaccatgcaagcatttcttaaaggtacatccatcagtactaaacccccgctgaccaaggatcgaggagtagctgccagtgcgggaagtagcggagagaacaagaaagccaaacccgttccctgggtggaaaaatatcgcccaaaatgtgtggatgaagttgctttccaggaagaagtggttgcagtgctgaaaaaatctttagaaggagcagatcttcctaatctcttgttttacggaccacctggaactggaaaaacatccactattttggcagcagctagagaactctttgggcctgaacttttccgattaagagttcttgagttaaatgcatctgatgaacgtggaatacaagtagttcgagagaaagtg

SEQ ID NO: 175072 - DNA, 701 bp, Homo sapiens
  Payload ID: 14376
  Gene Symbol: RFC4
  Gene Name: replication factor C (activator 1) 4, 37kDa
  ENST ID: ENST00000418288
  CDS Start-End: 59-701
gccgttccgtggcgggaactgaggcgactgtggggacatcagtgatcggtgaagtaccatgcaagcatttcttaaaggtacatccatcagtactaaacccccgctgaccaaggatcgaggagtagctgccagtgcgggaagtagcggagagaacaagaaagccaaacccgttccctgggtggaaaaatatcgcccaaaatgtgtggatgaagttgctttccaggaagaagtggttgcagtgctgaaaaaatctttagaaggagcagatcttcctaatctcttgttttacggaccacctggaactggaaaaacatccactattttggcagcagctagagaactctttgggcctgaacttttccgattaagagttcttgagttaaatgcatctgatgaacgtggaatacaagtagttcgagagaaagtgaaaaattttgctcaattaactgtgtcaggaagtcgctcagatgggaagccgtgtccgccttttaagattgtgattctggatgaagcagattctatgacctcagctgctcaggcagctttaagacgtaccatggagaaggagtcgaaaaccacccgattctgtcttatctgtaactatgtcagtcgaataattgaacccctgacctctagatgttcaaaattccgcttcaagcctctgtcagataaaattcaacagcagcgattactagacattg

SEQ ID NO: 175073 - DNA, 785 bp, Homo sapiens
  Payload ID: 14376
  Gene Symbol: RFC4
  Gene Name: replication factor C (activator 1) 4, 37kDa
  ENST ID: ENST00000447345
  CDS Start-End: 283-785
cgcgctcacgtctgaagtgggagcaatgcaccgggacagggacacctcctaggccatgcctgttccagtccagttctgcctgaaagtccggctggctcatcacctgcctaaataaaaccgtatacgggcaaactccctccgcaagcagcgcgccccagcaccggaagtgacgcgttacgtgcccgcgtattcctaccggcgtattcccgccctgcttttcgcccgccgttccgtggcgggaactgaggcgactgtggggacatcagtgatcggtgaagtaccatgcaagcatttcttaaaggtacatccatcagtactaaacccccgctgaccaaggatcgaggagtagctgccagtgcgggaagtagcggagagaacaagaaagccaaacccgttccctgggtggaaaaatatcgcccaaaatgtgtggatgaagttgctttccaggaagaagtggttgcagtgctgaaaaaatctttagaaggagcagatcttcctaatctcttgttttacggaccacctggaactggaaaaacatccactattttggcagcagctagagaactctttgggcctgaacttttccgattaagagttcttgagttaaatgcatctgatgaacgtggaatacaagtagttcgagagaaagtgaaaaattttgctcaattaactgtgtcaggaagtcgctcagatgggaagccgtgtccgccttttaagattgtgattctggatgaagcagattctatgacctcagctgctcaggcagctttaagacgtaccatgga

SEQ ID NO: 175074 - DNA, 453 bp, Homo sapiens
  Payload ID: 14376
  Gene Symbol: RFC4
  Gene Name: replication factor C (activator 1) 4, 37kDa
  ENST ID: ENST00000448497
  CDS Start-End: 168-453
tcctttattatgtaacatctttgcacaaggctaagtttattttcgggctgtactttctcataatggttccccaccaccacccccgctttcctatggtgctgattcgcaataaaagtttcaataaaagctttttttttctgtcttgcacctgaccagggtgaagtaccatgcaagcatttcttaaaggtacatccatcagtactaaacccccgctgaccaaggatcgaggagtagctgccagtgcgggaagtagcggagagaacaagaaagccaaacccgttccctgggtggaaaaatatcgcccaaaatgtgtggatgaagttgctttccaggaagaagtggttgcagtgctgaaaaaatctttagaaggagcagatcttcctaatctcttgttttacggaccacctggaactggaaaaacatccactattttggcagcagctagagaactct

SEQ ID NO: 175075 - DNA, 2449 bp, Homo sapiens
  Payload ID: 14377
  Gene Symbol: RFC5
  Gene Name: replication factor C (activator 1) 5, 36.5kDa
  Uniprot ID: P40937
  ENST ID: ENST00000392542
  CDS Start-End: 534-1493
gaactgtaagtgccagggtctcagggtcaggtcgcggctggtcactgtgcaggcgcttgggtgacgcgacgatctcagcggatctggtcaccttcgtctccccgccatggagacctcagcactcaagcagcaggagcagcccgcggcgaccaagatcaggaacctgccctgagacagggtctcgctctgtcgcccatgctggagcgcagtggtgtgatcacagctcagtgtaacctcaaacattggggttcaagccattctcctgcctcagcctccgaagaactgggacttttagaggcgagctaccaagcccatcctgtaaccattttaaaatgtacaattcagtggcattaagtacattcagaatgcagtgtactgttgtggagtcttcccgctatctagttccaaaatttcatcaccccaaatggaaatcctttacccattgacagttactccccattctccccttcctctagcccctggcaaccactaatctgctttctatctatggatttgcctattctggacatttcatggttgaaaaataccggccacagaccctgaatgatctcatttctcatcaggacattctgagtaccattcagaagtttatcaatgaagaccgactgccacacttgcttctctacggtcccccagggacaggcaagacatctaccatcctagcctgtgcgaaacagctatataaagacaaagaatttggctccatggtcttggagctgaatgcttcagatgaccgaggaatagacatcattcgaggaccgatcctgagctttgctagcacaaggacaatatttaagaaaggctttaagctagtgatcttggatgaagcagacgccatgactcaggacgcccagaatgccttgagaagagtaattgagaaattcacagaaaataccagattctgcctcatctgtaactatctgtcaaagatcatccctgccttgcagtcccgctgcacgaggtttcggttcggtcccctgactcctgaactcatggttccccgcctggaacatgtcgtggaagaagagaaagttgatataagtgaagatggaatgaaagcactagtcactctttccagtggagacatgcgtagggctctgaacattttgcagagcaccaatatggcctttgggaaggtgacagaggagactgtctacacctgcaccgggcacccgctcaagtcagacattgccaacatcctggactggatgttgaatcaagatttcaccacagcctacagaaatattacagagttgaaaactctgaaggggttggcactgcatgatatcctgacagagatacacttgtttgtgcatagagttgactttccatcttcagttcgaatacatttattgaccaaaatggcagacattgagtacaggctttctgttggcaccaacgagaagatccagctgagctccctcattgctgcatttcaagtcaccagagacctgattgttgcagaggcctagatgctctgagggccattcacaattctcagggctcagcagtgatgggagaacagaggacagttccaggataaactgctgcctggggctgtgggatgaatcagtcaccccgaatcttggaaaaacccccttccaggagaggatgggcaggcatttaaaaagtaccatttttgtggttgtttggagcagggatgtacaaaataattttaatgtattaactcatactgcctgtcttttataggggaaaaaaataaccttttttattttaaagttataaggtttttaccttttagttgcttggatgacagggaattagcctaccccattttggtctggaacagaagactttcaaatttaatatggtccaagtgtcttcctactcaaggtaaacattatctccaaaattacatttatgattctaatatttggcattgtgtctgtatctaatttaaacagatgttaatggacgtctggccgaaactattatacttttataagatgagctgaatcctcttactttaaaaactggtctttttatttaccctctgtggtagaagagtcaccagcaggttccaaattgatgtgtatgataggaaaaaaaccttaattttaaatataatatagagccttaaactatgccactgggtggcagaggctgtataaaacgcacttgttttcatgcaggagcggggcaagtaaggttgagcctgactgtaaacctagaactgcggaaggactgggacttttgtacaaatttcacatttattttacagcaatcatgctgcatttgtgttagtgttctttataataaaaaacaaagcagcctcctggctggctgtgttacaagtgactcttccttagacagctagaaagatgctgactttgtcaaacttgcatttatatgaaaaccttctgtctctaatatcacagaataaactttctttagatgctgttcttta

SEQ ID NO: 175076 - DNA, 559 bp, Homo sapiens
  Payload ID: 14377
  Gene Symbol: RFC5
  Gene Name: replication factor C (activator 1) 5, 36.5kDa
  ENST ID: ENST00000420967
  CDS Start-End: 247-559
agagttgcttttgcgcgcgaactgtaagtgccagggtctcagggtcaggtcgcggctggtcactgtgcaggcgcttgggtgacgcgacgatctcagcggatctggtcaccttcgtctccccgccatggagacctcagcactcaagcagcaggagcagcccgcggcgaccaagatcaggaacctgccctgcccctggcaaccactaatctgctttctatctatggatttgcctattctggacatttcatggttgaaaaataccggccacagaccctgaatgatctcatttctcatcaggacattctgagtaccattcagaagtttatcaatgaagaccgactgccacacttgcttctctacggtcccccagggacaggcaagacatctaccatcctagcctgtgcgaaacagctatataaagacaaagaatttggctccatggtcttggagctgaatgcttcagatgaccgaggaatagacatcattcgaggaccgatcctgagctttgctagcacaaggacaatatttaagaaaggctttaagctagtgatcttggatg

SEQ ID NO: 175077 - DNA, 572 bp, Homo sapiens
  Payload ID: 14377
  Gene Symbol: RFC5
  Gene Name: replication factor C (activator 1) 5, 36.5kDa
  ENST ID: ENST00000449641
  CDS Start-End: 276-572
agctcaaggaggtggcagcatcatgcttctaatgcaaaggtccttagaaggatggttcttaccatgaatggctcgtaccatgatgggttgaaaaataccggccacagaccctgaatgatctcatttctcatcaggacattctgagtaccattcagaagtttatcaatgaagaccgactgccacacttgcttctctacggtcccccagggacaggcaagacatctaccatcctagcctgtgcgaaacagctatataaagacaaagaatttggctccatggtcttggagctgaatgcttcagatgaccgaggaatagacatcattcgaggaccgatcctgagctttgctagcacaaggacaatatttaagaaaggctttaagctagtgatcttggatgaagcagacgccatgactcaggacgcccagaatgccttgagaagagtaattgagaaattcacagaaaataccagattctgcctcatctgtaactatctgtcaaagatcatccctgccttgcagtcccgctgcacgaggtttcggttcggtcccctgactcctgaactcatggttccc

SEQ ID NO: 175078 - DNA, 1655 bp, Homo sapiens
  Payload ID: 14377
  Gene Symbol: RFC5
  Gene Name: replication factor C (activator 1) 5, 36.5kDa
  Uniprot ID: P40937
  ENST ID: ENST00000454402
  CDS Start-End: 119-1141
gcttttgcgcgcgaactgtaagtgccagggtctcagggtcaggtcgcggctggtcactgtgcaggcgcttgggtgacgcgacgatctcagcggatctggtcaccttcgtctccccgccatggagacctcagcactcaagcagcaggagcagcccgcggcgaccaagatcaggaacctgccctgggttgaaaaataccggccacagaccctgaatgatctcatttctcatcaggacattctgagtaccattcagaagtttatcaatgaagaccgactgccacacttgcttctctacggtcccccagggacaggcaagacatctaccatcctagcctgtgcgaaacagctatataaagacaaagaatttggctccatggtcttggagctgaatgcttcagatgaccgaggaatagacatcattcgaggaccgatcctgagctttgctagcacaaggacaatatttaagaaaggctttaagctagtgatcttggatgaagcagacgccatgactcaggacgcccagaatgccttgagaagagtaattgagaaattcacagaaaataccagattctgcctcatctgtaactatctgtcaaagatcatccctgccttgcagtcccgctgcacgaggtttcggttcggtcccctgactcctgaactcatggttccccgcctggaacatgtcgtggaagaagagaaagttgatataagtgaagatggaatgaaagcactagtcactctttccagtggagacatgcgtagggctctgaacattttgcagagcaccaatatggcctttgggaaggtgacagaggagactgtctacacctgcaccgggcacccgctcaagtcagacattgccaacatcctggactggatgttgaatcaagatttcaccacagcctacagaaatattacagagttgaaaactctgaaggggttggcactgcatgatatcctgacagagatacacttgtttgtgcatagagttgactttccatcttcagttcgaatacatttattgaccaaaatggcagacattgagtacaggctttctgttggcaccaacgagaagatccagctgagctccctcattgctgcatttcaagtcaccagagacctgattgttgcagaggcctagatgctctgagggccattcacaattctcagggctcagcagtgatgggagaacagaggacagttccaggataaactgctgcctggggctgtgggatgaatcagtcaccccgaatcttggaaaaacccccttccaggagaggatgggcaggcatttaaaaagtaccatttttgtggttgtttggagcagggatgtacaaaataattttaatgtattaactcatactgcctgtcttttataggggaaaaaaataaccttttttattttaaagttataaggtttttaccttttagttgcttggatgacagggaattagcctaccccattttggtctggaacagaagactttcaaatttaatatggtccaagtgtcttcctactcaaggtaaacattatctccaaaattacatttatgattctaatatttggcattgtgtctgtatctaatttaaacagatgttaatggacgtctggccgaaactattatacttttataagatgagctgaatcctcttac

SEQ ID NO: 175079 - DNA, 574 bp, Homo sapiens
  Payload ID: 14377
  Gene Symbol: RFC5
  Gene Name: replication factor C (activator 1) 5, 36.5kDa
  ENST ID: ENST00000535092
  CDS Start-End: 385-574
aagtgccagggtctcagggtcaggtcgcggctggtcactgtgcaggcgcttgggtgacgcgacgatctcagcggatctggtcaccttcgtctccccgccatggagacctcagcactcaagcagcaggagcagcccgcggcgaccaagatcaggaacctgccctgagacagggtctcgctctgtcgcccatgctggagcgcagtggtgtgatcacagctcagtgtaacctcaaacattggggttcaagccattctcctgcctcagcctccgaagaactgggacttttagaggcgagctaccaagcccatcctgtaaccattttaaaatcccctggcaaccactaatctgctttctatctatggatttgcctattctggacatttcatggttgaaaaataccggccacagaccctgaatgatctcatttctcatcaggacattctgagtaccattcagaagtttatcaatgaagaccgactgccacacttgcttctctacggtcccccagggacaggcaagacatctaccatcctagcctgtgcgaaacagctatataaagacaaagaatttggct

SEQ ID NO: 175080 - DNA, 820 bp, Homo sapiens
  Payload ID: 14377
  Gene Symbol: RFC5
  Gene Name: replication factor C (activator 1) 5, 36.5kDa
  ENST ID: ENST00000537315
  CDS Start-End: 509-820
gcgagagttgcttttgcgcgcgaactgtaagtgccagggtctcagggtcaggtcgcggctggtcactgtgcaggcgcttgggtgacgcgacgatctcagcggatctggtcaccttcgtctccccgccatggagacctcagcactcaagcagcaggagcagcccgcggcgaccaagatcaggaacctgccctgagacagggtctcgctctgtcgcccatgctggagcgcagtggtgtgatcacagctcagtgtaacctcaaacattggggttcaagccattctcctgcctcagcctccgaagaactgggacttttagagggttgaaaaataccggccacagaccctgaatgatctcatttctcatcaggacattctgagtaccattcagaagtttatcaatgaagaccgactgccacacttgcttctctacggtcccccagggacaggcaagacatctaccatcctagcctgtgcgaaacagctatataaagacaaagaatttggctccatggtcttggagctgaatgcttcagatgaccgaggaatagacatcattcgaggaccgatcctgagctttgctagcacaaggacaatatttaagaaaggctttaagctagtgatcttggatgaagcagacgccatgactcaggacgcccagaatgccttgagaagagtaattgagaaattcacagaaaataccagattctgcctcatctgtaactatctgtcaaagatcatccctgccttgcagtcccgctgcacgaggtttcggttcggtcccctgactcctgaactcatggttccccgcctggaacatgtc

SEQ ID NO: 175081 - DNA, 631 bp, Homo sapiens
  Payload ID: 14377
  Gene Symbol: RFC5
  Gene Name: replication factor C (activator 1) 5, 36.5kDa
  ENST ID: ENST00000484086
  CDS Start-End: 214-631
agagttgcttttgcgcgcgaactgtaagtgccagggtctcagggtcaggtcgcggctggtcactgtgcaggcgcttgggtgacgcgacgatctcagcggatctggtcaccttcgtctccccgccatggagacctcagcactcaagcagcaggagcagcccgcggcgaccaagatcaggaacctgccctgagacagggtctcgctctgtcgcccatgctggagcgcagtggtgtgatcacagctcagtgtaacctcaaacattggggttcaagccattctcctgcctcagcctccgaagaactgggacttttagagcccctggcaaccactaatctgctttctatctatggatttgcctattctggacatttcatggttgaaaaataccggccacagaccctgaatgatctcatttctcatcaggacattctgagtaccattcagaagtttatcaatgaagaccgactgccacacttgcttctctacggtcccccagggacaggcaagacatctaccatcctagcctgtgcgaaacagctatataaagacaaagaatttggctccatggtcttggagctgaatgcttcagatgaccgaggaatagacatcattcgaggaccgatcctgagct

SEQ ID NO: 175082 - DNA, 3292 bp, Homo sapiens
  Payload ID: 14378
  Gene Symbol: REPIN1
  Gene Name: replication initiator 1
  Uniprot ID: Q9BWE0
  ENST ID: ENST00000397281
  CDS Start-End: 490-2193
cccggcggggggaggttggggacgggcctggcagttgtgaactcgaacctgccgctgtcgccgcggcggggcggggagcgagagtgggccgcggaggccggccttcgggctccatggacgggcgccgcgtccctgcacagcccgccgcagaggtaaggctggcctctctgcagtcagaggtctgagctctgccatggggataggggtgtctttattactgcagttttctctaacacctgggggctaccggagtgtgggccgaagcaggcgctgcagccgcggaagtatccccaggaacatccccaagaggagctggaaaaagcctcatccccagctctgcagtctccaggggagctcagtgtctgtttgtccagcttctcagagttgctgtgcagctcggatgtggcataggaaacagcagacacagggagagggcagcataaggcactgtagggagcagtggccacattttctgcagaggaagaaccgatgctggaacgtcgttgcaggggccccctggccatgggcctggcccagccccgactcctttctgggccctcccaggagtcaccccagaccctggggaaggagtcccgcgggctgaggcaacaaggcacgtcagtggcccagtctggtgcccaagccccaggcagggcccatcgctgtgcccactgtcgaaggcacttccctggctgggtggctctgtggcttcacacccgccggtgccaggcccggctgcccttgccctgccctgagtgtggccgtcgctttcgccatgcccccttcttagcactgcaccgccaggtccatgctgctgccaccccagacctgggctttgcctgccacctctgtgggcagagcttccgaggctgggtggccctggttctgcatctgcgggcccattcagctgcaaagcggcccatcgcttgtcccaaatgcgagagacgcttctggcgacgaaagcagcttcgagctcatctgcggcggtgccaccctcccgccccggaggcccggcccttcatatgcggcaactgtggccggagctttgcccagtgggaccagctagttgcccacaagcgggtgcacgtagctgaggccctggaggaggccgcagccaaggctctggggccccggcccaggggccgccccgcggtgaccgccccccggcccggtggagatgccgtcgaccgccccttccagtgtgcctgttgtggcaagcgcttccggcacaagcccaacttgatcgctcaccgccgcgtgcacacgggcgagcggccccaccagtgccccgagtgcgggaagcgctttaccaataagccctatctgacttcgcaccggcgcatccacaccggcgagaagccctacccgtgcaaagagtgcggccgccgcttccggcacaaacccaacctgctgtctcacagcaagattcacaagcgatccgaggggtcggcccaggccgcccccggcccggggagcccccagctgccagccggcccccaggagtccgcggccgagcccaccccggcggtacctctgaaaccggcccaggagccgccgccaggggccccgccagagcacccgcaggacccgatcgaagcccccccctccctctacagctgcgacgactgcggcaggagcttccggctggagcgcttcctgcgggcccaccagcggcagcacaccggggagcggcccttcacctgcgccgagtgcgggaagaacttcggcaagaagacgcacctggtggcgcactcgcgcgtgcactccggcgagcggcccttcgcctgcgaggagtgcggccgccgcttctcccagggcagccatctggcggcgcatcggcgcgaccacgcccccgatcggcccttcgtgtgtcccgactgcggcaaggccttccgccacaaaccctacctggcggcgcaccggcgcatccacaccggcgagaagccctacgtctgccccgactgcggcaaagccttcagccagaagtccaacctggtgtcgcaccggcgcatccacacgggcgagcggccctacgcctgtcccgactgcgaccgcagcttcagccagaagtccaacctcatcacccaccgcaagagccacatccgggacggcgccttctgctgtgccatctgtggccagaccttcgacgacgaggagagactcctggcccaccagaagaagcacgatgtctgagacggtgggcggggccgtgttggctgagagagggctggggtccttcgtggtgggagtcgcagtgggctgggggtgcctgcctagtgctggagtaggggacaatgggaatcctagaggggatggaagacgcggggagtgagctgggtgggccctgctagcgagagaggtcaaccccggtggccagggaacccacttccaagcgcagggacgccggcctccagctggtgtgtgctaaggctccgtcctgactgccctgtgccctggaaaagcagcaatagcatccgccccttagagccctctggctagaggagccaccagtggaaaggaagaccctccatcctctggtattaacgccttaatgcccctgtcttttactgtaagttacttaagatcatttttggaagcaggcgtggtagagtcctgtaaatgaatgctctgggctagatacagcttggagaacctgctggccttgttagacagcacttgggcctttgccagcagcaagaggtgaagcgaagccactcttacctctcccttcccctcccacctgccccctgcgtaggcacccagacttggagagacccgtctgctgttaatacttccatcctcttccttcccaaagagcagatcccaaggcatttactccttggtctgtctcgctttatctgtcgcccctcccagcgctgagagcctcccctggctgtcagcagcactgtgtccaggctcttgtctgaacaccgcagcccctccttcgctccttccagagctcagcatgtcacggcaaggactgccgcattggtgatggagggccagctgaggggaagttgctggtgagtttccttttctccatttctagcatatggacacctggcctctgcttgagcacttaggtgacaggaacttccgcacctcctgaggccctggatgattctaattgttagaaattctaattgttagaaatccttccttataatgaatgaattctgctttcctataatttctacctattgggccttgttctgttctctggaactaaacagaacaaccatttacccctccttttcaaactagagaataaagatttggttttagaactggt

SEQ ID NO: 175083 - DNA, 2876 bp, Homo sapiens
  Payload ID: 14378
  Gene Symbol: REPIN1
  Gene Name: replication initiator 1
  Uniprot ID: Q9BWE0
  ENST ID: ENST00000425389
  CDS Start-End: 79-1782
gggaggggagaaacaggggcagagtgagttggtctctggagtgactgtgcttttccaccctcagcagaggaagaaccgatgctggaacgtcgttgcaggggccccctggccatgggcctggcccagccccgactcctttctgggccctcccaggagtcaccccagaccctggggaaggagtcccgcgggctgaggcaacaaggcacgtcagtggcccagtctggtgcccaagccccaggcagggcccatcgctgtgcccactgtcgaaggcacttccctggctgggtggctctgtggcttcacacccgccggtgccaggcccggctgcccttgccctgccctgagtgtggccgtcgctttcgccatgcccccttcttagcactgcaccgccaggtccatgctgctgccaccccagacctgggctttgcctgccacctctgtgggcagagcttccgaggctgggtggccctggttctgcatctgcgggcccattcagctgcaaagcggcccatcgcttgtcccaaatgcgagagacgcttctggcgacgaaagcagcttcgagctcatctgcggcggtgccaccctcccgccccggaggcccggcccttcatatgcggcaactgtggccggagctttgcccagtgggaccagctagttgcccacaagcgggtgcacgtagctgaggccctggaggaggccgcagccaaggctctggggccccggcccaggggccgccccgcggtgaccgccccccggcccggtggagatgccgtcgaccgccccttccagtgtgcctgttgtggcaagcgcttccggcacaagcccaacttgatcgctcaccgccgcgtgcacacgggcgagcggccccaccagtgccccgagtgcgggaagcgctttaccaataagccctatctgacttcgcaccggcgcatccacaccggcgagaagccctacccgtgcaaagagtgcggccgccgcttccggcacaaacccaacctgctgtctcacagcaagattcacaagcgatccgaggggtcggcccaggccgcccccggcccggggagcccccagctgccagccggcccccaggagtccgcggccgagcccaccccggcggtacctctgaaaccggcccaggagccgccgccaggggccccgccagagcacccgcaggacccgatcgaagcccccccctccctctacagctgcgacgactgcggcaggagcttccggctggagcgcttcctgcgggcccaccagcggcagcacaccggggagcggcccttcacctgcgccgagtgcgggaagaacttcggcaagaagacgcacctggtggcgcactcgcgcgtgcactccggcgagcggcccttcgcctgcgaggagtgcggccgccgcttctcccagggcagccatctggcggcgcatcggcgcgaccacgcccccgatcggcccttcgtgtgtcccgactgcggcaaggccttccgccacaaaccctacctggcggcgcaccggcgcatccacaccggcgagaagccctacgtctgccccgactgcggcaaagccttcagccagaagtccaacctggtgtcgcaccggcgcatccacacgggcgagcggccctacgcctgtcccgactgcgaccgcagcttcagccagaagtccaacctcatcacccaccgcaagagccacatccgggacggcgccttctgctgtgccatctgtggccagaccttcgacgacgaggagagactcctggcccaccagaagaagcacgatgtctgagacggtgggcggggccgtgttggctgagagagggctggggtccttcgtggtgggagtcgcagtgggctgggggtgcctgcctagtgctggagtaggggacaatgggaatcctagaggggatggaagacgcggggagtgagctgggtgggccctgctagcgagagaggtcaaccccggtggccagggaacccacttccaagcgcagggacgccggcctccagctggtgtgtgctaaggctccgtcctgactgccctgtgccctggaaaagcagcaatagcatccgccccttagagccctctggctagaggagccaccagtggaaaggaagaccctccatcctctggtattaacgccttaatgcccctgtcttttactgtaagttacttaagatcatttttggaagcaggcgtggtagagtcctgtaaatgaatgctctgggctagatacagcttggagaacctgctggccttgttagacagcacttgggcctttgccagcagcaagaggtgaagcgaagccactcttacctctcccttcccctcccacctgccccctgcgtaggcacccagacttggagagacccgtctgctgttaatacttccatcctcttccttcccaaagagcagatcccaaggcatttactccttggtctgtctcgctttatctgtcgcccctcccagcgctgagagcctcccctggctgtcagcagcactgtgtccaggctcttgtctgaacaccgcagcccctccttcgctccttccagagctcagcatgtcacggcaaggactgccgcattggtgatggagggccagctgaggggaagttgctggtgagtttccttttctccatttctagcatatggacacctggcctctgcttgagcacttaggtgacaggaacttccgcacctcctgaggccctggatgattctaattgttagaaattctaattgttagaaatccttccttataatgaatgaattctgctttcctataatttctacctattgggccttgttctgttctctggaactaaacagaacaaccatttacccctccttttcaaactagagaataaagatttggttttagaa

SEQ ID NO: 175084 - DNA, 2969 bp, Homo sapiens
  Payload ID: 14378
  Gene Symbol: REPIN1
  Gene Name: replication initiator 1
  Uniprot ID: Q9BWE0
  ENST ID: ENST00000444957
  CDS Start-End: 167-1870
cccggcggggggaggttggggacgggcctggcagttgtgaactcgaacctgccgctgtcgccgcggcggggcggggagcgagagtgggccgcggaggccggccttcgggctccatggacgggcgccgcgtccctgcacagcccgccgcagagcagaggaagaaccgatgctggaacgtcgttgcaggggccccctggccatgggcctggcccagccccgactcctttctgggccctcccaggagtcaccccagaccctggggaaggagtcccgcgggctgaggcaacaaggcacgtcagtggcccagtctggtgcccaagccccaggcagggcccatcgctgtgcccactgtcgaaggcacttccctggctgggtggctctgtggcttcacacccgccggtgccaggcccggctgcccttgccctgccctgagtgtggccgtcgctttcgccatgcccccttcttagcactgcaccgccaggtccatgctgctgccaccccagacctgggctttgcctgccacctctgtgggcagagcttccgaggctgggtggccctggttctgcatctgcgggcccattcagctgcaaagcggcccatcgcttgtcccaaatgcgagagacgcttctggcgacgaaagcagcttcgagctcatctgcggcggtgccaccctcccgccccggaggcccggcccttcatatgcggcaactgtggccggagctttgcccagtgggaccagctagttgcccacaagcgggtgcacgtagctgaggccctggaggaggccgcagccaaggctctggggccccggcccaggggccgccccgcggtgaccgccccccggcccggtggagatgccgtcgaccgccccttccagtgtgcctgttgtggcaagcgcttccggcacaagcccaacttgatcgctcaccgccgcgtgcacacgggcgagcggccccaccagtgccccgagtgcgggaagcgctttaccaataagccctatctgacttcgcaccggcgcatccacaccggcgagaagccctacccgtgcaaagagtgcggccgccgcttccggcacaaacccaacctgctgtctcacagcaagattcacaagcgatccgaggggtcggcccaggccgcccccggcccggggagcccccagctgccagccggcccccaggagtccgcggccgagcccaccccggcggtacctctgaaaccggcccaggagccgccgccaggggccccgccagagcacccgcaggacccgatcgaagcccccccctccctctacagctgcgacgactgcggcaggagcttccggctggagcgcttcctgcgggcccaccagcggcagcacaccggggagcggcccttcacctgcgccgagtgcgggaagaacttcggcaagaagacgcacctggtggcgcactcgcgcgtgcactccggcgagcggcccttcgcctgcgaggagtgcggccgccgcttctcccagggcagccatctggcggcgcatcggcgcgaccacgcccccgatcggcccttcgtgtgtcccgactgcggcaaggccttccgccacaaaccctacctggcggcgcaccggcgcatccacaccggcgagaagccctacgtctgccccgactgcggcaaagccttcagccagaagtccaacctggtgtcgcaccggcgcatccacacgggcgagcggccctacgcctgtcccgactgcgaccgcagcttcagccagaagtccaacctcatcacccaccgcaagagccacatccgggacggcgccttctgctgtgccatctgtggccagaccttcgacgacgaggagagactcctggcccaccagaagaagcacgatgtctgagacggtgggcggggccgtgttggctgagagagggctggggtccttcgtggtgggagtcgcagtgggctgggggtgcctgcctagtgctggagtaggggacaatgggaatcctagaggggatggaagacgcggggagtgagctgggtgggccctgctagcgagagaggtcaaccccggtggccagggaacccacttccaagcgcagggacgccggcctccagctggtgtgtgctaaggctccgtcctgactgccctgtgccctggaaaagcagcaatagcatccgccccttagagccctctggctagaggagccaccagtggaaaggaagaccctccatcctctggtattaacgccttaatgcccctgtcttttactgtaagttacttaagatcatttttggaagcaggcgtggtagagtcctgtaaatgaatgctctgggctagatacagcttggagaacctgctggccttgttagacagcacttgggcctttgccagcagcaagaggtgaagcgaagccactcttacctctcccttcccctcccacctgccccctgcgtaggcacccagacttggagagacccgtctgctgttaatacttccatcctcttccttcccaaagagcagatcccaaggcatttactccttggtctgtctcgctttatctgtcgcccctcccagcgctgagagcctcccctggctgtcagcagcactgtgtccaggctcttgtctgaacaccgcagcccctccttcgctccttccagagctcagcatgtcacggcaaggactgccgcattggtgatggagggccagctgaggggaagttgctggtgagtttccttttctccatttctagcatatggacacctggcctctgcttgagcacttaggtgacaggaacttccgcacctcctgaggccctggatgattctaattgttagaaattctaattgttagaaatccttccttataatgaatgaattctgctttcctataatttctacctattgggccttgttctgttctctggaactaaacagaacaaccatttacccctccttttcaaactagagaataaagatttggttttagaactggt

SEQ ID NO: 175085 - DNA, 2058 bp, Homo sapiens
  Payload ID: 14378
  Gene Symbol: REPIN1
  Gene Name: replication initiator 1
  Uniprot ID: Q9BWE0
  ENST ID: ENST00000489432
  CDS Start-End: 184-2058
ggaggttggggacgggcctggcagttgtgaactcgaacctgccgctgtcgccgcggcggggcggggagcgagagtgggccgcggaggccggccttcgggctccatggacgggcgccgcgtccctgcacagcccgccgcagaggtaaggctggcctctctgcagtcagaggtctgagctctgccatggggataggggtgtctttattactgcagttttctctaacacctgggggctaccggagtgtgggccgaagcaggcgctgcagccgcggaagtatccccaggaacatccccaagaggagctggaaaaagcctcatccccagctctgcagtctccaggcagaggaagaaccgatgctggaacgtcgttgcaggggccccctggccatgggcctggcccagccccgactcctttctgggccctcccaggagtcaccccagaccctggggaaggagtcccgcgggctgaggcaacaaggcacgtcagtggcccagtctggtgcccaagccccaggcagggcccatcgctgtgcccactgtcgaaggcacttccctggctgggtggctctgtggcttcacacccgccggtgccaggcccggctgcccttgccctgccctgagtgtggccgtcgctttcgccatgcccccttcttagcactgcaccgccaggtccatgctgctgccaccccagacctgggctttgcctgccacctctgtgggcagagcttccgaggctgggtggccctggttctgcatctgcgggcccattcagctgcaaagcggcccatcgcttgtcccaaatgcgagagacgcttctggcgacgaaagcagcttcgagctcatctgcggcggtgccaccctcccgccccggaggcccggcccttcatatgcggcaactgtggccggagctttgcccagtgggaccagctagttgcccacaagcgggtgcacgtagctgaggccctggaggaggccgcagccaaggctctggggccccggcccaggggccgccccgcggtgaccgccccccggcccggtggagatgccgtcgaccgccccttccagtgtgcctgttgtggcaagcgcttccggcacaagcccaacttgatcgctcaccgccgcgtgcacacgggcgagcggccccaccagtgccccgagtgcgggaagcgctttaccaataagccctatctgacttcgcaccggcgcatccacaccggcgagaagccctacccgtgcaaagagtgcggccgccgcttccggcacaaacccaacctgctgtctcacagcaagattcacaagcgatccgaggggtcggcccaggccgcccccggcccggggagcccccagctgccagccggcccccaggagtccgcggccgagcccaccccggcggtacctctgaaaccggcccaggagccgccgccaggggccccgccagagcacccgcaggacccgatcgaagcccccccctccctctacagctgcgacgactgcggcaggagcttccggctggagcgcttcctgcgggcccaccagcggcagcacaccggggagcggcccttcacctgcgccgagtgcgggaagaacttcggcaagaagacgcacctggtggcgcactcgcgcgtgcactccggcgagcggcccttcgcctgcgaggagtgcggccgccgcttctcccagggcagccatctggcggcgcatcggcgcgaccacgcccccgatcggcccttcgtgtgtcccgactgcggcaaggccttccgccacaaaccctacctggcggcgcaccggcgcatccacaccggcgagaagccctacgtctgccccgactgcggcaaagccttcagccagaagtccaacctggtgtcgcaccggcgcatccacacgggcgagcggccctacgcctgtcccgactgcgaccgcagcttcagccagaagtccaacctcatcacccaccgcaagagccacatccgggacggcgccttctgctgtgccatctgtggccagaccttcgacgacgaggagagactcctggcccaccagaagaagcacgatgtctga

SEQ ID NO: 175086 - DNA, 824 bp, Homo sapiens
  Payload ID: 14378
  Gene Symbol: REPIN1
  Gene Name: replication initiator 1
  ENST ID: ENST00000486714
  CDS Start-End: 69-332
cttctgttttctcttccctccccacaggtaaggctggcctctctgcagtcagaggtctgagctctgccatggggataggggtgtctttattactgcagttttctctaacacctgggggctaccggagtgtgggccgaagcaggcgctgcagccgcggaagtatccccaggaacatccccaagaggagctggaaaaagcctcatccccagctctgcagtctccagggtctcgtcatctttgatgtctcacagttgcttcatctgttaaacagggagctcagtgtctgtttgtccagcttctcagagttgctgtgcagctcggatgtggcataggaaacagcagacacagggagagggcagcataaggcactgtagggagcagtggccacattttctgcagaggaagaaccgatgctggaacgtcgttgcaggggccccctggccatgggcctggcccagccccgactcctttctgggccctcccaggagtcaccccagaccctggggaaggagtcccgcgggctgaggcaacaaggcacgtcagtggcccagtctggtgcccaagccccaggcagggcccatcgctgtgcccactgtcgaaggcacttccctggctgggtggctctgtggcttcacacccgccggtgccaggcccggctgcccttgccctgccctgagtgtggccgtcgctttcgccatgcccccttcttagcactgcaccgccaggtccatgctgctgccaccccagacctgggctttgcctgccacctctgtgggcagagcttccgaggctgggtggccctggttctgcatctgcgggcccat

SEQ ID NO: 175087 - DNA, 1029 bp, Homo sapiens
  Payload ID: 14378
  Gene Symbol: REPIN1
  Gene Name: replication initiator 1
  ENST ID: ENST00000482680
  CDS Start-End: 172-582
cgggcctggcagttgtgaactcgaacctgccgctgtcgccgcggcggggcggggagcgagagtgggccgcggaggccggccttcgggctccatggacgggcgccgcgtccctgcacagcccgccgcagaggtaaggctggcctctctgcagtcagaggtctgagctctgccatggggataggggtgtctttattactgcagttttctctaacacctgggggctaccggagtgtgggccgaagcaggcgctgcagccgcggaagtatccccaggaacatccccaagaggagctggaaaaagcctcatccccagctctgcagtctccaggggagctcagtgtctgtttgtccagcttctcagagttgctgtgcagctcggatgtggcataggaaacagcagacacagggagagggcagcataaggcactgtagggagcagtggccacattttctgcagaggaagaaccgatgctggaacgtcgttgcaggggccccctggccatgggcctggcccagccccgactcctttctgggccctcccaggagtcaccccagaccctggggaaggagtcccgcgggctgaggcaacaaggcacgtcagtggcccagtctggtgcccaagccccaggcagggcccatcgctgtgcccactgtcgaaggcacttccctggctgggtggctctgtggcttcacacccgccggtgccaggcccggctgcccttgccctgccctgagtgtggccgtcgctttcgccatgcccccttcttagcactgcaccgccaggtccatgctgctgccaccccagacctgggctttgcctgccacctctgtgggcagagcttccgaggctgggtggccctggttctgcatctgcgggcccattcagctgcaaagcggcccatcgcttgtcccaaatgcgagagacgcttctggcgacgaaagcagcttcgagctcatctgcggcggtgccaccctcccgccccggaggcccggcccttcatatgcggcaactgtggccggagctttgccc

SEQ ID NO: 175088 - DNA, 899 bp, Homo sapiens
  Payload ID: 14378
  Gene Symbol: REPIN1
  Gene Name: replication initiator 1
  ENST ID: ENST00000467980
  CDS Start-End: 64-207
gccgctgtcgccgcggcggggcggggagcgagagtgggccgcggaggccggccttcgggctccatggacgggcgccgcgtccctgcacagcccgccgcagaggtacggccggggcaggggcgcggggccaccgcgggcccgcggggggccgctccacctgcggggcgcgtgaccgtaaggctggcctctctgcagtcagaggtctgagctctgccatggggataggggtgtctttattactgcagttttctctaacacctgggggctaccggagtgtgggccgaagcaggcgctgcagccgcggaagtatccccaggaacatccccaagaggagctggaaaaagcctcatccccagctctgcagtctccaggggagctcagtgtctgtttgtccagcttctcagagttgctgtgcagctcggatgtggcataggaaacagcagacacagggagagggcagcataaggcactgtagggagcagtggccacattttctgaggaagaaccgatgctggaacgtcgttgcaggggccccctggccatgggcctggcccagccccgactcctttctgggccctcccaggagtcaccccagaccctggggaaggagtcccgcgggctgaggcaacaaggcacgtcagtggcccagtctggtgcccaagccccaggcagggcccatcgctgtgcccactgtcgaaggcacttccctggctgggtggctctgtggcttcacacccgccggtgccaggcccggctgcccttgccctgccctgagtgtggccgtcgctttcgccatgcccccttcttagcactgcaccgccaggtccatgctgctgccaccccagacctgggctttgcctgccacctctgtgggcagagcttccgaggctgggtggccc

SEQ ID NO: 175089 - DNA, 1022 bp, Homo sapiens
  Payload ID: 14378
  Gene Symbol: REPIN1
  Gene Name: replication initiator 1
  ENST ID: ENST00000466559
  CDS Start-End: 112-279
cggcggggggaggttggggacgggcctggcagttgtgaactcgaacctgccgctgtcgccgcggcggggcggggagcgagagtgggccgcggaggccggccttcgggctccatggacgggcgccgcgtccctgcacagcccgccgcagagcagaggaagaaccgatgctggaacgtcgttgcaggggccccctggccatgggcctggcccagccccgactcctttctgggccctcccaggagtcaccccagaccctggggaaggagtcccgcgggctgaggcaacaaggcacgtcagtggcccagtctggtgcccaagccccaggcagggcccatcgctgtgcccactgtcgaaggcacttccctggctgggtggctctgtggcttcacacccgccggtgccaggcccggctgcccttgccctgccctgagtgtggccgtcgctttcgccatgcccccttcttagcactgcaccgccaggtccatgctgctgccaccccagacctgggctttgcctgccacctctgtgggcagagcttccgaggctgggtggccctggttctgcatctgcgggcccattcagctgcaaagcggcccatcgcttgtcccaaatgcgagagacgcttctggcgacgaaagcagcttcgagctcatctgcggcggtgccaccctcccgccccggaggcccggcccttcatatgcggcaactgtggccggagctttgcccagtgggaccagctagttgcccacaagcgggtgcacgtagctgaggccctggaggaggccgcagccaaggctctggggccccggcccaggggccgccccgcggtgaccgccccccggcccggtggagatgccgtcgaccgccccttccagtgtgcctgttgtggcaagcgcttccggcacaagcccaacttgatcgctcaccgccgcgtgcacacgggcgagcggccccaccagtgccccgagtgcgggaagcgctttaccaataagccctatctgacttcgcaccggcgcatccac

SEQ ID NO: 175090 - DNA, 1192 bp, Homo sapiens
  Payload ID: 14378
  Gene Symbol: REPIN1
  Gene Name: replication initiator 1
  ENST ID: ENST00000475514
  CDS Start-End: 95-1192
ggacgggcctggcagttgtgaactcgaacctgccgctgtcgccgcggcggggcggggagcgagagtgggccgcggaggccggccttcgggctccatggacgggcgccgcgtccctgcacagcccgccgcagagttttctctaacacctgggggctaccggagtgtgggccgaagcaggcgctgcagccgcggaagtatccccaggaacatccccaagaggagctggaaaaagcctcatccccagctctgcagtctccaggaggaagaaccgatgctggaacgtcgttgcaggggccccctggccatgggcctggcccagccccgactcctttctgggccctcccaggagtcaccccagaccctggggaaggagtcccgcgggctgaggcaacaaggcacgtcagtggcccagtctggtgcccaagccccaggcagggcccatcgctgtgcccactgtcgaaggcacttccctggctgggtggctctgtggcttcacacccgccggtgccaggcccggctgcccttgccctgccctgagtgtggccgtcgctttcgccatgcccccttcttagcactgcaccgccaggtccatgctgctgccaccccagacctgggctttgcctgccacctctgtgggcagagcttccgaggctgggtggccctggttctgcatctgcgggcccattcagctgcaaagcggcccatcgcttgtcccaaatgcgagagacgcttctggcgacgaaagcagcttcgagctcatctgcggcggtgccaccctcccgccccggaggcccggcccttcatatgcggcaactgtggccggagctttgcccagtgggaccagctagttgcccacaagcgggtgcacgtagctgaggccctggaggaggccgcagccaaggctctggggccccggcccaggggccgccccgcggtgaccgccccccggcccggtggagatgccgtcgaccgccccttccagtgtgcctgttgtggcaagcgcttccggcacaagcccaacttgatcgctcaccgccgcgtgcacacgggcgagcggccccaccagtgccccgagtgcgggaagcgctttaccaataagccctatctgacttcgcaccggcgcatccacaccggcgagaagccctacccgtgcaaagagtgcggccgccgcttccggcacaaacccaacctg

SEQ ID NO: 175091 - DNA, 1262 bp, Homo sapiens
  Payload ID: 14378
  Gene Symbol: REPIN1
  Gene Name: replication initiator 1
  ENST ID: ENST00000488943
  CDS Start-End: 82-1262
agttgtgaactcgaacctgccgctgtcgccgcggcggggcggggagcgagagtgggccgcggaggccggccttcgggctccatggacgggcgccgcgtccctgcacagcccgccgcagagttttctctaacacctgggggctaccggagtgtgggccgaagcaggcgctgcagccgcggaagtatccccaggaacatccccaagaggagctggaaaaagcctcatccccagctctgcagtctccaggcagaggaagaaccgatgctggaacgtcgttgcaggggccccctggccatgggcctggcccagccccgactcctttctgggccctcccaggagtcaccccagaccctggggaaggagtcccgcgggctgaggcaacaaggcacgtcagtggcccagtctggtgcccaagccccaggcagggcccatcgctgtgcccactgtcgaaggcacttccctggctgggtggctctgtggcttcacacccgccggtgccaggcccggctgcccttgccctgccctgagtgtggccgtcgctttcgccatgcccccttcttagcactgcaccgccaggtccatgctgctgccaccccagacctgggctttgcctgccacctctgtgggcagagcttccgaggctgggtggccctggttctgcatctgcgggcccattcagctgcaaagcggcccatcgcttgtcccaaatgcgagagacgcttctggcgacgaaagcagcttcgagctcatctgcggcggtgccaccctcccgccccggaggcccggcccttcatatgcggcaactgtggccggagctttgcccagtgggaccagctagttgcccacaagcgggtgcacgtagctgaggccctggaggaggccgcagccaaggctctggggccccggcccaggggccgccccgcggtgaccgccccccggcccggtggagatgccgtcgaccgccccttccagtgtgcctgttgtggcaagcgcttccggcacaagcccaacttgatcgctcaccgccgcgtgcacacgggcgagcggccccaccagtgccccgagtgcgggaagcgctttaccaataagccctatctgacttcgcaccggcgcatccacaccggcgagaagccctacccgtgcaaagagtgcggccgccgcttccggcacaaacccaacctgctgtctcacagcaagattcacaagcgatccgaggggtcggcccaggccgcccccggcccggggagcccccagctgccagc

SEQ ID NO: 175092 - DNA, 3182 bp, Homo sapiens
  Payload ID: 14378
  Gene Symbol: REPIN1
  Gene Name: replication initiator 1
  ENST ID: ENST00000479668
  CDS Start-End: 89-499
ctttttgtgctccactttggaacaaatcggaagctagggccttccaggtaaggctggcctctctgcagtcagaggtctgagctctgccatggggataggggtgtctttattactgcagttttctctaacacctgggggctaccggagtgtgggccgaagcaggcgctgcagccgcggaagtatccccaggaacatccccaagaggagctggaaaaagcctcatccccagctctgcagtctccaggggagctcagtgtctgtttgtccagcttctcagagttgctgtgcagctcggatgtggcataggaaacagcagacacagggagagggcagcataaggcactgtagggagcagtggccacattttctgcagaggaagaaccgatgctggaacgtcgttgcaggggccccctggccatgggcctggcccagccccgactcctttctgggccctcccaggagtcaccccagaccctggggaaggagtcccgcgggctgaggcaacaaggcacgtcagtggcccagtctggtgcccaagccccaggcagggcccatcgctgtgcccactgtcgaaggcacttccctggctgggtggctctgtggcttcacacccgccggtgccaggcccggctgcccttgccctgccctgagtgtggccgtcgctttcgccatgcccccttcttagcactgcaccgccaggtccatgctgctgccaccccagacctgggctttgcctgccacctctgtgggcagagcttccgaggctgggtggccctggttctgcatctgcgggcccattcagctgcaaagcggcccatcgcttgtcccaaatgcgagagacgcttctggcgacgaaagcagcttcgagctcatctgcggcggtgccaccctcccgccccggaggcccggcccttcatatgcggcaactgtggccggagctttgcccagtgggaccagctagttgcccacaagcgggtgcacgtagctgaggccctggaggaggccgcagccaaggctctggggccccggcccaggggccgccccgcggtgaccgccccccggcccggtggagatgccgtcgaccgccccttccagtgtgcctgttgtggcaagcgcttccggcacaagcccaacttgatcgctcaccgccgcgtgcacacgggcgagcggccccaccagtgccccgagtgcgggaagcgctttaccaataagccctatctgacttcgcaccggcgcatccacaccggcgagaagccctacccgtgcaaagagtgcggccgccgcttccggcacaaacccaacctgctgtctcacagcaagattcacaagcgatccgaggggtcggcccaggccgcccccggcccggggagcccccagctgccagccggcccccaggagtccgcggccgagcccaccccggcggtacctctgaaaccggcccaggagccgccgccaggggccccgccagagcacccgcaggacccgatcgaagcccccccctccctctacagctgcgacgactgcggcaggagcttccggctggagcgcttcctgcgggcccaccagcggcagcacaccggggagcggcccttcacctgcgccgagtgcgggaagaacttcggcaagaagacgcacctggtggcgcactcgcgcgtgcactccggcgagcggcccttcgcctgcgaggagtgcggccgccgcttctcccagggcagccatctggcggcgcatcggcgcgaccacgcccccgatcggcccttcgtgtgtcccgactgcggcaaggccttccgccacaaaccctacctggcggcgcaccggcgcatccacaccggcgagaagccctacgtctgccccgactgcggcaaagccttcagccagaagtccaacctggtgtcgcaccggcgcatccacacgggcgagcggccctacgcctgtcccgactgcgaccgcagcttcagccagaagtccaacctcatcacccaccgcaagagccacatccgggacggcgccttctgctgtgccatctgtggccagaccttcgacgacgaggagagactcctggcccaccagaagaagcacgatgtctgagacggtgggcggggccgtgttggctgagagagggctggggtccttcgtggtgggagtcgcagtgggctgggggtgcctgcctagtgctggagtaggggacaatgggaatcctagaggggatggaagacgcggggagtgagctgggtgggccctgctagcgagagaggtcaaccccggtggccagggaacccacttccaagcgcagggacgccggcctccagctggtgtgtgctaaggctccgtcctgactgccctgtgccctggaaaagcagcaatagcatccgccccttagagccctctggctagaggagccaccagtggaaaggaagaccctccatcctctggtattaacgccttaatgcccctgtcttttactgtaagttacttaagatcatttttggaagcaggcgtggtagagtcctgtaaatgaatgctctgggctagatacagcttggagaacctgctggccttgttagacagcacttgggcctttgccagcagcaagaggtgaagcgaagccactcttacctctcccttcccctcccacctgccccctgcgtaggcacccagacttggagagacccgtctgctgttaatacttccatcctcttccttcccaaagagcagatcccaaggcatttactccttggtctgtctcgctttatctgtcgcccctcccagcgctgagagcctcccctggctgtcagcagcactgtgtccaggctcttgtctgaacaccgcagcccctccttcgctccttccagagctcagcatgtcacggcaaggactgccgcattggtgatggagggccagctgaggggaagttgctggtgagtttccttttctccatttctagcatatggacacctggcctctgcttgagcacttaggtgacaggaacttccgcacctcctgaggccctggatgattctaattgttagaaattctaattgttagaaatccttccttataatgaatgaattctgctttcctataatttctacctattgggccttgttctgttctctggaactaaacagaacaaccatttacccctccttttcaaactagagaataaagatttggttttagaa

SEQ ID NO: 175093 - DNA, 480 bp, Homo sapiens
  Payload ID: 14378
  Gene Symbol: REPIN1
  Gene Name: replication initiator 1
  ENST ID: ENST00000522266
  CDS Start-End: 7-150
ggctccatggacgggcgccgcgtccctgcacagcccgccgcagaggtacggccggggcaggggcgcggggccaccgcgggcccgcggggggccgctccacctgcggggcgcgtgaccgtaaggctggcctctctgcagtcagaggtctgagctctgccatggggataggggtgtctttattactgcagttttctctaacacctgggggctaccggagtgtgggccgaagcaggcgctgcagccgcggaagtatccccaggaacatccccaagaggagctggaaaaagcctcatccccagctctgcagtctccaggcagaggaagaaccgatgctggaacgtcgttgcaggggccccctggccatgggcctggcccagccccgactcctttctgggccctcccaggagtcaccccagaccctggggaaggagtcccgcgggctgaggcaacaaggcacgtcagtggcccagtctggtgccc

SEQ ID NO: 175094 - DNA, 478 bp, Homo sapiens
  Payload ID: 14378
  Gene Symbol: REPIN1
  Gene Name: replication initiator 1
  ENST ID: ENST00000518514
  CDS Start-End: 33-443
gagtgggccgcggaggccggccttcgggctccatggacgggcgccgcgtccctgcacagcccgccgcagaggtacggccggggcaggggcgcggggccaccgcgggcccgcggggggccgctccacctgcggggcgcgtgaccgtgagtgtgcgcgaccgtgtcagaggaagaaccgatgctggaacgtcgttgcaggggccccctggccatgggcctggcccagccccgactcctttctgggccctcccaggagtcaccccagaccctggggaaggagtcccgcgggctgaggcaacaaggcacgtcagtggcccagtctggtgcccaagccccaggcagggcccatcgctgtgcccactgtcgaaggcacttccctggctgggtggctctgtggcttcacacccgccggtgccaggcccggctgcccttgccctgccctgagtgtggccgtcgctttcgccatgcccccttcttag

SEQ ID NO: 175095 - DNA, 583 bp, Homo sapiens
  Payload ID: 14378
  Gene Symbol: REPIN1
  Gene Name: replication initiator 1
  ENST ID: ENST00000519397
  CDS Start-End: 145-583
agaggaagcccagcaacttctgctctttcttaatttctagaaaagagtgaagagaggccttttcaaagttcgcaggatcgggcctttttgtgctccactttggaacaaatcggaagctagggccttccagcagaggaagaaccgatgctggaacgtcgttgcaggggccccctggccatgggcctggcccagccccgactcctttctgggccctcccaggagtcaccccagaccctggggaaggagtcccgcgggctgaggcaacaaggcacgtcagtggcccagtctggtgcccaagccccaggcagggcccatcgctgtgcccactgtcgaaggcacttccctggctgggtggctctgtggcttcacacccgccggtgccaggcccggctgcccttgccctgccctgagtgtggccgtcgctttcgccatgcccccttcttagcactgcaccgccaggtccatgctgctgccaccccagacctgggctttgcctgccacctctgtgggcagagcttccgaggctgggtggccctggttctgcatctgcgggcccattcagctgcaaagcggcccatcgctt

SEQ ID NO: 175096 - DNA, 4340 bp, Homo sapiens
  Payload ID: 14379
  Gene Symbol: RPA1
  Gene Name: replication protein A1, 70kDa
  Uniprot ID: P27694
  ENST ID: ENST00000254719
  CDS Start-End: 111-1961
cgggagcggtgcgcgcaacttctcgggccaataactgcgcagcgcgcgggacccgggtggggaagctggagctgttgcggggtccgcggggaagtcttggcggtggagccatggtcggccaactgagcgagggggccattgcggccatcatgcagaagggggatacaaacataaagcccatcctccaagtcatcaacatccgtcccattactacggggaatagtccgccgcgttatcgactgctcatgagtgatggattgaacactctatcctctttcatgttggcgacacagttgaaccctctcgtggaggaagaacaattgtccagcaactgtgtatgccagattcacagatttattgtgaacactctgaaagacggaaggagagtagttatcttgatggaattagaagttttgaagtcagctgaagcagttggagtgaagattggcaatccagtgccctataatgaaggactcgggcagccgcaagtagctcctccagcgccagcagccagcccagcagcaagcagcaggccccagccgcagaatggaagctcgggaatgggttctactgtttctaaggcttatggtgcttcaaagacatttggaaaagctgcaggtcccagcctgtcacacacttctgggggaacacagtccaaagtggtgcccattgccagcctcactccttaccagtccaagtggaccatttgtgctcgtgttaccaacaaaagtcagatccgtacctggagcaactcccgaggggaagggaagcttttctccctagaactggttgacgaaagtggtgaaatccgagctacagctttcaatgagcaagtggacaagttctttcctcttattgaagtgaacaaggtgtattatttctcgaaaggcaccctgaagattgctaacaagcagttcacagctgttaaaaatgactacgagatgaccttcaataacgagacttccgtcatgccctgtgaggacgaccatcatttacctacggttcagtttgatttcacggggattgatgacctcgagaacaagtcgaaagactcacttgtagacatcatcgggatctgcaagagctatgaagacgccactaaaatcacagtgaggtctaacaacagagaagttgccaagaggaatatctacttgatggacacatccgggaaggtggtgactgctacactgtggggggaagatgctgataaatttgatggttctagacagcccgtgttggctatcaaaggagcccgagtctctgatttcggtggacggagcctctccgtgctgtcttcaagcactatcattgcgaatcctgacatcccagaggcctataagcttcgtggatggtttgacgcagaaggacaagccttagatggtgtttccatctctgatctaaagagcggcggagtcggagggagtaacaccaactggaaaaccttgtatgaggtcaaatccgagaacctgggccaaggcgacaagccggactactttagttctgtggccacagtggtgtatcttcgcaaagagaactgcatgtaccaagcctgcccgactcaggactgcaataagaaagtgattgatcaacagaatggattgtaccgctgtgagaagtgcgacaccgaatttcccaatttcaagtaccgcatgatcctgtcagtaaatattgcagattttcaagagaatcagtgggtgacttgtttccaggagtctgctgaagctatccttggacaaaatgctgcttatcttggggaattaaaagacaagaatgaacaggcatttgaagaagttttccagaatgccaacttccgatctttcatattcagagtcagggtcaaagtggagacctacaacgacgagtctcgaattaaggccactgtgatggacgtgaagcccgtggactacagagagtatggccgaaggctggtcatgagcatcaggagaagtgcattgatgtgagaggagcagtgccaatcgggcagaagtttgcaaataggcagaatggaatcgatttcctcccacctccgtgtgacgatcccatgttagctacacagtgcagaggctcttgatggtggactaagcaatttcccccctcgtgcgcatctcagaacccatcggtaggcaaaggaaaatacgctcaggtggttgtggtgtagactgtgtcaggcctacggagtcagccagtggctagcgcaagaccagtcactccctctgccttcaggcttctgtcaatttcattatcatcaagcaggaattatgtcgtaagtcactgaccctaactgcagaccatgaagtaaattatgtaactaggtttttgcttctccagtggtgaccacccccccccatccccgctcacaacttgggttcttctcagcggggcgagctgagaagcggtcatgagcacctggggattttagtaagtgtgtcttcctagaattcgaaggctctctctttctagaggtgctacatagttggtaatgcttggaatggcaatagggtagaatgattaatcaaaggcatatcttctatatctgaagagtatccttccttcagggtttaatagactgagtcagatgggtctgatattaatcaaaattgtctcttctgaggaccgctgataagcattgacttgccgtcccctaaggaaatccgagcggctacaaagcgtttctttacttctcacttcaattaatgctgcgcttcgcttggtgagtgcgtactttttctacctgtacacattcctgcattcatgtattttgttttttttgactaaagctatgttacatggaaaggattttgaagccttttgtttcccttgctttgttttaataaacagtatattctttggttgtgaatcctactttctttgaatgcaaagagttcctataactggaaagcaattaattagccttcataataaatgttcacttgggggggatgttaactcattataaacccgaagattagtccaaggcatggagatccttcttcctagtgtttgcagccctgaaatgcatctttcaaagcatgaaaacactaaaaacaaaaagccattttgcctgaggatgctgatgatctggcacttgggattttattgatgtttacgcagcagtctaacaccaaccacgctttgaaatgtgtacagacagtgagctggtaagaaaacagtaattatgctagtgggcctttcagtcagcaaaagcatgctcgctctgtgtgttcctaatcatattaattatctatccggtggctgcaacacaccgcctgccattggccgcacatctcgccgtcgtaccccggcagtgcggcggtcactctgcagccagaggacctgctgttcatcactgcacatgccgcctgcggaggcttttggatatggggagtgatggtgtcctgtctgtctcccccctcggtgtctgccgttgacataggggccagccagccctagacgggatgacttccgttcctgaggacagacacagagggactcctgctcagcctcactaattgtttagacacattccttcctacccttctctagtctcaggagatggtaactgggtcgcatttcagtctctgactgaggcctcagccatttttacggaagttcttttctgtctgaccttgcttataaagcatcgacgagaaaattacagtcttcaaccctcttctggattgacaaattgtggctgggaagtggcgatctagctttcagcccagtaaccagtctttcatgcctactactcccagcattccctcctctccccacgtgtctgtccacacagtgaagaggcctgaccagccgtggtaccaggacaggacgtgtccagggaacgctgacacctgtcctcgcgccttctcagtggccagcgtgatgaaaccagcacgtctccgtggatgtgattgggaacccaggggcagtgccagggggagggctccctcgaggaggctgtttctaacagatttccccactcaaagatcagatcaccagcagaggagcatcagaaactggctccactgttgggcttttcagagattttggtccctgcgggttgcctaaatagattctggcccacagtttacctcgaaaggctgttgatgttgttctgtttctcctctttcacttagagatcaatgttgattttgcgtacaccatgacatcagcgttaggcaattaggagaaaaaaatctaatcatttcgcctttatttcaagtggttcttgaattccctccagtctcattgtgaaaggggcagggaaaaaaataaaagggtaataatctgatttctgtccatatttccagtgttttatgctttccattaaaaccttgctaatctct

SEQ ID NO: 175097 - DNA, 630 bp, Homo sapiens
  Payload ID: 14379
  Gene Symbol: RPA1
  Gene Name: replication protein A1, 70kDa
  ENST ID: ENST00000570451
  CDS Start-End: 171-630
cgcacgtcgggggcgggagcggtgcgcgcaacttctcgggccaataactgcgcagcgcgcgggacccgggtggggaagctggagctgttgcggggtccgcggggaagtcttggcggtggagccatggtcggccaactgagcgagggggccattgcggtgaggaggccatcatgcagaagggggatacaaacataaagcccatcctccaagtcatcaacatccgtcccattactacggggaatagtccgccgcgttatcgactgctcatgagtgatggattgaacactctatcctctttcatgttggcgacacagttgaaccctctcgtggaggaagaacaattgtccagcaactgtgtatgccagattcacagatttattgtgaacactctgaaagacggaaggagagtagttatcttgatggaattagaagttttgaagtcagctgaagcagttggagtgaagattggcaatccagtgccctataatgaaggactcgggcagccgcaagtagctcctccagcgccagcagccagcccagcagcaagcagcaggccccagccgcagaatggaagctcgggaatgggttctactgtttctaaggcttatggtgcttcaaagacatttggaa

SEQ ID NO: 175098 - DNA, 3849 bp, Homo sapiens
  Payload ID: 14379
  Gene Symbol: RPA1
  Gene Name: replication protein A1, 70kDa
  ENST ID: ENST00000574049
  CDS Start-End: 1-942
ttctttcctcttattgaagtgaacaaggtgtattatttctcgaaaggcaccctgaagattgctaacaagcagttcacagctgttaaaaatgactacgagatgaccttcaataacgagacttccgtcatgccctgtgaggacgaccatcatttacctacggttcagtttgatttcacggggattgatgacctcgagaacaagtcgaaagactcacttgtagacatcatcgggatctgcaagagctatgaagacgccactaaaatcacagtgaggtctaacaacagagaagttgccaagaggaatatctacttgatggacacatccgggaaggtggtgactgctacactgtggggggaagatgctgataaatttgatggttctagacagcccgtgttggctatcaaaggagcccgagtctctgatttcggtggacggagcctctccgtgctgtcttcaagcactatcattgcgaatcctgacatcccagaggcctataagcttcgtggatggtttgacgcagaaggacaagccttagatggtgtttccatctctgatctaaagagcggcggagtcggagggagtaacaccaactggaaaaccttgtatgaggtcaaatccgagaacctgggccaaggcgacaaggtaaatattgcagattttcaagagaatcagtgggtgacttgtttccaggagtctgctgaagctatccttggacaaaatgctgcttatcttggggaattaaaagacaagaatgaacaggcatttgaagaagttttccagaatgccaacttccgatctttcatattcagagtcagggtcaaagtggagacctacaacgacgagtctcgaattaaggccactgtgatggacgtgaagcccgtggactacagagagtatggccgaaggctggtcatgagcatcaggagaagtgcattgatgtgagaggagcagtgccaatcgggcagaagtttgcaaataggcagaatggaatcgatttcctcccacctccgtgtgacgatcccatgttagctacacagtgcagaggctcttgatggtggactaagcaatttcccccctcgtgcgcatctcagaacccatcggtaggcaaaggaaaatacgctcaggtggttgtggtgtagactgtgtcaggcctacggagtcagccagtggctagcgcaagaccagtcactccctctgccttcaggcttctgtcaatttcattatcatcaagcaggaattatgtcgtaagtcactgaccctaactgcagaccatgaagtaaattatgtaactaggtttttgcttctccagtggtgaccacccccccccatccccgctcacaacttgggttcttctcagcggggcgagctgagaagcggtcatgagcacctggggattttagtaagtgtgtcttcctagaattcgaaggctctctctttctagaggtgctacatagttggtaatgcttggaatggcaatagggtagaatgattaatcaaaggcatatcttctatatctgaagagtatccttccttcagggtttaatagactgagtcagatgggtctgatattaatcaaaattgtctcttctgaggaccgctgataagcattgacttgccgtcccctaaggaaatccgagcggctacaaagcgtttctttacttctcacttcaattaatgctgcgcttcgcttggtgagtgcgtactttttctacctgtacacattcctgcattcatgtattttgttttttttgactaaagctatgttacatggaaaggattttgaagccttttgtttcccttgctttgttttaataaacagtatattctttggttgtgaatcctactttctttgaatgcaaagagttcctataactggaaagcaattaattagccttcataataaatgttcacttgggggggatgttaactcattataaacccgaagattagtccaaggcatggagatccttcttcctagtgtttgcagccctgaaatgcatctttcaaagcatgaaaacactaaaaacaaaaagccattttgcctgaggatgctgatgatctggcacttgggattttattgatgtttacgcagcagtctaacaccaaccacgctttgaaatgtgtacagacagtgagctggtaagaaaacagtaattatgctagtgggcctttcagtcagcaaaagcatgctcgctctgtgtgttcctaatcatattaattatctatccggtggctgcaacacaccgcctgccattggccgcacatctcgccgtcgtaccccggcagtgcggcggtcactctgcagccagaggacctgctgttcatcactgcacatgccgcctgcggaggcttttggatatggggagtgatggtgtcctgtctgtctcccccctcggtgtctgccgttgacataggggccagccagccctagacgggatgacttccgttcctgaggacagacacagagggactcctgctcagcctcactaattgtttagacacattccttcctacccttctctagtctcaggagatggtaactgggtcgcatttcagtctctgactgaggcctcagccatttttacggaagttcttttctgtctgaccttgcttataaagcatcgacgagaaaattacagtcttcaaccctcttctggattgacaaattgtggctgggaagtggcgatctagctttcagcccagtaaccagtctttcatgcctactactcccagcattccctcctctccccacgtgtctgtccacacagtgaagaggcctgaccagccgtggtaccaggacaggacgtgtccagggaacgctgacacctgtcctcgcgccttctcagtggccagcgtgatgaaaccagcacgtctccgtggatgtgattgggaacccaggggcagtgccagggggagggctccctcgaggaggctgtttctaacagatttccccactcaaagatcagatcaccagcagaggagcatcagaaactggctccactgttgggcttttcagagattttggtccctgcgggttgcctaaatagattctggcccacagtttacctcgaaaggctgttgatgttgttctgtttctcctctttcacttagagatcaatgttgattttgcgtacaccatgacatcagcgttaggcaattaggagaaaaaaatctaatcatttcgcctttatttcaagtggttcttgaattccctccagtctcattgtgaaaggggcagggaaaaaaataaaagggtaataatctgatttctgtccatatttccagtgttttatgctttccattaaaaccttgctaatctctcgcgtgctgttccttttttgaactgcagggtcaaaaatgttcccctcccccacttctgtttcctgagtgggctgtcttcaaaaagtataaatactattgatcgtggtatttaatacactaatgaaacccatggttattgactacataattaatatactgtccaaaagtgaagtttggccgcccagtatgtaaaggtttatattgactcatgtttctttggcaatatgccgcccaaggttttatttatagaggatgaaacaggttgtttggtctccttttcttcttttcacctgttagaaggccactattcccctagtaaactgattgtttccttgtctcaaagggaagattccccccactccccggccaccttttatgtggtttgttaactcttagtcttatatccactccgctggtagagttctggcttttataaacacctttggaagtcatcggttcctcaaaaagagagcatagatgtttaattttcacttattcaaaaaaactggtatttttgttattaagaca

SEQ ID NO: 175099 - DNA, 577 bp, Homo sapiens
  Payload ID: 14379
  Gene Symbol: RPA1
  Gene Name: replication protein A1, 70kDa
  ENST ID: ENST00000571058
  CDS Start-End: 206-577
tttaacctcctctgggataccaacccgtgcactcgccagagaccgaggcgagaacgcctcgagaaccgctcagacgcgcccggaactgcgccctggtctccctcccagcgcccgcgcagctcctggcgcgccccttggcgccccgctccgccccgcaccgcgtccggcgtcccgcgccaggcctcgcttgggaccatgggccatcatgcagaagggggatacaaacataaagcccatcctccaagtcatcaacatccgtcccattactacggggaatagtccgccgcgttatcgactgctcatgagtgatggattgaacactctatcctctttcatgttggcgacacagttgaaccctctcgtggaggaagaacaattgtccagcaactgtgtatgccagattcacagatttattgtgaacactctgaaagacggaaggagagtagttatcttgatggaattagaagttttgaagtcagctgaagcagttggagtgaagattggcaatccagtgccctataatgaaggactcgggcagccgcaagtagctcctccagcgccagcagccagcccagca

SEQ ID NO: 175100 - DNA, 1237 bp, Homo sapiens
  Payload ID: 14380
  Gene Symbol: RPA2
  Gene Name: replication protein A2, 32kDa
  Uniprot ID: P15927
  ENST ID: ENST00000313433
  CDS Start-End: 71-1147
gttctgtggttttccgctattcccccagacccgcaccttctcggcctctttgcggagaatcgtgaccaagatgtggaacagtaatgatgggggtgcggggtggaggaggaagagaatcgcaggaggttttagcaagagggcgagcctagggtccgagaggcgtgtggtagcgggagaggaagggcgggagcggagctggggcgtttgggggtcacccgcaggaaggcggcgaggaaggttagggagactcgggcagtgtttgaaggggcgaagcctccgggagcctgcgggtttctcggaggcgtgggacgtggcacaggcactaatcctgttgttcaaaacaggtggattcgaaagctatggcagctcctcatacgggggagccggcggctacacgcagtccccggggggctttggatcgcccgcaccttctcaagccgaaaagaaatcaagagcccgagcccagcacattgtgccctgtactatatctcagctgctttctgccactttggttgatgaagtgttcagaattgggaatgttgagatttcacaggtcactattgtggggatcatcagacatgcagagaaggctccaaccaacattgtttacaaaatagatgacatgacagctgcacccatggacgttcgccagtgggttgacacagatgacaccagcagtgaaaacactgtggttcctccagaaacatatgtgaaagtggcaggccacctgagatcttttcagaacaaaaagagcctggtagcctttaagatcatgcccctggaggatatgaatgagttcaccacacatattctggaagtgatcaatgcacacatggtactaagcaaagccaacagccagccctcagcagggagagcacctatcagcaatccaggaatgagtgaagcagggaactttggtgggaatagcttcatgccagcaaatggcctcactgtggcccaaaaccaggtgttgaatttgattaaggcttgtccaagacctgaagggttgaactttcaggatctcaagaaccagctgaaacacatgtctgtatcctcaatcaagcaagctgtggattttctgagcaatgaggggcacatctattctactgtggatgatgaccattttaaatccacagatgcagaataactggatctaactgggtacctgagatattttacagctggacctagtttcacaatctgttgtctccagctctgcatatgtctggccaggggg

SEQ ID NO: 175101 - DNA, 1162 bp, Homo sapiens
  Payload ID: 14380
  Gene Symbol: RPA2
  Gene Name: replication protein A2, 32kDa
  Uniprot ID: P15927
  ENST ID: ENST00000373909
  CDS Start-End: 87-923
gctagtgcggagggttttgcccttcgtaaagatggccgcggaggcttttggagccaactgggagcgcagtacgcgttttctggagcatgggcagaggagacaggaacaagcgtagcatccgtggattcgaaagctatggcagctcctcatacgggggagccggcggctacacgcagtccccggggggctttggatcgcccgcaccttctcaagccgaaaagaaatcaagagcccgagcccagcacattgtgccctgtactatatctcagctgctttctgccactttggttgatgaagtgttcagaattgggaatgttgagatttcacaggtcactattgtggggatcatcagacatgcagagaaggctccaaccaacattgtttacaaaatagatgacatgacagctgcacccatggacgttcgccagtgggttgacacagatgacaccagcagtgaaaacactgtggttcctccagaaacatatgtgaaagtggcaggccacctgagatcttttcagaacaaaaagagcctggtagcctttaagatcatgcccctggaggatatgaatgagttcaccacacatattctggaagtgatcaatgcacacatggtactaagcaaagccaacagccagccctcagcagggagagcacctatcagcaatccaggaatgagtgaagcagggaactttggtgggaatagcttcatgccagcaaatggcctcactgtggcccaaaaccaggtgttgaatttgattaaggcttgtccaagacctgaagggttgaactttcaggatctcaagaaccagctgaaacacatgtctgtatcctcaatcaagcaagctgtggattttctgagcaatgaggggcacatctattctactgtggatgatgaccattttaaatccacagatgcagaataactggatctaactgggtacctgagatattttacagctggacctagtttcacaatctgttgtctccagctctgcatatgtctggccagggggcttctaggaagtaggtttcatctatcaaatgtctcctctgacttccttttgaaacttactgctcttctgttttattttgttttgtttgaagctcagagggagatgggcaattgacagggatgcaatccagggtgggatttcttgaggaa

SEQ ID NO: 175102 - DNA, 1752 bp, Homo sapiens
  Payload ID: 14380
  Gene Symbol: RPA2
  Gene Name: replication protein A2, 32kDa
  Uniprot ID: P15927
  ENST ID: ENST00000373912
  CDS Start-End: 301-1113
agtgcggagggttttgcccttcgtaaagatggccgcggaggcttttggagccaactgggagcgcagtacgcgttttctggagcatgggcagaggagacaggaacaagcgtagcatccgtgagcaccgattggctgaagcgagcaccccgggagctgactggctccgccattcgcgggaaggcgtttgtggtgccagagaaaagtagccagagcggcgcagtggcggccgcgttctgtggttttccgctattcccccagacccgcaccttctcggcctctttgcggagaatcgtgaccaagatgtggaacagtggattcgaaagctatggcagctcctcatacgggggagccggcggctacacgcagtccccggggggctttggatcgcccgcaccttctcaagccgaaaagaaatcaagagcccgagcccagcacattgtgccctgtactatatctcagctgctttctgccactttggttgatgaagtgttcagaattgggaatgttgagatttcacaggtcactattgtggggatcatcagacatgcagagaaggctccaaccaacattgtttacaaaatagatgacatgacagctgcacccatggacgttcgccagtgggttgacacagatgacaccagcagtgaaaacactgtggttcctccagaaacatatgtgaaagtggcaggccacctgagatcttttcagaacaaaaagagcctggtagcctttaagatcatgcccctggaggatatgaatgagttcaccacacatattctggaagtgatcaatgcacacatggtactaagcaaagccaacagccagccctcagcagggagagcacctatcagcaatccaggaatgagtgaagcagggaactttggtgggaatagcttcatgccagcaaatggcctcactgtggcccaaaaccaggtgttgaatttgattaaggcttgtccaagacctgaagggttgaactttcaggatctcaagaaccagctgaaacacatgtctgtatcctcaatcaagcaagctgtggattttctgagcaatgaggggcacatctattctactgtggatgatgaccattttaaatccacagatgcagaataactggatctaactgggtacctgagatattttacagctggacctagtttcacaatctgttgtctccagctctgcatatgtctggccagggggcttctaggaagtaggtttcatctatcaaatgtctcctctgacttccttttgaaacttactgctcttctgttttattttgttttgtttgaagctcagagggagatgggcaattgacagggatgcaatccagggtgggatttcttgaggaagttacaaataagcttgttacaacatcaagatagatggaattggaaggatgctaccaggagagtacttacatagtgctcaggagtttctcttcttaaaatgtttactgctgaaagatgagcaggaccagggcgttataggcagagccctagccgagaaacctgctggcctctgcctgttttcatttcccactttggttgtgtggcattactttcagaattgcactttcctgcttgtcatgactttttgacacacttgccatgacgtgtgtttctgtgaacatgaagttctgcggtagtgcctccaggggcagaggaaaagaagaagtgttactgcattttgtacaaaataaatacagtcatatgtttaataaaacagttctattgtagtaacttgtaaaaa

SEQ ID NO: 175103 - DNA, 682 bp, Homo sapiens
  Payload ID: 14380
  Gene Symbol: RPA2
  Gene Name: replication protein A2, 32kDa
  ENST ID: ENST00000444045
  CDS Start-End: 146-682
gactggctccgccattcgcgggaaggcgtttgtggtgccagagaaaagtagccagagcggcgcagtggcggccgcgttctgtggttttccgctattcccccagacccgcaccttctcggcctctttgcggagaatcgtgaccaagatgtggaacagtaatgatgggggtggattcgaaagctatggcagctcctcatacgggggagccggcggctacacgcagtccccggggggctttggatcgcccgcaccttctcaagccgaaaagaaatcaagagcccgagcccagcacattgtgccctgtactatatctcagctgctttctgccactttggttgatgaagtgttcagaattgggaatgttgagatttcacaggtcactattgtggggatcatcagacatgcagagaaggctccaaccaacattgtttacaaaatagatgacatgacagctgcacccatggacgttcgccagtgggttgacacagatgacaccagcagtgaaaacactgtggttcctccagaaacatatgtgaaagtggcaggccacctgagatcttttcagaacaaaaagagcctggtagcctttaagatcatgcccctggaggatatgaatgagttcaccacacatattctggaagtgatcaatgcacacatggtactaagcaaagccaacagccag

SEQ ID NO: 175104 - DNA, 554 bp, Homo sapiens
  Payload ID: 14380
  Gene Symbol: RPA2
  Gene Name: replication protein A2, 32kDa
  ENST ID: ENST00000419958
  CDS Start-End: 1-369
ctggaggatatgaatgagttcaccacacatattctggaagtgatcaatgcacacatggtactaagcaaagccaacagccagccctcagcagggagagcacctatcagcaatccaggaatgagtgaagcagggaactttggtgggaatagcttcatgccagcaaatggcctcactgtggcccaaaaccaggtgttgaatttgattaaggcttgtccaagacctgaagggttgaactttcaggatctcaagaaccagctgaaacacatgtctgtatcctcaatcaagcaagctgtggattttctgagcaatgaggggcacatctattctactgtggatgatgaccattttaaatccacagatgcagaataactggatctaactggaattgcactttcctgcttgtcatgactttttgacacacttgccatgacgtgtgtttctgtgaacatgaagttctgcggtagtgcctccaggggcagaggaaaagaagaagtgttactgcattttgtacaaaataaatacagtcatatgtttaataaaacagttctattgta

SEQ ID NO: 175105 - DNA, 2020 bp, Homo sapiens
  Payload ID: 14381
  Gene Symbol: RPA3
  Gene Name: replication protein A3, 14kDa
  Uniprot ID: P35244
  ENST ID: ENST00000223129
  CDS Start-End: 1173-1538
aagctactcagataagaggctccaagaggacatttttggatgtgaaaaacaatgagaaggaggacaacacacatttacaatcgtcttaattttgtactcagaaaaaggatgtgaagacaatgcacagggaatacaatagtttcagatctgtgtacagtttccttttgcttcatctcctgcaacaatgtaatgaagacaccatgatatcattaacatttcacacaaaaggaaaatgaggctgaaatggtgtgggcaaggcccaggaatctggagcatccctaaccaagcaggagagcacctgggatagagaaagtgctcaagaatgttcacttactgattactacaatcaaaaaaagatacgacactaatttaccacattcttcttacttattttatgagatactattcttccaaggtggagaaagtggagaaagtagagtgacgcagctaagggagtaaatcgaccctcagccaacaagtggcaaaagcctgaagaaagtgatcaagatcactgatgaccccgctgcccatctccaagggggcgggtatcacaaccccgacgccacaccacgtatcattccgcaaaactcccgcgcctcccacgcagaactggcaagagggaaggcgagacagcagtgaacagctggtacgcagcacccacagcaccgcggcagcagctagtgccgactcccgcctagctcttttgactctgttcgcgggaagaatggggaaacagtaaggttgcggcgcctcccgcgagacgaggtacctgaggctggccccgcagtcccccgccgcaccagcaccggagcttcacaccccacttccggggtcaagtcaccgccgggaatcctgtgatcgcagaaaggtagtctcaggttccgcccctatccaagtcccgcctccactgcctctcgccctgtatctgtcaacttccgggacgccgcgcgtcactaagcagccaatctccacttccggactcatccagccccttctccacccctttcagagacagcgcgattgcgatttaggtttccgcgcatttaattggcgaagctggagcgctagtcttcgctgattggtgccgagaaatctgccccatagacacccgcggggcgcacagtttcagtcgtccgtgggtttcccgccagccgcagtcttggaccataatcatggtggacatgatggacttgcccaggtcgcgcatcaacgccggcatgctagctcaattcatcgacaagcctgtctgcttcgtagggaggctggaaaagattcatcccaccggaaaaatgtttattctttcagatggagaaggaaaaaatggaaccatcgagttgatggaaccccttgatgaagaaatctctggaattgtggaagtggttggaagagtaaccgccaaggccaccatcttgtgtacatcttatgtccagtttaaagaagatagccatccttttgatcttggactttacaatgaagctgtgaaaattatccatgacttccctcagttttatcctttagggattgtgcaacatgattgatcttgatggattttcatacgattgtaaatgagctatattaaagtctattaaaggaagcccttcttgtttgagggagagatttctgtgctttctcatatttaatttgctgtttttaagatattccaacctagagtttttgatggaactgatatattgacagttctcaccgaagtccttttataaagaattgctactccaatatatggtcagattagatgcaagaataaagcagttgtccgagtctaagtttctattttattaataaaaactaaaatggtacgtactatcggtcatttcattttcattcttttaatcatgtattcaagcacaaacttgaaatttcatagccataaggtcaagatttagacctaccaaataaaaccttgggccagctgtgttaaggatttgctcaccttttcccaaactataccttgataattatttccttgataccctacttacaaaatgaagtagatgacatt

SEQ ID NO: 175106 - DNA, 847 bp, Homo sapiens
  Payload ID: 14381
  Gene Symbol: RPA3
  Gene Name: replication protein A3, 14kDa
  Uniprot ID: P35244
  ENST ID: ENST00000396682
  CDS Start-End: 414-779
gggaaggcgagacagcagtgaacagctggtacgcagcacccacagcaccgcggcagcagctagtgccgactcccgcctagctcttttgactctgttcgcgggaagaatggggaaacagtaaggttgcggcgcctcccgcgagacgaggtacctgaggctggccccgcagtcccccgccgcaccagcaccggagcttcacaccccacttccggggtcaagtcaccgccgggaatcctgtgatcgcagaaagagacagcgcgattgcgatttaggtttccgcgcatttaattggcgaagctggagcgctagtcttcgctgattggtgccgagaaatctgccccatagacacccgcggggcgcacagtttcagtcgtccgtgggtttcccgccagccgcagtcttggaccataatcatggtggacatgatggacttgcccaggtcgcgcatcaacgccggcatgctagctcaattcatcgacaagcctgtctgcttcgtagggaggctggaaaagattcatcccaccggaaaaatgtttattctttcagatggagaaggaaaaaatggaaccatcgagttgatggaaccccttgatgaagaaatctctggaattgtggaagtggttggaagagtaaccgccaaggccaccatcttgtgtacatcttatgtccagtttaaagaagatagccatccttttgatcttggactttacaatgaagctgtgaaaattatccatgacttccctcagttttatcctttagggattgtgcaacatgattgatcttgatggattttcatacgattgtaaatgagctatattaaagtctattaaaggaagcccttcttgtt

SEQ ID NO: 175107 - DNA, 434 bp, Homo sapiens
  Payload ID: 14381
  Gene Symbol: RPA3
  Gene Name: replication protein A3, 14kDa
  ENST ID: ENST00000406109
  CDS Start-End: 113-361
gctggccccgcagtcccccgccgcaccagcaccggagcttcacaccccacttccggggtcaagtcaccgccgggaatcctgtgatcgcagaaagattcatcccaccggaaaaatgtttattctttcagatggagaaggaaaaaatggaaccatcgagttgatggaaccccttgatgaagaaatctctggaattgtggaagtggttggaagagtaaccgccaaggccaccatcttgtgtacatcttatgtccagtttaaagaagatagccatccttttgatcttggactttacaatgaagctgtgaaaattatccatgacttccctcagttttatcctttagggattgtgcaacatgattgatcttgatggattttcatacgattgtaaatgagctatattaaagtctattaaaggaagcccttcttgtttgagg

SEQ ID NO: 175108 - DNA, 414 bp, Homo sapiens
  Payload ID: 14381
  Gene Symbol: RPA3
  Gene Name: replication protein A3, 14kDa
  ENST ID: ENST00000401447
  CDS Start-End: 141-389
ccttcagatttcttagtttactcagacgtgacggacgcagacaaaactaatctgctggtttccttctcttctgaaattacttatttttgcaaacctcgtttcctcgttgtgatcgcttctctattcatcccaccggaaaaatgtttattctttcagatggagaaggaaaaaatggaaccatcgagttgatggaaccccttgatgaagaaatctctggaattgtggaagtggttggaagagtaaccgccaaggccaccatcttgtgtacatcttatgtccagtttaaagaagatagccatccttttgatcttggactttacaatgaagctgtgaaaattatccatgacttccctcagttttatcctttagggattgtgcaacatgattgatcttgatggattttcatacgattgt

SEQ ID NO: 175109 - DNA, 1560 bp, Homo sapiens
  Payload ID: 14382
  Gene Symbol: RPA4
  Gene Name: replication protein A4, 30kDa
  Uniprot ID: Q13156
  ENST ID: ENST00000373040
  CDS Start-End: 404-1189
ctagtaaaaatgcatttttatagagatgttgggaaaggcttgcttgaaattacacgtgggacttttaatagataggcgctttgaccagctaagcaacagggctcccctcgtgtgggacttttagaatgtagcaaccactgacacacagggaaggattatgcgatcaggtgagaaggtggccgaccctgactggctggaagcagatgcattctggtagttgattggtccacaggtagcgtgacgcttgtcacgtcctcagcctcccagcattcaatcgtagcctttcggacagctcgaagccttctgtggagagctcgaagccttctgtggagaactcaaagccgtccgtggagccccagacgagccaaagcccaccttctcctcagcctgagctgtcttgaagatgagtaagagtgggtttgggagctatggcagcatttctgctgctgatggagcgagtggaggcagtgaccaactgtgtgagagagatgcaactcctgctattaagacccaaagacctaaggtccgaattcaggacgttgtaccgtgtaatgtgaaccagcttctcagctctactgtgtttgaccctgtgttcaaggttaggggaattatagtttcccaggtctccatcgtgggggtaatcagaggggcagagaaggcttcaaatcacatttgttacaaaattgatgatatgaccgcgaaaccaatcgaggcccgacagtggtttggtagagagaaagtcaagcaggtgactccattgtcagtcggagtatatgtcaaagtgtttggtatcctcaaatgtcccacgggaacaaagagccttgaggtattgaaaattcatgtcctagaggacatgaacgagttcaccgtgcatattctggaaacggtcaatgcacacatgatgctggataaagcccgtcgtgataccactgtagaaagtgtgcctgtgtctccatcagaagtgaatgatgctggggataacgatgagagtcaccgcaatttcatccaggacgaagtgctgcgtttgattcatgagtgtcctcatcaggaagggaagagcatccatgagctccgggctcagctctgcgaccttagcgtcaaggccatcaaggaagcgattgattatctgaccgttgagggccacatctatcccactgtggatcgggagcattttaagtctgctgattgaggcagggaaaacatcctttcatttttcgaagacccttgcatccagctgtgagtaattttgacctgttgactttttaggaagtaggactaaaaaaaaaaatctcaagtggcattctttgtcaactcgctgcttttctaactgctttgaacttttcggattttctgtatttgaagctcagagagagacggtgatggataaattgacaactctgtaggatttactagcaagctaatggaaacatgattttcggggaagaaaaactacagaaaatgtagaaatttattatttaattgtgttggagcttctttttccaaaagaaaaactagttgcagtcagggagccagcgaaaagacaaaaaaaaaaaaaaaaaa

SEQ ID NO: 175110 - DNA, 1745 bp, Homo sapiens
  Payload ID: 14383
  Gene Symbol: RTFDC1
  Gene Name: replication termination factor 2 domain containing 1
  ENST ID: ENST00000023939
  CDS Start-End: 114-1124
acgaccagcgtgctgcgtcacggcggtgcgccggaagtggctgcggatttcgccggaaatcccggaagtgacagctttgggggtttgctgctggctctgactcccgtcctgcgatgggttgcgacgggggaacaatccccaagaggcatgaactggtgaaggggccgaagaaggttgagaagatttggcatttgaagaatgggaaagagtggtgcagtctacacagtgaaggaaaaaacaagaacgggaaggagtgggacatggaatatgatgtcgacaaagatgctgaattagtggcccaatggaactattgtactctaagtcaggaaatattaagacgaccaatagttgcctgtgaacttggcagactttataacaaagatgccgtcattgaatttctcttggacaaatctgcagaaaaggctcttgggaaggcagcatctcacattaaaagcattaagaatgtgacagagctgaagctttctgataatcctgcctgggaaggggataaaggaaacactaaaggtgacaagcacgatgacctccagcgggcgcgtttcatctgccccgttgtgggcctggagatgaacggccgacacaggttctgcttccttcggtgctgcggctgtgtgttttctgagcgagccttgaaagagataaaagcggaagtttgccacacgtgtggggctgccttccaggaggatgatgtcatcatgctcaatggcaccaaggaggatgtggacgtgctgaagacaaggatggaggagagaaggctgagagcgaagctggaaaagaaaacaaagaaacccaaggcagcagagtctgtttcaaaaccagatgtcagtgaagaagccccagggccatcaaaagttaagacagggaagcctgaagaagccagccttgattctagagagaagaaaaccaacttggctcccaaaagcacagcaatgaatgagagctcttctggaaaagctgggaagcctccgtgtggagccacaaagaggtccatcgctgacagtgaagaatcggaggcctacaagtccctctttaccactcacagctccgccaagcgctccaaggaggagtctgcccactgggtcacccacacgtcctactgcttctgaagcccgcactgccaccgctcctgccccagaaggttgtttagtttccacgtaggcaggtcgctttgtgcctctgagtgcgctgctgtgtgttctctctatagttctgtgtcataaagctgtcctggccagccttcaagctggtgtggccactcttgatgtgaggcgtgtcggttccaggggggacatgggaggggctgcacagtggcccgaggtcatgcttgcttccacctgcaggtgcatttggtcctttccatggccaggaagccctgtgggctgcactttttatgcttgcagtaacaagagactccagagtcctcaccggtgcagagttggcacatattaattaactaaaattctaatgatcttgctaccagcaataaatcaagtaggccaagtgaaactgggctttaaaaaggatggatttcaaatacactgtgcccactagaagcttcgaagggcctcgtccctctgctacagccctgggaggagccaggatccttgttggtctagctaaatactgttaggggagtgtgccccatctcatcatttcgaagatagcagagtcatagttgggcacccagtgattgggttcaaaaataaagctggtctgcctcttctctc

SEQ ID NO: 175111 - DNA, 2212 bp, Homo sapiens
  Payload ID: 14383
  Gene Symbol: RTFDC1
  Gene Name: replication termination factor 2 domain containing 1
  Uniprot ID: Q9BY42
  ENST ID: ENST00000357348
  CDS Start-End: 108-1028
agcgtgctgcgtcacggcggtgcgccggaagtggctgcggatttcgccggaaatcccggaagtgacagctttgggggtttgctgctggctctgactcccgtcctgcgatgggttgcgacgggggaacaatccccaagaggcatgaactggtgaaggggccgaagaaggttgagaaggtcgacaaagatgctgaattagtggcccaatggaactattgtactctaagtcaggaaatattaagacgaccaatagttgcctgtgaacttggcagactttataacaaagatgccgtcattgaatttctcttggacaaatctgcagaaaaggctcttgggaaggcagcatctcacattaaaagcattaagaatgtgacagagctgaagctttctgataatcctgcctgggaaggggataaaggaaacactaaaggtgacaagcacgatgacctccagcgggcgcgtttcatctgccccgttgtgggcctggagatgaacggccgacacaggttctgcttccttcggtgctgcggctgtgtgttttctgagcgagccttgaaagagataaaagcggaagtttgccacacgtgtggggctgccttccaggaggatgatgtcatcatgctcaatggcaccaaggaggatgtggacgtgctgaagacaaggatggaggagagaaggctgagagcgaagctggaaaagaaaacaaagaaacccaaggcagcagagtctgtttcaaaaccagatgtcagtgaagaagccccagggccatcaaaagttaagacagggaagcctgaagaagccagccttgattctagagagaagaaaaccaacttggctcccaaaagcacagcaatgaatgagagctcttctggaaaagctgggaagcctccgtgtggagccacaaagaggtccatcgctgacagtgaagaatcggaggcctacaagtccctctttaccactcacagctccgccaagcgctccaaggaggagtctgcccactgggtcacccacacgtcctactgcttctgaagcccgcactgccaccgctcctgccccagaaggttgtttagtttccacgtaggcaggtcgctttgtgcctctgagtgcgctgctgtgtgttctctctatagttctgtgtcataaagctgtcctggccagccttcaagctggtgtggccactcttgatgtgaggcgtgtcggttccaggggggacatgggaggggctgcacagtggcccgaggtcatgcttgcttccacctgcaggtgcatttggtcctttccatggccaggaagccctgtgggctgcactttttatgcttgcagtaacaagagactccagagtcctcaccggtgcagagttggcacatattaattaactaaaattctaatgatcttgctaccagcaataaatcaagtaggccaagtgaaactgggctttaaaaaggatggatttcaaatacactgtgcccactagaagcttcgaagggcctcgtccctctgctacagccctgggaggagccaggatccttgttggtctagctaaatactgttaggggagtgtgccccatctcatcatttcgaagatagcagagtcatagttgggcacccagtgattgggttcaaaaataaagctggtctgcctcttctctcctctgtgtttttatcttttctaccttctgctcatgcttgggtaagaacattgcagccgttgcattggtgattacaggagtcattccatgaagtcagaagaacccacccttctctcctccagcagatggtaaagggagaatcgtacccaaaaagaggtgcattttatctgcctataagttgtgttgacgtcaatagctagtgaaacttctcatgagactcctaatgaagaaccaagagccacaggcctctgcgtggctttctgcacacggtggtatgactgagatagtgactggttctctatacagaccccggggccctgggtttccttcagaagcagaaggagctgtgggaggtgaatggtgggaggtgaacaggcaggttctgtgggagacacagacacgtgggcagaactccagggagaggccagcaagggagaaccatgtgtggccctgctttttctcaaaccctgtgtggttcccggcttcacagttgatgggaaggtttggccccaaggatattttgacattgtgagtatagagcattttaataaaaattaagtgatg

SEQ ID NO: 175112 - DNA, 1572 bp, Homo sapiens
  Payload ID: 14383
  Gene Symbol: RTFDC1
  Gene Name: replication termination factor 2 domain containing 1
  ENST ID: ENST00000395881
  CDS Start-End: 85-777
gccggaagtggctgcggatttcgccggaaatcccggaagtgacagctttgggggtttgctgctggctctgactcccgtcctgcgatgggttgcgacgggggaacaatccccaagaggcatgaactggtgaaggggccgaagaaggttgagaaggtcgacaaagatgctgaattagtggcccaatggaactattgtactctaagtcaggaaatattaagacgaccaatagttgcctgtgaacttggcagactttataacaaagatgccgtcattgaatttctcttggacaaatctgcagaaaaggctcttgggaaggcagcatctcacattaaaagcattaagaatgtgacagagctgaagctttctgataatcctgcctgggaaggggataaaggaaacactaaaggtgacaagcacgatgacctccagcgggcgcgtttcatctgccccgttgtgggcctggagatgaacggccgacacaggttctgcttccttcggtgctgcggctgtgtgttttctgagcgagccttgaaagagataaaagcggaagtttgccacacgtgtggggctgccttccaggaggatgatgtcatcatgctcaatggcaccaaggaggatgtggacgtgctgaagacaaggatggaggagagaaggctgagagcgaagctggaaaagaagccccagggccatcaaaagttaagacagggaagcctgaagaagccagccttgattctagagagaagaaaaccaacttggctcccaaaagcacagcaatgaatgagagctcttctggaaaagctgggaagcctccgtgtggagccacaaagaggtccatcgctgacagtgaagaatcggaggcctacaagtccctctttaccactcacagctccgccaagcgctccaaggaggagtctgcccactgggtcacccacacgtcctactgcttctgaagcccgcactgccaccgctcctgccccagaaggttgtttagtttccacgtaggcaggtcgctttgtgcctctgagtgcgctgctgtgtgttctctctatagttctgtgtcataaagctgtcctggccagccttcaagctggtgtggccactcttgatgtgaggcgtgtcggttccaggggggacatgggaggggctgcacagtggcccgaggtcatgcttgcttccacctgcaggtgcatttggtcctttccatggccaggaagccctgtgggctgcactttttatgcttgcagtaacaagagactccagagtcctcaccggtgcagagttggcacatattaattaactaaaattctaatgatcttgctaccagcaataaatcaagtaggccaagtgaaactgggctttaaaaaggatggatttcaaatacactgtgcccactagaagcttcgaagggcctcgtccctctgctacagccctgggaggagccaggatccttgttggtctagctaaatactgttaggggagtgtgccccatctcatcatttcgaagatagcagagtcatagttgggcacccagtgattgggttcaaaaataaagctggtctgcctcttctctcc

SEQ ID NO: 175113 - DNA, 852 bp, Homo sapiens
  Payload ID: 14383
  Gene Symbol: RTFDC1
  Gene Name: replication termination factor 2 domain containing 1
  ENST ID: ENST00000449062
  CDS Start-End: 21-852
gctctgactcccgtcctgcgatgggttgcgacgggggaacaatccccaagaggcatgaactggtgaaggggccgaagaaggttgagaagatttggcatttgaagaatgggaaagagtggtgcagtctacacagtgaaggaaaaaacaagaacgggaaggagtgggacatggaatatgatgtcgacaaagatgctgaattagtggcccaatggaactattgtactctaagtcaggaaatattaagacgaccaatagttgcctgtgaacttggcagactttataacaaagatgccgtcattgaatttctcttggacaaatctgcagaaaaggctcttgggaaggcagcatctcacattaaaagcattaagaatgtgacagagctgaagctttctgataatcctgcctgggaaggggataaaggaaacactaaaggtgacaagcacgatgacctccagcgggcgcgtttcatctgccccgttgtgggcctggagatgaacggccgacacaggttctgcttccttcggtgctgcggctgtgtgttttctgagcgagccttgaaagagataaaagcggaagtttgccacacgtgtggggctgccttccaggaggatgatgtcatcatgctcaatggcaccaaggaggatgtggacgtgctgaagacaaggatggaggagagaaggctgagagcgaagctggaaaagaaaacaaagaaacccaaggcagcagagtctgtttcaaaaccagatgtcagtgaagaagccccagggccatcaaaagttaagacagggaagcctgaagaagccagccttgattctagagagaagaaaaccaacttggctcccaaaagcacag

SEQ ID NO: 175114 - DNA, 15003 bp, Homo sapiens
  Payload ID: 14384
  Gene Symbol: RIF1
  Gene Name: replication timing regulatory factor 1
  Uniprot ID: Q5UIP0
  ENST ID: ENST00000243326
  CDS Start-End: 484-7902
tgagtaaacagccggagctgggaaagtcgagctctggcagcgtctgggtgctgaggggcagaggcggagagaaccctgtcctgatcttcctaggtgggataaatatcggggtgacagtggtaggccgcggggaaccctcagtctgcccaccctccgccccctcgcggcgagatgcctcgttccccgggcttctcccgccctccgccgatctcctccctctgttgaaagctgcccgggaaagtggtggcgggagcgggcccaggcccgaatgtggcgtgggctcaggtgtctggtgtcgggcgccggaggaggttcgcgctggggtttggtgattcggaggcctggggtgcagacgcggcgtggctgtgaggcccgggcgggcgtgcgggtgtgagggccggactcacactgggccgccgcggggctgtttccatcggtcactggattttctcctcttccggttcgggcctcagggtggccgacatgacggccaggggtcagagccccctcgcgccgctgttggagactttggaagacccttctgcctcccatggagggcagactgacgcttacctgactctgaccagtcgtatgactggagaagaaggaaaagaagtaattacagaaattgagaaaaaacttcctcggctgtacaaagttttaaagactcacatttccagtcaaaactcggagctgagtagtgctgctctacaagccctggggttttgcttatataatcccaaaattacctcagaattatcagaggcaaatgctctagaattgctttcaaaattgaatgataccattaagaattcagacaaaaatgtacgtactagagcactttgggtgatatctaagcagacatttccctctgaagtggttggcaaaatggtatccagtataattgattcattagaaatactgtttaacaaaggagagacgcattctgctgttgttgattttgaagcattaaatgttatcgtaaggctaattgaacaagccccaattcaaatgggagaagaggcagtgaggtgggcaaaactggtcatacctttagtggttcattcagcacaaaaggtacatttgcggggagcaactgctctggagatgggaatgccattattgcttcagaaacagcaagaaatagcatctattacggagcagcttatgactactaaattaatctcagaacttcagaagctatttatgagtaaaaatgagacttacgtgttaaaattatggcctttgtttgtcaaactacttggaaggaccttgcatcgaagtgggagtttcatcaattctctcttgcaactagaagaacttggatttcgtagtggagcacccatgattaaaaagatagcttttattgcttggaagagtttaatagataattttgctttaaatccagatatactatgtagtgcaaaaagactcaagttgttaatgcagcctttgagttccatccatgtgagaacagaaactctagcattaacaaaactagaagtctggtggtatttactgatgagacttggacctcatcttcctgctaattttgaacaggtttgtgtgcctctgattcaaagtacaataagcattgattctaatgcctcacctcagggcaattcgtgtcatgtagctacatctccaggtttaaatcctatgactcctgtacacaaaggtgcttcctccccgtacggagccccgggaactccccgaatgaacctgagttcgaatttaggtggaatggccacaatcccatccattcaacttttgggacttgaaatgttgcttcatttcttgttgggtccagaagccttgagttttgctaagcaaaataaacttgtgctgagcttagagccattggaacatccgttaatcagcagcccttcctttttttccaaacatgcaaatacacttatcactgctgttcatgatagctttgttgcagttggaaaagatgcccccgatgtggttgtcagtgctatctggaaggagctaattagcttggtgaagtcagttactgaatcaggtaacaaaaaagagaaaccaggttctgaagttttgactctcttattaaagtctttggaaagcatagtaaagtctgaagtatttcctgtatcaaaaacgctggtcctcatggaaattacaattaaaggacttcctcagaaagtattaggttcaccagcatatcaggttgctaatatggatattcttaatggaactccagctttgttcttaattcaattaattttcaacaatttcttggaatgtggtgtatcagatgaaaggttctttctcagtttggaatcacttgtaggctgtgttctttctggtccaacttcaccactagctttcagtgactcagttttaaatgttattaatcaaaatgcaaagcagttggaaaataaggagcatctctggaaaatgtggagtgttatagtcaccccattaactgaattgattaatcagaccaatgaagtaaatcaaggtgatgccttagaacataattttagtgccatctatggtgcattgactttaccagtaaaccacattttttcagaacagagatttccagtggccaccatgaagactttgcttagaacttggtcagaattatatagagcatttgctcgttgtgctgctttggtggcaacagcagaagagaacttgtgctgtgaggaactttcttccaagataatgtccagtttggaagatgaaggcttttctaatttgttgttcgtggatagaattatttatattattactgtaatggttgattgcattgacttctcaccatataatattaaatatcagcccaaagttaaatcaccacagagaccttcagattggtccaaaaagaagaatgagcccctagggaaattgacttctttatttaaacttattgtgaaagtgatctattctttccacacactgagcttcaaggaagcacattctgataccctcttcactattggcaactcaatcaccggcattatttccagtgtacttgggcatatttctttgccttctatgatccgaaaaatatttgcaactttaacaagacctctggcattattttatgaaaactcaaagcttgatgaagttcctaaagtatatagttgtctgaacaacaagttagaaaagctactgggagaaattattgcttgtctgcaattcagctacaccggaacttatgatagtgaacttcttgaacaactctccccactattatgcataatatttctgcacaagaataaacagattcgaaaacagagtgctcagttctggaatgccacttttgccaaagtgatgatgttggtttatcctgaagagttaaaaccagtactaacacaagccaaacaaaaatttctgctcctgttgcctggtttggaaactgttgaaatgatggaggaatccagtggaccatattctgatggaacagaaaattcacaactaaatgtgaagataagtggcatggagagaaaatcaaatggaaaaagagattcatttttggcacaaacaaagaataaaaaagaaaatatgaaaccagcagccaaactgaaacttgaatcttcgtctttaaaagtaaagggtgaaattcttttggaagaggaaaagtctactgactttgtgtttatacctccagaaggaaaagatgcaaaggaaagaatattaactgatcatcaaaaagaagttctcaaaacaaagcggtgtgatattcctgccatgtataataatctggatgtttcccaagataccttatttactcagtatagtcaggaagagcctatggaaattcctactttaaccagaaaaccaaaggaggattctaagatgatgattacggaggagcaaatggacagtgacattgtcattcctcaagatgtcacggaagactgtggtatggctgaacatcttgaaaagtcctccctttcgaataatgagtgtggttctcttgacaaaaccagtccagaaatgtcaaacagtaataatgatgaaagaaaaaaagctttaatttcatcaaggaaaacatcaactgaatgtgcatctagtacagaaaattctttcgttgtcagcagtagttcagtttctaataccactgttgctggaactcccccataccctacaagtcggaggcaaacctttattactttggagaagtttgatggttcagaaaatagaccttttagtccatcccccttgaataatatttcatcaactgttacagtgaaaaataaccaggaaaccatgattaaaacagattttctaccaaaagcaaagcaaagagaagggactttttcaaaatctgattctgaaaaaatagtgaatggaactaagagatcaagccggagagctggtaaagctgaacaaacagggaataaaaggtctaagcccttaatgagatctgagccggagaaaaatactgaggaatctgttgaaggcattgtagtcttagaaaataacccacctggtttgcttaatcaaacagaatgtgtgtcagataatcaggttcatctttctgaatctacaatggagcatgacaatacaaagcttaaagcagcaacagtggaaaatgctgtattattggaaactaatactgtagaggagaaaaatgtagaaattaatttggaatccaaagagaatacacccccagtagtaatatcagcagatcaaatggtaaatgaggatagtcaggttcagataactccaaatcagaaaacccttagacggtcttcaaggcgacgttcagaagtagtagagtctaccactgaaagccaagataaggaaaatagtcatcaaaaaaaggaacgacgtaaggaagaagaaaaacctcttcagaagagtccattgcatataaaagatgatgtgttacctaaacaaaaactgattgctgaacaaactctacaggagaatttaattgagaaaggaagtaatttacatgagaagactcttggggaaactagtgctaatgcagaaactgaacaaaataaaaaaaaggcagaccctgagaacattaagtctgagggggatggtacccaggacattgtagataagtcctctgagaaactagtcagaggccgaacacggtatcaaactagaagagcatctcagggtttgctttccagcattgaaaactcagaatctgatagttcggaggcaaaagaagaaggttctaggaagaagagatctggaaaatggaaaaacaaaagcaatgaaagtgttgacattcaagatcaagaagagaaagtggtgaaacaggaatgtataaaagctgaaaatcagtcacatgattataaagcaacttctgaagaagatgtaagcataaaatctccgatttgcgaaaaacaagatgaaagtaatactgtaatatgtcaggattctacagtaacttcagatttgttgcaagttcctgatgatttaccaaatgtgtgtgaggaaaaaaatgaaactagcaaatatgcagaatattcctttacaagtctacctgtgccagaatcaaatctaaggactagaaatgccattaagagattacataagcgagactcttttgataattgtagtttgggagaatcctcaaaaatagggatatcagatatttcttcgctttcagaaaaaacttttcaaacacttgaatgccaacacaagagaagtaggagggtgaggagatctaaaggttgtgattgctgtggggaaaaatcacaacctcaggaaaagtcactcattgggttaaagaatacagaaaataatgacgtagagattagtgaaacaaaaaaggcagatgtgcaagcacctgtaagcccatcagaaacttctcaagctaatccatattctgaaggacaatttttagatgaacatcatagtgtgaattttcatttgggtctcaaagaggataatgatactattaatgattcattaattgtttctgaaaccaaatcaaaagaaaacactatgcaagaatctcttccttctggaatagtaaactttagagaggaaatttgtgatatggattctagtgaagcaatgtctcttgaaagccaggagtcacctaatgaaaattttaaaactgttggcccgtgtttaggagactcgaaaaatgtttcacaggaatctttggagacaaaagaagaaaaaccagaagaaaccccaaaaatggaactgagtctagagaatgttactgttgaaggaaatgcatgtaaagtaacagaatccaatctagagaaagcaaaaactatggaattgaatgtaggaaatgaagctagctttcatggacaagagagaaccaaaactggtatttctgaagaagcagcaatagaagaaaataaaagaaatgatgactctgaagcagacacagctaaactgaatgccaaagaagtagcaactgaggaatttaattcagatattagtctttctgataatactacacctgtaaaattgaatgctcaaactgagatttctgaacaaacagcagctggggaactagatggaggaaatgatgtatctgatctacactcatctgaagaaacgaataccaaaatgaaaaataatgaagaaatgatgatcggcgaggcaatggctgaaactggccatgatggtgaaacagagaatgagggcataactaccaaaacctcaaagcctgatgaagctgaaacaaacatgttgactgcagaaatggacaactttgtttgtgacacagttgaaatgagcactgaagaaggaatcattgacgctaataaaactgaaacaaatactgagtatagtaaatctgaagaaaaattagataacaatcaaatggtaatggaaagtgatattttacaggaagatcaccatacttcacagaaagtggaggaaccatcacagtgtctggcatctggaacagctatctctgagctaataatagaagacaataatgcatctcctcaaaaactaagggaacttgatccttcacttgtgtcagcaaatgacagtcctagtggcatgcagacacgctgtgtctggtctcctttggcttctccgtctacgagcattttaaagagaggactaaaaagatcccaagaagatgaaatctcatcacctgttaataaggttcgccgtgtctcctttgcagatccaatataccaagcaggattggcagatgacattgatagacggtgctctattgttaggtcccattcttccaatagttctcccataggaaaaagtgttaaaacttctcctactacacaatctaagcataataccacttcagccaaaggatttctgtccccaggatcacgtagccctaaatttaagagctcaaagaagtgtttaatttcagaaatggccaaagaatccataccatgcccaacagaaagtgtttacccaccattggtgaactgtgtggcaccagttgacatcattttacctcagattacatcaaacatgtgggcaagaggcctgggacaactcattagagctaagaatataaaaactattggtgatttgagtactcttacagcatctgaaataaaaactcttcctatccgttctccaaaagtgtccaatgtaaaaaaggctctcagaatatatcatgagcagcaggtgaagactcgtggactagaagagattccagtttttgatatttctgaaaaaacagtaaatggaatagaaaataaatctttgtcacctgatgaagaaagacttgtctcagatataattgatcctgttgctttagaaattccattatccaaaaaccttctggcacagattagtgctcttgctcttcagctggattcagaagatcttcataattattcaggaagccaactatttgaaatgcacgagaaactaagttgtatggcaaactctgtaataaaaaatctacagtcacgttggagatcaccatcccatgaaaattctatttagtattttcagagaaaattgaaggtttttttaaacatcactggatttcttgattgaggaaacaagttctgaaataatagcacaatttcaaagaagagactctttgcaaagttgataacatttcaaaccctgaaggacagtgacttattatgtaagttcaattttgtaagttcattatgtaagatccttttttttttcataatatgtattcttggctgctatgcgtggtttttcaggaaatttaattatcttactgagatgtgaaagcaaaactagtaacagaacttacattttatttcatgctttcttaaacccgtgcatattctggtgaaacatgtaaaatactttaagtaaaattgaacatttttatttgaatttttgctgaactgataaaggtgtttatatttttgtttgttggtttgtttaattcatgtttgttgggactgaggtttaggaagtttgttactggttaaaaacctcaaatgaaatgcgaaagaatttgaatttttcctgcatatgtcaactttggacagctttcaagaaaaatgagaaaagtttcaacttctggcggttaaaatattaatgcagaatttactaagattttattcatttgcattagcaaatattcatgcagcagcagttgactgaaaatttattcttatgagacgtatagtattcatttttaaatgcatgattgtacattatgtatagacgacaatgtttttaatttataaatttcattctttgttaattgcatgggtttttctgcagcttattgtgaataccttggttctgttcaatagaaacattttgtatatattaaatactgaaatatcagtatcgacggtggaagtgcttcatgggcttgctgcacatatttgtaggatactgtatctgcaaatgcaacaacaaatagttttgtacttggttaacagtcttagttaaaacatgagtttattttctaaaagtatccagaataagtaaaattatagaaataagaaaatgttacacaactttgctgttcatacccttaccttcttactacttttggtttggaggagggtatcaccactagaaagtgtgcctccttaagatttcttaaaggaaagttagtttcagtatttcacagcaagttggactacaaaatctagagttgatctgctttttaaaccttcatttaaaagcaaacttggaagaaatttgaaactgatgtttttaatatatgtctgtgttgcctaggttttctttttttaaagaggtatgtaattaaaacctttgtaaaatttgccaactaatattagtgcctgacttcccatatttgtttcatctttttaactgacagtatatctcacttcttctttgaatagaatgagtgagtgatctcagttttcacattttattcagaagctaatccctacttagcaaggcacacattctacagcaagtcatagaaagtttaatccttgtgcctccttagctctcgtatattcagggatctctataaaagttggtgtcttttttcatcatcataaattcatcataatcacagatatttttgggtctaagatattcatataccaaggatggttttgtaaagaattctgggatcattgaattaaggattgtggcttgaagtaactaaagaaaaatactaatttccttaaaaggaattataattatgatttacattttacatcattaatttcccaaattatatttaaccgtaaggaggtgcacatgagtttttagcaaacaggtatgaataagcagctatgtatatgtgtttggggcagaggggagcagattactttaacacacttcagaattaaaatcagttcgtttcatgactctgtgccttaacgtttgtgtgaactaaacttgctgattgaatgaaattcttgggaagccgaacagtaatagcagaaaatgtgaccaaatgagtatcatgtacttaaatcactgaattttatataagcacaagtattaattttaaaaacattatagtttaataaagctgcatttaaaaatatttgggagcaaagacaagcatgctaaatcttcattttgctatggctataagcatatatttttggcaacttatttgcaatattcttgccttaaagtttcctgcaaatttcccccttagtaattcccgaatagcaaaacattaatattccatgattagctctactgtgttgtctcactattaaaatggaattcgttttttcagatcttttctaatggttaataaaacaaatgtcagatcataataacactcaaatgtgtcttaattgtcttatgcatatttaagaagaaaaaactagtggcatacaggattgtcatgtagtatctttttttttttttgagacacagtcttgctctgttgcctatgctggagtgcaatggtgcgatctcggttcactgcaagctctgcctcccaggtttacaccattctcctgcctcagcctcccaagtagctgggactacaggtgcccgccaccatgcccggctaattttttatatttttagtagagaaggggttcactgtgttagccaggatggtcttgatctgacctcgtgatccgcctgcctcggcctcccaaagtgctgggattacaggcgtgagccaccccacctggccattttcttttttttttgaggtggagttttcgcccttgctgcccaggctggagtgcagtggtacgatctcagctcactgcaacctccacctcctgggttcaagcgattctcctgcctcagcctcccaaatagctgggattacaggtgcctgccaccaccactggttaatttttgtatttttagtagatacggggtttcaccatgtcagccaggctggtctcaaacttctgacctcagatatccacctgcctcagcctcctaaaatggtggcattacaggcgtgagccaccgctcctggcccatcatttccatatctatgaaatctattttggattttagagtggatttaaattttcaatatttcagtgacctcattgttaaagctgctttgccacttgtacaagtttgaaaaccattgttgaatcatatggagctttactctaattccaaatagttaaaggatgaatcaggttaaataatgctgttggataatacaggcaaaaacaggatttaaacccgcacattaaaagcatgactgaaggcccggcaggtggatcactttggcccaggagttcaaaactgacctgaacaatgtggcgaaatcctgtctctactaaaaatacaaaaaccagccaggcatgttggcgcatacttgtaatctcagctactcaggaggctgagacatgagaattgcttgaaccttttaggcggaggttgcagtgagccgagatcatgccattgcgcgacagagcaagtctctgtctcgcaaaaaaaaaaaaaaagtttaattctaacattgcccatggatttttttttttctgtacagcttgaagataagatagttaaagactctgttacaatttaaacatcataaaaatgtgaagagtaagtggtgaggcaagaaacaaaattgggggaaatggtggggatcgtgaatatataagtgaagttttatttttttaaggtgtaaaggagtgagaatagagtaattgctttttaaaaagaaagtataaatgggttaatttttttcttccaactttgactttaattcagtaagaaaggcctaggtttcatctcatattcttcataattgattttcaagaagttaatttgtcattcagcctaggaggctataaaacagcagttagttggcattattagactaaaacttgggtggggggaggagactgtttcctcattgctgcaacccatggtctatcctattcctaagccattagaaagaccttgtactttgtatagaaacattagagtgaggttttgatttttaacatagtactctcaaactttgatgtgcatatgaacaagtggattctgattcagtagatctgcattgggccccgtgagtctttttaaacacagtcccaggtgattcatgcagatgcctgtgaactgcgctggtagatgggcctaagaggcttcaggctgtgttttaggttttggtaagccaggcagattcaagtccttttataactgtcaattttgtgaattggggatgcagactggttttgaaggcttaaagttcaaaaattataagaaagttaagaattttgcttaagagccttttaaaaatatggacgatttattttttaagtaggcagactaagaatttcaagttataaagaatcttattgataaggcaaagtagacaaagtattttctcatgagtatttgtgggttatgtttttgttaatataaaagttgatttctaagtattagaatatatttagtctctaaataaatcttgccttctattatggatcatcgttattaataaacatggaaaatcaacactacccctaatattaatctggcagttaaatttagtagtgctataatgaataagtcagtctagcagatatgccctgtcattatactgcggacctctggtcacttaattttctgttatattatgtggttgaaaattcctgtttcatcgtaaagtgaaatttgaaagatggagttgaataatatgattctcgaaaagtgagtttttcttggaattctgttaaggtgttagattttcctcacatatttaaataatctgtaagaactaccctgaaagcactaaggaaaatgtagccgaaagttaagtaataggttttaaaaatttatcaaaatttattgatagtttgatctgtaaaacaaattgggtttcgtgctttctgatgtccagttaataagtatattatgtgccaggctttacatattgctctttgcaagtagccgttaaagtgtaagtcattgaagtttgaagatctataaatatttaatatagtagtctaaacagttgtgagaatttactcagttctgaaatagaatgttaaattttccgatgtggtcctaatcatttttttctttacatactaagccttcctttctccaaagaacagttaaaaccaaatgtgttatggtaagctgtaaataccgttggaataaaagataaccgttcatcttacctaaaaaattgaagacaatattttccattgttgatgtcacaagtaagaaaaaaactctaacttttgtactctacttgtagcagagggaatatttttggccacagtgtgccaatttataattgtagataaagctgaatttactgggcagcaagcttatatgctgatagaagttgatgcactgagaagtgatgagttgaagagaatggaaaaggcagattgagctggaattttaatgcatagtacatttagtagagagacaagctgtcctatatactcctgtatacttcagaaatagctgatagcctatagtctctgagagctattctgtacatagcacagtattataattgatgttcataaataccctgagagattatgttaaaatacattattaatactcccacaaaagcagtaagttaataagtatttccaacaaaaggcagctttgtttcttaaacggataaacaacatataactaggaagatcatcttcaaaataaagtgtcatggaactgaaaatagagtatagtctaacaattattttgatacactattgaatagctaacaagtgtctaaagaattttttatttttatagaataggaagtttctaaaagaaaacaattaagagcaaaattggttttgagtatagaaactgaaggatggcagtcttaactcctaagttttttacagagcacagattggtaaactagcatgccacctgttttttgtactatctgtgagctgagactggtttttacattttttaatggtgaaaaaagtcaaaagaaggacattttgtgacacatgaaaacatattaaattaaaatttcagtatccagaaataaagttttattggaacagctgtgcttattgtctttagctgctttcctggtacagtggctgagtttagtagtatagcagagtctgtatggcttccaacagtcaaaatactgcctggccttttaaagagtttgtcaatcccttttatggaggaaggttttgctcatgcatggcatgttagtcaatttagttatttgcttctagctggcagaatgtggtcttgattacttaatttctgttacccctgtgttttccagaatggcttctcctgattttacttacgtgttttactattgctcaaattacagatactaggaaacactactactttataagtacacttctttttcctacttaaactctcaaactacagttacgtatttgccatgatgttaagggaccttgatggtctgtgaattatcagttgctttctgcactacctcctgtagatagacctgactgatagcacttacaaaaagactgatagatgccaaatcagtcatttattaaccctctaatattgttgtcccgatcatttggtaaacgctaagagagcttagttttacattcacaaagtatttgtatttgataagtcttaaaaatgatttaagttgaagcctaacagaagtacttgttcattcctcagttacctgcaaataatggaaataatggtgcagtcagttttatttgattgtgtaatgctttatactaggggtctcaaacccctgggtggcattagattcttacaggagcgtgaaccctattgtgaactgcacatgcaagagatctaggttgtgcgctcattatgagaatctaatacccgatgatctgaggtggaacagtctcatcctgaaaccatctaccccaacacctgtgtctgtggaaattgtctccacgaaaccggtccctgttgaaaaaaggttaggggaccactgctttatacagtgtttgaagtaggcacacttacagttactatttctggttctttatgactgttgagggggggcagaattctatgtttgattcacagtaaaacttttcatgaatcattgagggttaactgttatcacttgccaatggaaactggatattgaaacatttttttaagaaatgcacttttacctgaaataaaactataaaaactaaa

SEQ ID NO: 175115 - DNA, 7897 bp, Homo sapiens
  Payload ID: 14384
  Gene Symbol: RIF1
  Gene Name: replication timing regulatory factor 1
  Uniprot ID: Q5UIP0
  ENST ID: ENST00000444746
  CDS Start-End: 162-7580
cgcactcctgggcccgcccagccgccatcttggtctaggagggagcgcgccgcacgcgtgagtaaacagccggagctgggaaagtcgagctctggcagcgtctgggtgctgaggggcagaggcggagagaaccctgtcctgatcttcctagggtggccgacatgacggccaggggtcagagccccctcgcgccgctgttggagactttggaagacccttctgcctcccatggagggcagactgacgcttacctgactctgaccagtcgtatgactggagaagaaggaaaagaagtaattacagaaattgagaaaaaacttcctcggctgtacaaagttttaaagactcacatttccagtcaaaactcggagctgagtagtgctgctctacaagccctggggttttgcttatataatcccaaaattacctcagaattatcagaggcaaatgctctagaattgctttcaaaattgaatgataccattaagaattcagacaaaaatgtacgtactagagcactttgggtgatatctaagcagacatttccctctgaagtggttggcaaaatggtatccagtataattgattcattagaaatactgtttaacaaaggagagacgcattctgctgttgttgattttgaagcattaaatgttatcgtaaggctaattgaacaagccccaattcaaatgggagaagaggcagtgaggtgggcaaaactggtcatacctttagtggttcattcagcacaaaaggtacatttgcggggagcaactgctctggagatgggaatgccattattgcttcagaaacagcaagaaatagcatctattacggagcagcttatgactactaaattaatctcagaacttcagaagctatttatgagtaaaaatgagacttacgtgttaaaattatggcctttgtttgtcaaactacttggaaggaccttgcatcgaagtgggagtttcatcaattctctcttgcaactagaagaacttggatttcgtagtggagcacccatgattaaaaagatagcttttattgcttggaagagtttaatagataattttgctttaaatccagatatactatgtagtgcaaaaagactcaagttgttaatgcagcctttgagttccatccatgtgagaacagaaactctagcattaacaaaactagaagtctggtggtatttactgatgagacttggacctcatcttcctgctaattttgaacaggtttgtgtgcctctgattcaaagtacaataagcattgattctaatgcctcacctcagggcaattcgtgtcatgtagctacatctccaggtttaaatcctatgactcctgtacacaaaggtgcttcctccccgtacggagccccgggaactccccgaatgaacctgagttcgaatttaggtggaatggccacaatcccatccattcaacttttgggacttgaaatgttgcttcatttcttgttgggtccagaagccttgagttttgctaagcaaaataaacttgtgctgagcttagagccattggaacatccgttaatcagcagcccttcctttttttccaaacatgcaaatacacttatcactgctgttcatgatagctttgttgcagttggaaaagatgcccccgatgtggttgtcagtgctatctggaaggagctaattagcttggtgaagtcagttactgaatcaggtaacaaaaaagagaaaccaggttctgaagttttgactctcttattaaagtctttggaaagcatagtaaagtctgaagtatttcctgtatcaaaaacgctggtcctcatggaaattacaattaaaggacttcctcagaaagtattaggttcaccagcatatcaggttgctaatatggatattcttaatggaactccagctttgttcttaattcaattaattttcaacaatttcttggaatgtggtgtatcagatgaaaggttctttctcagtttggaatcacttgtaggctgtgttctttctggtccaacttcaccactagctttcagtgactcagttttaaatgttattaatcaaaatgcaaagcagttggaaaataaggagcatctctggaaaatgtggagtgttatagtcaccccattaactgaattgattaatcagaccaatgaagtaaatcaaggtgatgccttagaacataattttagtgccatctatggtgcattgactttaccagtaaaccacattttttcagaacagagatttccagtggccaccatgaagactttgcttagaacttggtcagaattatatagagcatttgctcgttgtgctgctttggtggcaacagcagaagagaacttgtgctgtgaggaactttcttccaagataatgtccagtttggaagatgaaggcttttctaatttgttgttcgtggatagaattatttatattattactgtaatggttgattgcattgacttctcaccatataatattaaatatcagcccaaagttaaatcaccacagagaccttcagattggtccaaaaagaagaatgagcccctagggaaattgacttctttatttaaacttattgtgaaagtgatctattctttccacacactgagcttcaaggaagcacattctgataccctcttcactattggcaactcaatcaccggcattatttccagtgtacttgggcatatttctttgccttctatgatccgaaaaatatttgcaactttaacaagacctctggcattattttatgaaaactcaaagcttgatgaagttcctaaagtatatagttgtctgaacaacaagttagaaaagctactgggagaaattattgcttgtctgcaattcagctacaccggaacttatgatagtgaacttcttgaacaactctccccactattatgcataatatttctgcacaagaataaacagattcgaaaacagagtgctcagttctggaatgccacttttgccaaagtgatgatgttggtttatcctgaagagttaaaaccagtactaacacaagccaaacaaaaatttctgctcctgttgcctggtttggaaactgttgaaatgatggaggaatccagtggaccatattctgatggaacagaaaattcacaactaaatgtgaagataagtggcatggagagaaaatcaaatggaaaaagagattcatttttggcacaaacaaagaataaaaaagaaaatatgaaaccagcagccaaactgaaacttgaatcttcgtctttaaaagtaaagggtgaaattcttttggaagaggaaaagtctactgactttgtgtttatacctccagaaggaaaagatgcaaaggaaagaatattaactgatcatcaaaaagaagttctcaaaacaaagcggtgtgatattcctgccatgtataataatctggatgtttcccaagataccttatttactcagtatagtcaggaagagcctatggaaattcctactttaaccagaaaaccaaaggaggattctaagatgatgattacggaggagcaaatggacagtgacattgtcattcctcaagatgtcacggaagactgtggtatggctgaacatcttgaaaagtcctccctttcgaataatgagtgtggttctcttgacaaaaccagtccagaaatgtcaaacagtaataatgatgaaagaaaaaaagctttaatttcatcaaggaaaacatcaactgaatgtgcatctagtacagaaaattctttcgttgtcagcagtagttcagtttctaataccactgttgctggaactcccccataccctacaagtcggaggcaaacctttattactttggagaagtttgatggttcagaaaatagaccttttagtccatcccccttgaataatatttcatcaactgttacagtgaaaaataaccaggaaaccatgattaaaacagattttctaccaaaagcaaagcaaagagaagggactttttcaaaatctgattctgaaaaaatagtgaatggaactaagagatcaagccggagagctggtaaagctgaacaaacagggaataaaaggtctaagcccttaatgagatctgagccggagaaaaatactgaggaatctgttgaaggcattgtagtcttagaaaataacccacctggtttgcttaatcaaacagaatgtgtgtcagataatcaggttcatctttctgaatctacaatggagcatgacaatacaaagcttaaagcagcaacagtggaaaatgctgtattattggaaactaatactgtagaggagaaaaatgtagaaattaatttggaatccaaagagaatacacccccagtagtaatatcagcagatcaaatggtaaatgaggatagtcaggttcagataactccaaatcagaaaacccttagacggtcttcaaggcgacgttcagaagtagtagagtctaccactgaaagccaagataaggaaaatagtcatcaaaaaaaggaacgacgtaaggaagaagaaaaacctcttcagaagagtccattgcatataaaagatgatgtgttacctaaacaaaaactgattgctgaacaaactctacaggagaatttaattgagaaaggaagtaatttacatgagaagactcttggggaaactagtgctaatgcagaaactgaacaaaataaaaaaaaggcagaccctgagaacattaagtctgagggggatggtacccaggacattgtagataagtcctctgagaaactagtcagaggccgaacacggtatcaaactagaagagcatctcagggtttgctttccagcattgaaaactcagaatctgatagttcggaggcaaaagaagaaggttctaggaagaagagatctggaaaatggaaaaacaaaagcaatgaaagtgttgacattcaagatcaagaagagaaagtggtgaaacaggaatgtataaaagctgaaaatcagtcacatgattataaagcaacttctgaagaagatgtaagcataaaatctccgatttgcgaaaaacaagatgaaagtaatactgtaatatgtcaggattctacagtaacttcagatttgttgcaagttcctgatgatttaccaaatgtgtgtgaggaaaaaaatgaaactagcaaatatgcagaatattcctttacaagtctacctgtgccagaatcaaatctaaggactagaaatgccattaagagattacataagcgagactcttttgataattgtagtttgggagaatcctcaaaaatagggatatcagatatttcttcgctttcagaaaaaacttttcaaacacttgaatgccaacacaagagaagtaggagggtgaggagatctaaaggttgtgattgctgtggggaaaaatcacaacctcaggaaaagtcactcattgggttaaagaatacagaaaataatgacgtagagattagtgaaacaaaaaaggcagatgtgcaagcacctgtaagcccatcagaaacttctcaagctaatccatattctgaaggacaatttttagatgaacatcatagtgtgaattttcatttgggtctcaaagaggataatgatactattaatgattcattaattgtttctgaaaccaaatcaaaagaaaacactatgcaagaatctcttccttctggaatagtaaactttagagaggaaatttgtgatatggattctagtgaagcaatgtctcttgaaagccaggagtcacctaatgaaaattttaaaactgttggcccgtgtttaggagactcgaaaaatgtttcacaggaatctttggagacaaaagaagaaaaaccagaagaaaccccaaaaatggaactgagtctagagaatgttactgttgaaggaaatgcatgtaaagtaacagaatccaatctagagaaagcaaaaactatggaattgaatgtaggaaatgaagctagctttcatggacaagagagaaccaaaactggtatttctgaagaagcagcaatagaagaaaataaaagaaatgatgactctgaagcagacacagctaaactgaatgccaaagaagtagcaactgaggaatttaattcagatattagtctttctgataatactacacctgtaaaattgaatgctcaaactgagatttctgaacaaacagcagctggggaactagatggaggaaatgatgtatctgatctacactcatctgaagaaacgaataccaaaatgaaaaataatgaagaaatgatgatcggcgaggcaatggctgaaactggccatgatggtgaaacagagaatgagggcataactaccaaaacctcaaagcctgatgaagctgaaacaaacatgttgactgcagaaatggacaactttgtttgtgacacagttgaaatgagcactgaagaaggaatcattgacgctaataaaactgaaacaaatactgagtatagtaaatctgaagaaaaattagataacaatcaaatggtaatggaaagtgatattttacaggaagatcaccatacttcacagaaagtggaggaaccatcacagtgtctggcatctggaacagctatctctgagctaataatagaagacaataatgcatctcctcaaaaactaagggaacttgatccttcacttgtgtcagcaaatgacagtcctagtggcatgcagacacgctgtgtctggtctcctttggcttctccgtctacgagcattttaaagagaggactaaaaagatcccaagaagatgaaatctcatcacctgttaataaggttcgccgtgtctcctttgcagatccaatataccaagcaggattggcagatgacattgatagacggtgctctattgttaggtcccattcttccaatagttctcccataggaaaaagtgttaaaacttctcctactacacaatctaagcataataccacttcagccaaaggatttctgtccccaggatcacgtagccctaaatttaagagctcaaagaagtgtttaatttcagaaatggccaaagaatccataccatgcccaacagaaagtgtttacccaccattggtgaactgtgtggcaccagttgacatcattttacctcagattacatcaaacatgtgggcaagaggcctgggacaactcattagagctaagaatataaaaactattggtgatttgagtactcttacagcatctgaaataaaaactcttcctatccgttctccaaaagtgtccaatgtaaaaaaggctctcagaatatatcatgagcagcaggtgaagactcgtggactagaagagattccagtttttgatatttctgaaaaaacagtaaatggaatagaaaataaatctttgtcacctgatgaagaaagacttgtctcagatataattgatcctgttgctttagaaattccattatccaaaaaccttctggcacagattagtgctcttgctcttcagctggattcagaagatcttcataattattcaggaagccaactatttgaaatgcacgagaaactaagttgtatggcaaactctgtaataaaaaatctacagtcacgttggagatcaccatcccatgaaaattctatttagtattttcagagaaaattgaaggtttttttaaacatcactggatttcttgattgaggaaacaagttctgaaataatagcacaatttcaaagaagagactctttgcaaagttgataacatttcaaaccctgaaggacagtgacttattatgtaagttcaattttgtaagttcattatgtaagatccttttttttttcataatatgtattcttggctgctatgcgtggtttttcaggaaatttaattatcttactgagatgtgaaagcaaaactagtaacagaacttacattttatttcatgctttcttaaacccgtgca

SEQ ID NO: 175116 - DNA, 2534 bp, Homo sapiens
  Payload ID: 14384
  Gene Symbol: RIF1
  Gene Name: replication timing regulatory factor 1
  ENST ID: ENST00000414861
  CDS Start-End: 1-2534
agctgggaaagtcgagctctggcagcgtctgggtgctgaggggcagaggcggagagaaccctgtcctgatcttcctagtcgtatgactggagaagaaggaaaagaagtaattacagaaattgagaaaaaacttcctcggctgtacaaagttttaaagactcacatttccagtcaaaactcggagctgagtagtgctgctctacaagccctggggttttgcttatataatcccaaaattacctcagaattatcagaggcaaatgctctagaattgctttcaaaattgaatgataccattaagaattcagacaaaaatgtacgtactagagcactttgggtgatatctaagcagacatttccctctgaagtggttggcaaaatggtatccagtataattgattcattagaaatactgtttaacaaaggagagacgcattctgctgttgttgattttgaagcattaaatgttatcgtaaggctaattgaacaagccccaattcaaatgggagaagaggcagtgaggtgggcaaaactggtcatacctttagtggttcattcagcacaaaaggtacatttgcggggagcaactgctctggagatgggaatgccattattgcttcagaaacagcaagaaatagcatctattacggagcagcttatgactactaaattaatctcagaacttcagaagctatttatgagtaaaaatgagacttacgtgttaaaattatggcctttgtttgtcaaactacttggaaggaccttgcatcgaagtgggagtttcatcaattctctcttgcaactagaagaacttggatttcgtagtggagcacccatgattaaaaagatagcttttattgcttggaagagtttaatagataattttgctttaaatccagatatactatgtagtgcaaaaagactcaagttgttaatgcagcctttgagttccatccatgtgagaacagaaactctagcattaacaaaactagaagtctggtggtatttactgatgagacttggacctcatcttcctgctaattttgaacaggtttgtgtgcctctgattcaaagtacaataagcattgattctaatgcctcacctcagggcaattcgtgtcatgtagctacatctccaggtttaaatcctatgactcctgtacacaaaggtgcttcctccccgtacggagccccgggaactccccgaatgaacctgagttcgaatttaggtggaatggccacaatcccatccattcaacttttgggacttgaaatgttgcttcatttcttgttgggtccagaagccttgagttttgctaagcaaaataaacttgtgctgagcttagagccattggaacatccgttaatcagcagcccttcctttttttccaaacatgcaaatacacttatcactgctgttcatgatagctttgttgcagttggaaaagatgcccccgatgtggttgtcagtgctatctggaaggagctaattagcttggtgaagtcagttactgaatcaggtaacaaaaaagagaaaccaggttctgaagttttgactctcttattaaagtctttggaaagcatagtaaagtctgaagtatttcctgtatcaaaaacgctggtcctcatggaaattacaattaaaggacttcctcagaaagtattaggttcaccagcatatcaggttgctaatatggatattcttaatggaactccagctttgttcttaattcaattaattttcaacaatttcttggaatgtggtgtatcagatgaaaggttctttctcagtttggaatcacttgtaggctgtgttctttctggtccaacttcaccactagctttcagtgactcagttttaaatgttattaatcaaaatgcaaagcagttggaaaataaggagcatctctggaaaatgtggagtgttatagtcaccccattaactgaattgattaatcagaccaatgaagtaaatcaaggtgatgccttagaacataattttagtgccatctatggtgcattgactttaccagtaaaccacattttttcagaacagagatttccagtggccaccatgaagactttgcttagaacttggtcagaattatatagagcatttgctcgttgtgctgctttggtggcaacagcagaagagaacttgtgctgtgaggaactttcttccaagataatgtccagtttggaagatgaaggcttttctaatttgttgttcgtggatagaattatttatattattactgtaatggttgattgcattgacttctcaccatataatattaaatatcagcccaaagttaaatcaccacagagaccttcagattggtccaaaaagaagaatgagcccctagggaaattgacttctttatttaaacttattgtgaaagtgatctattctttccacacactgagcttcaaggaagcacattctgataccctcttcactattggcaactcaatcaccggcattatttccagtgtacttgggcatatttctttgccttctatgatccgaaaaa

SEQ ID NO: 175117 - DNA, 3552 bp, Homo sapiens
  Payload ID: 14384
  Gene Symbol: RIF1
  Gene Name: replication timing regulatory factor 1
  ENST ID: ENST00000454583
  CDS Start-End: 1-2240
ggagatctaaaggttgtgattgctgtggggaaaaatcacaacctcaggaaaagtcactcattgggttaaagaatacagaaaataatgacgtagagattagtgaaacaaaaaaggcagatgtgcaagcacctgtaagcccatcagaaacttctcaagctaatccatattctgaaggacaatttttagatgaacatcatagtgtgaattttcatttgggtctcaaagaggataatgatactattaatgattcattaattgtttctgaaaccaaatcaaaagaaaacactatgcaagaatctcttccttctggaatagtaaactttagagaggaaatttgtgatatggattctagtgaagcaatgtctcttgaaagccaggagtcacctaatgaaaattttaaaactgttggcccgtgtttaggagactcgaaaaatgtttcacaggaatctttggagacaaaagaagaaaaaccagaagaaaccccaaaaatggaactgagtctagagaatgttactgttgaaggaaatgcatgtaaagtaacagaatccaatctagagaaagcaaaaactatggaattgaatgtaggaaatgaagctagctttcatggacaagagagaaccaaaactggtatttctgaagaagcagcaatagaagaaaataaaagaaatgatgactctgaagcagacacagctaaactgaatgccaaagaagtagcaactgaggaatttaattcagatattagtctttctgataatactacacctgtaaaattgaatgctcaaactgagatttctgaacaaacagcagctggggaactagatggaggaaatgatgtatctgatctacactcatctgaagaaacgaataccaaaatgaaaaataatgaagaaatgatgatcggcgaggcaatggctgaaactggccatgatggtgaaacagagaatgagggcataactaccaaaacctcaaagcctgatgaagctgaaacaaacatgttgactgcagaaatggacaactttgtttgtgacacagttgaaatgagcactgaagaaggaatcattgacgctaataaaactgaaacaaatactgagtatagtaaatctgaagaaaaattagataacaatcaaatggtaatggaaagtgatattttacaggaagatcaccatacttcacagaaagtggaggaaccatcacagtgtctggcatctggaacagctatctctgagctaataatagaagacaataatgcatctcctcaaaaactaagggaacttgatccttcacttgtgtcagcaaatgacagtcctagtggcatgcagacacgctgtgtctggtctcctttggcttctccgtctacgagcattttaaagagaggactaaaaagatcccaagaagatgaaatctcatcacctgttaataaggttcgccgtgtctcctttgcagatccaatataccaagcaggattggcagatgacattgatagacggtgctctattgttaggtcccattcttccaatagttctcccataggaaaaagtgttaaaacttctcctactacacaatctaagcataataccacttcagccaaaggatttctgtccccaggatcacgtagccctaaatttaagagctcaaagaagtgtttaatttcagaaatggccaaagaatccataccatgcccaacagaaagtgtttacccaccattggtgaactgtgtggcaccagttgacatcattttacctcagattacatcaaacatgtgggcaagaggcctgggacaactcattagagctaagaatataaaaactattggtgatttgagtactcttacagcatctgaaataaaaactcttcctatccgttctccaaaagtgtccaatgtaaaaaaggctctcagaatatatcatgagcagcaggtgaagactcgtggactagaagagattccagtttttgatatttctgaaaaaacagtaaatggaatagaaaataaatctttgtcacctgatgaagaaagacttgtctcagatataattgatcctgttgctttagaaattccattatccaaaaaccttctggcacagattagtgctcttgctcttcagctggattcagaagatcttcataattattcaggaagccaactatttgaaatgcacgagaaactaagttgtatggcaaactctgtaataaaaaatctacagtcacgttggagatcaccatcccatgaaaattctatttagtattttcagagaaaattgaaggtttttttaaacatcactggatttcttgattgaggaaacaagttctgaaataatagcacaatttcaaagaagagactctttgcaaagttgataacatttcaaaccctgaaggacagtgacttattatccttcctttctccaaagaacagttaaaaccaaatgtgttatggtaagctgtaaataccgttggaataaaagataaccgttcatcttacctaaaaaattgaagacaatattttccattgttgatgtcacaatttcttgaagatggctctttgcagcctacgtggtagtggagatatatacaaaggacttccctagtatcgttggaccaacaagcacaagcagatggcaggaagattagaacattggatattgattgccagtttttaagtgtcattcttggaaacgtgggagatttaggaaatgacattgaagaggaagaattctgttgaaatagtgattctcaacgtggggtccttggacagcaagtgatggggattggaatcccttttccaacgttttctttatacaacacctgtatgacacaagaaagcatccagaaaaaacaagagcagtcaaaacagccctttcatctaccttgtggggaacctggtataaaactacagacgtcagacagaaaagacagattcaacaagtcaacctctctgttcaggcacagatctggttttaatgatgaactctacaatgctaattctggaaatgaaaaagtacaatggaaagcattaagttatataacgctgaggaatcttgttaattctacttatagtatttcaaatctagtcaagtcactgaaaatgttcaagtataatcggaaatgtgtctttccgatagccgttcctggtgagacatcctctttatataaaacctgggcattcagaatcaggacagtgttaacacagaagaaaagaaaacccagcagttcctggagaaagactaggacacatggcttttgtgaaaacaagacactagacgatgttcccaggggttttcgccatgaaccttgccatgggtgaggaaaagatactatattttctccccaataccaccaacgaagtaacagatgagtctttcatgctgtgatttgggattaagatacaaggtgagcccagagatgaattgggcacacatttcctggggcaggatgggagttgtggagggctgcacaacagccccactgcaagcctgggatatccagaggcatcttcctcagcacccctaggtgcctgtgggctgtgccttacatttaataaaaacttacaaggctgaa

SEQ ID NO: 175118 - DNA, 8053 bp, Homo sapiens
  Payload ID: 14384
  Gene Symbol: RIF1
  Gene Name: replication timing regulatory factor 1
  Uniprot ID: Q5UIP0
  ENST ID: ENST00000453091
  CDS Start-End: 162-7502
cgcactcctgggcccgcccagccgccatcttggtctaggagggagcgcgccgcacgcgtgagtaaacagccggagctgggaaagtcgagctctggcagcgtctgggtgctgaggggcagaggcggagagaaccctgtcctgatcttcctagggtggccgacatgacggccaggggtcagagccccctcgcgccgctgttggagactttggaagacccttctgcctcccatggagggcagactgacgcttacctgactctgaccagtcgtatgactggagaagaaggaaaagaagtaattacagaaattgagaaaaaacttcctcggctgtacaaagttttaaagactcacatttccagtcaaaactcggagctgagtagtgctgctctacaagccctggggttttgcttatataatcccaaaattacctcagaattatcagaggcaaatgctctagaattgctttcaaaattgaatgataccattaagaattcagacaaaaatgtacgtactagagcactttgggtgatatctaagcagacatttccctctgaagtggttggcaaaatggtatccagtataattgattcattagaaatactgtttaacaaaggagagacgcattctgctgttgttgattttgaagcattaaatgttatcgtaaggctaattgaacaagccccaattcaaatgggagaagaggcagtgaggtgggcaaaactggtcatacctttagtggttcattcagcacaaaaggtacatttgcggggagcaactgctctggagatgggaatgccattattgcttcagaaacagcaagaaatagcatctattacggagcagcttatgactactaaattaatctcagaacttcagaagctatttatgagtaaaaatgagacttacgtgttaaaattatggcctttgtttgtcaaactacttggaaggaccttgcatcgaagtgggagtttcatcaattctctcttgcaactagaagaacttggatttcgtagtggagcacccatgattaaaaagatagcttttattgcttggaagagtttaatagataattttgctttaaatccagatatactatgtagtgcaaaaagactcaagttgttaatgcagcctttgagttccatccatgtgagaacagaaactctagcattaacaaaactagaagtctggtggtatttactgatgagacttggacctcatcttcctgctaattttgaacaggtttgtgtgcctctgattcaaagtacaataagcattgattctaatgcctcacctcagggcaattcgtgtcatgtagctacatctccaggtttaaatcctatgactcctgtacacaaaggtgcttcctccccgtacggagccccgggaactccccgaatgaacctgagttcgaatttaggtggaatggccacaatcccatccattcaacttttgggacttgaaatgttgcttcatttcttgttgggtccagaagccttgagttttgctaagcaaaataaacttgtgctgagcttagagccattggaacatccgttaatcagcagcccttcctttttttccaaacatgcaaatacacttatcactgctgttcatgatagctttgttgcagttggaaaagatgcccccgatgtggttgtcagtgctatctggaaggagctaattagcttggtgaagtcagttactgaatcaggtaacaaaaaagagaaaccaggttctgaagttttgactctcttattaaagtctttggaaagcatagtaaagtctgaagtatttcctgtatcaaaaacgctggtcctcatggaaattacaattaaaggacttcctcagaaagtattaggttcaccagcatatcaggttgctaatatggatattcttaatggaactccagctttgttcttaattcaattaattttcaacaatttcttggaatgtggtgtatcagatgaaaggttctttctcagtttggaatcacttgtaggctgtgttctttctggtccaacttcaccactagctttcagtgactcagttttaaatgttattaatcaaaatgcaaagcagttggaaaataaggagcatctctggaaaatgtggagtgttatagtcaccccattaactgaattgattaatcagaccaatgaagtaaatcaaggtgatgccttagaacataattttagtgccatctatggtgcattgactttaccagtaaaccacattttttcagaacagagatttccagtggccaccatgaagactttgcttagaacttggtcagaattatatagagcatttgctcgttgtgctgctttggtggcaacagcagaagagaacttgtgctgtgaggaactttcttccaagataatgtccagtttggaagatgaaggcttttctaatttgttgttcgtggatagaattatttatattattactgtaatggttgattgcattgacttctcaccatataatattaaatatcagcccaaagttaaatcaccacagagaccttcagattggtccaaaaagaagaatgagcccctagggaaattgacttctttatttaaacttattgtgaaagtgatctattctttccacacactgagcttcaaggaagcacattctgataccctcttcactattggcaactcaatcaccggcattatttccagtgtacttgggcatatttctttgccttctatgatccgaaaaatatttgcaactttaacaagacctctggcattattttatgaaaactcaaagcttgatgaagttcctaaagtatatagttgtctgaacaacaagttagaaaagctactgggagaaattattgcttgtctgcaattcagctacaccggaacttatgatagtgaacttcttgaacaactctccccactattatgcataatatttctgcacaagaataaacagattcgaaaacagagtgctcagttctggaatgccacttttgccaaagtgatgatgttggtttatcctgaagagttaaaaccagtactaacacaagccaaacaaaaatttctgctcctgttgcctggtttggaaactgttgaaatgatggaggaatccagtggaccatattctgatggaacagaaaattcacaactaaatgtgaagataagtggcatggagagaaaatcaaatggaaaaagagattcatttttggcacaaacaaagaataaaaaagaaaatatgaaaccagcagccaaactgaaacttgaatcttcgtctttaaaagtaaagggtgaaattcttttggaagaggaaaagtctactgactttgtgtttatacctccagaaggaaaagatgcaaaggaaagaatattaactgatcatcaaaaagaagttctcaaaacaaagcggtgtgatattcctgccatgtataataatctggatgtttcccaagataccttatttactcagtatagtcaggaagagcctatggaaattcctactttaaccagaaaaccaaaggaggattctaagatgatgattacggaggagcaaatggacagtgacattgtcattcctcaagatgtcacggaagactgtggtatggctgaacatcttgaaaagtcctccctttcgaataatgagtgtggttctcttgacaaaaccagtccagaaatgtcaaacagtaataatgatgaaagaaaaaaagctttaatttcatcaaggaaaacatcaactgaatgtgcatctagtacagaaaattctttcgttgtcagcagtagttcagtttctaataccactgttgctggaactcccccataccctacaagtcggaggcaaacctttattactttggagaagtttgatggttcagaaaatagaccttttagtccatcccccttgaataatatttcatcaactgttacagtgaaaaataaccaggaaaccatgattaaaacagattttctaccaaaagcaaagcaaagagaagggactttttcaaaatctgattctgaaaaaatagtgaatggaactaagagatcaagccggagagctggtaaagctgaacaaacagggaataaaaggtctaagcccttaatgagatctgagccggagaaaaatactgaggaatctgttgaaggcattgtagtcttagaaaataacccacctggtttgcttaatcaaacagaatgtgtgtcagataatcaggttcatctttctgaatctacaatggagcatgacaatacaaagcttaaagcagcaacagtggaaaatgctgtattattggaaactaatactgtagaggagaaaaatgtagaaattaatttggaatccaaagagaatacacccccagtagtaatatcagcagatcaaatggtaaatgaggatagtcaggttcagataactccaaatcagaaaacccttagacggtcttcaaggcgacgttcagaagtagtagagtctaccactgaaagccaagataaggaaaatagtcatcaaaaaaaggaacgacgtaaggaagaagaaaaacctcttcagaagagtccattgcatataaaagatgatgtgttacctaaacaaaaactgattgctgaacaaactctacaggagaatttaattgagaaaggaagtaatttacatgagaagactcttggggaaactagtgctaatgcagaaactgaacaaaataaaaaaaaggcagaccctgagaacattaagtctgagggggatggtacccaggacattgtagataagtcctctgagaaactagtcagaggccgaacacggtatcaaactagaagagcatctcagggtttgctttccagcattgaaaactcagaatctgatagttcggaggcaaaagaagaaggttctaggaagaagagatctggaaaatggaaaaacaaaagcaatgaaagtgttgacattcaagatcaagaagagaaagtggtgaaacaggaatgtataaaagctgaaaatcagtcacatgattataaagcaacttctgaagaagatgtaagcataaaatctccgatttgcgaaaaacaagatgaaagtaatactgtaatatgtcaggattctacagtaacttcagatttgttgcaagttcctgatgatttaccaaatgtgtgtgaggaaaaaaatgaaactagcaaatatgcagaatattcctttacaagtctacctgtgccagaatcaaatctaaggactagaaatgccattaagagattacataagcgagactcttttgataattgtagtttgggagaatcctcaaaaatagggatatcagatatttcttcgctttcagaaaaaacttttcaaacacttgaatgccaacacaagagaagtaggagggtgaggagatctaaaggttgtgattgctgtggggaaaaatcacaacctcaggaaaagtcactcattgggttaaagaatacagaaaataatgacgtagagattagtgaaacaaaaaaggcagatgtgcaagcacctgtaagcccatcagaaacttctcaagctaatccatattctgaaggacaatttttagatgaacatcatagtgtgaattttcatttgggtctcaaagaggataatgatactattaatgattcattaattgtttctgaaaccaaatcaaaagaaaacactatgcaagaatctcttccttctggaatagtaaactttagagaggaaatttgtgatatggattctagtgaagcaatgtctcttgaaagccaggagtcacctaatgaaaattttaaaactgttggcccgtgtttaggagactcgaaaaatgtttcacaggaatctttggagacaaaagaagaaaaaccagaagaaaccccaaaaatggaactgagtctagagaatgttactgttgaaggaaatgcatgtaaagtaacagaatccaatctagagaaagcaaaaactatggaattgaatgtaggaaatgaagctagctttcatggacaagagagaaccaaaactggtatttctgaagaagcagcaatagaagaaaataaaagaaatgatgactctgaagcagacacagctaaactgaatgccaaagaagtagcaactgaggaatttaattcagatattagtctttctgataatactacacctgtaaaattgaatgctcaaactgagatttctgaacaaacagcagctggggaactagatggaggaaatgatgtatctgatctacactcatctgaagaaacgaataccaaaatgaaaaataatgaagaaatgatgatcggcgaggcaatggctgaaactggccatgatggtgaaacagagaatgagggcataactaccaaaacctcaaagcctgatgaagctgaaacaaacatgttgactgcagaaatggacaactttgtttgtgacacagttgaaatgagcactgaagaaggaatcattgacgctaataaaactgaaacaaatactgagtatagtaaatctgaagaaaaattagataacaatcaaatggtaatggaaagtgatattttacaggaagatcaccatacttcacagaaagtggaggaaccatcacagtgtctggcatctggaacagctatctctgagctaataatagaagacaataatgcatctcctcaaaaactaagggaacttgatccttcacttgtgtcagcaaatgacagtcctagtggcatgcagacacgctgtgtctggtctcctttggcttctccgtctacgagcattttaaagagaggactaaaaagatcccaagaagatgaaatctcatcacctgttaataaggttcgccgtgtctcctttgcagatccaatataccaagcaggattggcagatgacattgatagacggtgctctattgttaggtcccattcttccaatagttctcccataggaaaaagtgttaaaacttctcctactacacaatctaagatttcagaaatggccaaagaatccataccatgcccaacagaaagtgtttacccaccattggtgaactgtgtggcaccagttgacatcattttacctcagattacatcaaacatgtgggcaagaggcctgggacaactcattagagctaagaatataaaaactattggtgatttgagtactcttacagcatctgaaataaaaactcttcctatccgttctccaaaagtgtccaatgtaaaaaaggctctcagaatatatcatgagcagcaggtgaagactcgtggactagaagagattccagtttttgatatttctgaaaaaacagtaaatggaatagaaaataaatctttgtcacctgatgaagaaagacttgtctcagatataattgatcctgttgctttagaaattccattatccaaaaaccttctggcacagattagtgctcttgctcttcagctggattcagaagatcttcataattattcaggaagccaactatttgaaatgcacgagaaactaagttgtatggcaaactctgtaataaaaaatctacagtcacgttggagatcaccatcccatgaaaattctatttagtattttcagagaaaattgaaggtttttttaaacatcactggatttcttgattgaggaaacaagttctgaaataatagcacaatttcaaagaagagactctttgcaaagttgataacatttcaaaccctgaaggacagtgacttattatgtaagttcaattttgtaagttcattatgtaagatccttttttttttcataatatgtattcttggctgctatgcgtggtttttcaggaaatttaattatcttactgagatgtgaaagcaaaactagtaacagaacttacattttatttcatgctttcttaaacccgtgcatattctggtgaaacatgtaaaatactttaagtaaaattgaacatttttatttgaatttttgctgaactgataaaggtgtttatatttttgtttgttggtttgtttaattcatgtttgttgggactgaggtttaggaagtttgttactggttaaaaacctcaaatgaaatgcgaaagaatttgaatttttcctgcatatgtcaactttggacagctttcaagaaaaatgagaaaa

SEQ ID NO: 175119 - DNA, 7722 bp, Homo sapiens
  Payload ID: 14384
  Gene Symbol: RIF1
  Gene Name: replication timing regulatory factor 1
  Uniprot ID: Q5UIP0
  ENST ID: ENST00000428287
  CDS Start-End: 65-7405
actcctgggcccgcccagccgccatcttggtctaggagggagcgcgccgcacgcggtggccgacatgacggccaggggtcagagccccctcgcgccgctgttggagactttggaagacccttctgcctcccatggagggcagactgacgcttacctgactctgaccagtcgtatgactggagaagaaggaaaagaagtaattacagaaattgagaaaaaacttcctcggctgtacaaagttttaaagactcacatttccagtcaaaactcggagctgagtagtgctgctctacaagccctggggttttgcttatataatcccaaaattacctcagaattatcagaggcaaatgctctagaattgctttcaaaattgaatgataccattaagaattcagacaaaaatgtacgtactagagcactttgggtgatatctaagcagacatttccctctgaagtggttggcaaaatggtatccagtataattgattcattagaaatactgtttaacaaaggagagacgcattctgctgttgttgattttgaagcattaaatgttatcgtaaggctaattgaacaagccccaattcaaatgggagaagaggcagtgaggtgggcaaaactggtcatacctttagtggttcattcagcacaaaaggtacatttgcggggagcaactgctctggagatgggaatgccattattgcttcagaaacagcaagaaatagcatctattacggagcagcttatgactactaaattaatctcagaacttcagaagctatttatgagtaaaaatgagacttacgtgttaaaattatggcctttgtttgtcaaactacttggaaggaccttgcatcgaagtgggagtttcatcaattctctcttgcaactagaagaacttggatttcgtagtggagcacccatgattaaaaagatagcttttattgcttggaagagtttaatagataattttgctttaaatccagatatactatgtagtgcaaaaagactcaagttgttaatgcagcctttgagttccatccatgtgagaacagaaactctagcattaacaaaactagaagtctggtggtatttactgatgagacttggacctcatcttcctgctaattttgaacaggtttgtgtgcctctgattcaaagtacaataagcattgattctaatgcctcacctcagggcaattcgtgtcatgtagctacatctccaggtttaaatcctatgactcctgtacacaaaggtgcttcctccccgtacggagccccgggaactccccgaatgaacctgagttcgaatttaggtggaatggccacaatcccatccattcaacttttgggacttgaaatgttgcttcatttcttgttgggtccagaagccttgagttttgctaagcaaaataaacttgtgctgagcttagagccattggaacatccgttaatcagcagcccttcctttttttccaaacatgcaaatacacttatcactgctgttcatgatagctttgttgcagttggaaaagatgcccccgatgtggttgtcagtgctatctggaaggagctaattagcttggtgaagtcagttactgaatcaggtaacaaaaaagagaaaccaggttctgaagttttgactctcttattaaagtctttggaaagcatagtaaagtctgaagtatttcctgtatcaaaaacgctggtcctcatggaaattacaattaaaggacttcctcagaaagtattaggttcaccagcatatcaggttgctaatatggatattcttaatggaactccagctttgttcttaattcaattaattttcaacaatttcttggaatgtggtgtatcagatgaaaggttctttctcagtttggaatcacttgtaggctgtgttctttctggtccaacttcaccactagctttcagtgactcagttttaaatgttattaatcaaaatgcaaagcagttggaaaataaggagcatctctggaaaatgtggagtgttatagtcaccccattaactgaattgattaatcagaccaatgaagtaaatcaaggtgatgccttagaacataattttagtgccatctatggtgcattgactttaccagtaaaccacattttttcagaacagagatttccagtggccaccatgaagactttgcttagaacttggtcagaattatatagagcatttgctcgttgtgctgctttggtggcaacagcagaagagaacttgtgctgtgaggaactttcttccaagataatgtccagtttggaagatgaaggcttttctaatttgttgttcgtggatagaattatttatattattactgtaatggttgattgcattgacttctcaccatataatattaaatatcagcccaaagttaaatcaccacagagaccttcagattggtccaaaaagaagaatgagcccctagggaaattgacttctttatttaaacttattgtgaaagtgatctattctttccacacactgagcttcaaggaagcacattctgataccctcttcactattggcaactcaatcaccggcattatttccagtgtacttgggcatatttctttgccttctatgatccgaaaaatatttgcaactttaacaagacctctggcattattttatgaaaactcaaagcttgatgaagttcctaaagtatatagttgtctgaacaacaagttagaaaagctactgggagaaattattgcttgtctgcaattcagctacaccggaacttatgatagtgaacttcttgaacaactctccccactattatgcataatatttctgcacaagaataaacagattcgaaaacagagtgctcagttctggaatgccacttttgccaaagtgatgatgttggtttatcctgaagagttaaaaccagtactaacacaagccaaacaaaaatttctgctcctgttgcctggtttggaaactgttgaaatgatggaggaatccagtggaccatattctgatggaacagaaaattcacaactaaatgtgaagataagtggcatggagagaaaatcaaatggaaaaagagattcatttttggcacaaacaaagaataaaaaagaaaatatgaaaccagcagccaaactgaaacttgaatcttcgtctttaaaagtaaagggtgaaattcttttggaagaggaaaagtctactgactttgtgtttatacctccagaaggaaaagatgcaaaggaaagaatattaactgatcatcaaaaagaagttctcaaaacaaagcggtgtgatattcctgccatgtataataatctggatgtttcccaagataccttatttactcagtatagtcaggaagagcctatggaaattcctactttaaccagaaaaccaaaggaggattctaagatgatgattacggaggagcaaatggacagtgacattgtcattcctcaagatgtcacggaagactgtggtatggctgaacatcttgaaaagtcctccctttcgaataatgagtgtggttctcttgacaaaaccagtccagaaatgtcaaacagtaataatgatgaaagaaaaaaagctttaatttcatcaaggaaaacatcaactgaatgtgcatctagtacagaaaattctttcgttgtcagcagtagttcagtttctaataccactgttgctggaactcccccataccctacaagtcggaggcaaacctttattactttggagaagtttgatggttcagaaaatagaccttttagtccatcccccttgaataatatttcatcaactgttacagtgaaaaataaccaggaaaccatgattaaaacagattttctaccaaaagcaaagcaaagagaagggactttttcaaaatctgattctgaaaaaatagtgaatggaactaagagatcaagccggagagctggtaaagctgaacaaacagggaataaaaggtctaagcccttaatgagatctgagccggagaaaaatactgaggaatctgttgaaggcattgtagtcttagaaaataacccacctggtttgcttaatcaaacagaatgtgtgtcagataatcaggttcatctttctgaatctacaatggagcatgacaatacaaagcttaaagcagcaacagtggaaaatgctgtattattggaaactaatactgtagaggagaaaaatgtagaaattaatttggaatccaaagagaatacacccccagtagtaatatcagcagatcaaatggtaaatgaggatagtcaggttcagataactccaaatcagaaaacccttagacggtcttcaaggcgacgttcagaagtagtagagtctaccactgaaagccaagataaggaaaatagtcatcaaaaaaaggaacgacgtaaggaagaagaaaaacctcttcagaagagtccattgcatataaaagatgatgtgttacctaaacaaaaactgattgctgaacaaactctacaggagaatttaattgagaaaggaagtaatttacatgagaagactcttggggaaactagtgctaatgcagaaactgaacaaaataaaaaaaaggcagaccctgagaacattaagtctgagggggatggtacccaggacattgtagataagtcctctgagaaactagtcagaggccgaacacggtatcaaactagaagagcatctcagggtttgctttccagcattgaaaactcagaatctgatagttcggaggcaaaagaagaaggttctaggaagaagagatctggaaaatggaaaaacaaaagcaatgaaagtgttgacattcaagatcaagaagagaaagtggtgaaacaggaatgtataaaagctgaaaatcagtcacatgattataaagcaacttctgaagaagatgtaagcataaaatctccgatttgcgaaaaacaagatgaaagtaatactgtaatatgtcaggattctacagtaacttcagatttgttgcaagttcctgatgatttaccaaatgtgtgtgaggaaaaaaatgaaactagcaaatatgcagaatattcctttacaagtctacctgtgccagaatcaaatctaaggactagaaatgccattaagagattacataagcgagactcttttgataattgtagtttgggagaatcctcaaaaatagggatatcagatatttcttcgctttcagaaaaaacttttcaaacacttgaatgccaacacaagagaagtaggagggtgaggagatctaaaggttgtgattgctgtggggaaaaatcacaacctcaggaaaagtcactcattgggttaaagaatacagaaaataatgacgtagagattagtgaaacaaaaaaggcagatgtgcaagcacctgtaagcccatcagaaacttctcaagctaatccatattctgaaggacaatttttagatgaacatcatagtgtgaattttcatttgggtctcaaagaggataatgatactattaatgattcattaattgtttctgaaaccaaatcaaaagaaaacactatgcaagaatctcttccttctggaatagtaaactttagagaggaaatttgtgatatggattctagtgaagcaatgtctcttgaaagccaggagtcacctaatgaaaattttaaaactgttggcccgtgtttaggagactcgaaaaatgtttcacaggaatctttggagacaaaagaagaaaaaccagaagaaaccccaaaaatggaactgagtctagagaatgttactgttgaaggaaatgcatgtaaagtaacagaatccaatctagagaaagcaaaaactatggaattgaatgtaggaaatgaagctagctttcatggacaagagagaaccaaaactggtatttctgaagaagcagcaatagaagaaaataaaagaaatgatgactctgaagcagacacagctaaactgaatgccaaagaagtagcaactgaggaatttaattcagatattagtctttctgataatactacacctgtaaaattgaatgctcaaactgagatttctgaacaaacagcagctggggaactagatggaggaaatgatgtatctgatctacactcatctgaagaaacgaataccaaaatgaaaaataatgaagaaatgatgatcggcgaggcaatggctgaaactggccatgatggtgaaacagagaatgagggcataactaccaaaacctcaaagcctgatgaagctgaaacaaacatgttgactgcagaaatggacaactttgtttgtgacacagttgaaatgagcactgaagaaggaatcattgacgctaataaaactgaaacaaatactgagtatagtaaatctgaagaaaaattagataacaatcaaatggtaatggaaagtgatattttacaggaagatcaccatacttcacagaaagtggaggaaccatcacagtgtctggcatctggaacagctatctctgagctaataatagaagacaataatgcatctcctcaaaaactaagggaacttgatccttcacttgtgtcagcaaatgacagtcctagtggcatgcagacacgctgtgtctggtctcctttggcttctccgtctacgagcattttaaagagaggactaaaaagatcccaagaagatgaaatctcatcacctgttaataaggttcgccgtgtctcctttgcagatccaatataccaagcaggattggcagatgacattgatagacggtgctctattgttaggtcccattcttccaatagttctcccataggaaaaagtgttaaaacttctcctactacacaatctaagatttcagaaatggccaaagaatccataccatgcccaacagaaagtgtttacccaccattggtgaactgtgtggcaccagttgacatcattttacctcagattacatcaaacatgtgggcaagaggcctgggacaactcattagagctaagaatataaaaactattggtgatttgagtactcttacagcatctgaaataaaaactcttcctatccgttctccaaaagtgtccaatgtaaaaaaggctctcagaatatatcatgagcagcaggtgaagactcgtggactagaagagattccagtttttgatatttctgaaaaaacagtaaatggaatagaaaataaatctttgtcacctgatgaagaaagacttgtctcagatataattgatcctgttgctttagaaattccattatccaaaaaccttctggcacagattagtgctcttgctcttcagctggattcagaagatcttcataattattcaggaagccaactatttgaaatgcacgagaaactaagttgtatggcaaactctgtaataaaaaatctacagtcacgttggagatcaccatcccatgaaaattctatttagtattttcagagaaaattgaaggtttttttaaacatcactggatttcttgattgaggaaacaagttctgaaataatagcacaatttcaaagaagagactctttgcaaagttgataacatttcaaaccctgaaggacagtgacttattatgtaagttcaattttgtaagttcattatgtaagatccttttttttttcataatatgtattcttggctgctatgcgtggtttttcaggaaatttaattatcttactgagatgtgaaagcaaaactagtaacagaacttacattttatttcatgctttcttaaacccgtgca

SEQ ID NO: 175120 - DNA, 7992 bp, Homo sapiens
  Payload ID: 14384
  Gene Symbol: RIF1
  Gene Name: replication timing regulatory factor 1
  Uniprot ID: Q5UIP0
  ENST ID: ENST00000430328
  CDS Start-End: 335-7675
ccctccgccccctcgcggcgagatgcctcgttccccgggcttctcccgccctccgccgatctcctccctctgttgaaagctgcccgggaaagtggtggcgggagcgggcccaggcccgaatgtggcgtgggctcaggtgtctggtgtcgggcgccggaggaggttcgcgctggggtttggtgattcggaggcctggggtgcagacgcggcgtggctgtgaggcccgggcgggcgtgcgggtgtgagggccggactcacactgggccgccgcggggctgtttccatcggtcactggattttctcctcttccggttcgggcctcagggtggccgacatgacggccaggggtcagagccccctcgcgccgctgttggagactttggaagacccttctgcctcccatggagggcagactgacgcttacctgactctgaccagtcgtatgactggagaagaaggaaaagaagtaattacagaaattgagaaaaaacttcctcggctgtacaaagttttaaagactcacatttccagtcaaaactcggagctgagtagtgctgctctacaagccctggggttttgcttatataatcccaaaattacctcagaattatcagaggcaaatgctctagaattgctttcaaaattgaatgataccattaagaattcagacaaaaatgtacgtactagagcactttgggtgatatctaagcagacatttccctctgaagtggttggcaaaatggtatccagtataattgattcattagaaatactgtttaacaaaggagagacgcattctgctgttgttgattttgaagcattaaatgttatcgtaaggctaattgaacaagccccaattcaaatgggagaagaggcagtgaggtgggcaaaactggtcatacctttagtggttcattcagcacaaaaggtacatttgcggggagcaactgctctggagatgggaatgccattattgcttcagaaacagcaagaaatagcatctattacggagcagcttatgactactaaattaatctcagaacttcagaagctatttatgagtaaaaatgagacttacgtgttaaaattatggcctttgtttgtcaaactacttggaaggaccttgcatcgaagtgggagtttcatcaattctctcttgcaactagaagaacttggatttcgtagtggagcacccatgattaaaaagatagcttttattgcttggaagagtttaatagataattttgctttaaatccagatatactatgtagtgcaaaaagactcaagttgttaatgcagcctttgagttccatccatgtgagaacagaaactctagcattaacaaaactagaagtctggtggtatttactgatgagacttggacctcatcttcctgctaattttgaacaggtttgtgtgcctctgattcaaagtacaataagcattgattctaatgcctcacctcagggcaattcgtgtcatgtagctacatctccaggtttaaatcctatgactcctgtacacaaaggtgcttcctccccgtacggagccccgggaactccccgaatgaacctgagttcgaatttaggtggaatggccacaatcccatccattcaacttttgggacttgaaatgttgcttcatttcttgttgggtccagaagccttgagttttgctaagcaaaataaacttgtgctgagcttagagccattggaacatccgttaatcagcagcccttcctttttttccaaacatgcaaatacacttatcactgctgttcatgatagctttgttgcagttggaaaagatgcccccgatgtggttgtcagtgctatctggaaggagctaattagcttggtgaagtcagttactgaatcaggtaacaaaaaagagaaaccaggttctgaagttttgactctcttattaaagtctttggaaagcatagtaaagtctgaagtatttcctgtatcaaaaacgctggtcctcatggaaattacaattaaaggacttcctcagaaagtattaggttcaccagcatatcaggttgctaatatggatattcttaatggaactccagctttgttcttaattcaattaattttcaacaatttcttggaatgtggtgtatcagatgaaaggttctttctcagtttggaatcacttgtaggctgtgttctttctggtccaacttcaccactagctttcagtgactcagttttaaatgttattaatcaaaatgcaaagcagttggaaaataaggagcatctctggaaaatgtggagtgttatagtcaccccattaactgaattgattaatcagaccaatgaagtaaatcaaggtgatgccttagaacataattttagtgccatctatggtgcattgactttaccagtaaaccacattttttcagaacagagatttccagtggccaccatgaagactttgcttagaacttggtcagaattatatagagcatttgctcgttgtgctgctttggtggcaacagcagaagagaacttgtgctgtgaggaactttcttccaagataatgtccagtttggaagatgaaggcttttctaatttgttgttcgtggatagaattatttatattattactgtaatggttgattgcattgacttctcaccatataatattaaatatcagcccaaagttaaatcaccacagagaccttcagattggtccaaaaagaagaatgagcccctagggaaattgacttctttatttaaacttattgtgaaagtgatctattctttccacacactgagcttcaaggaagcacattctgataccctcttcactattggcaactcaatcaccggcattatttccagtgtacttgggcatatttctttgccttctatgatccgaaaaatatttgcaactttaacaagacctctggcattattttatgaaaactcaaagcttgatgaagttcctaaagtatatagttgtctgaacaacaagttagaaaagctactgggagaaattattgcttgtctgcaattcagctacaccggaacttatgatagtgaacttcttgaacaactctccccactattatgcataatatttctgcacaagaataaacagattcgaaaacagagtgctcagttctggaatgccacttttgccaaagtgatgatgttggtttatcctgaagagttaaaaccagtactaacacaagccaaacaaaaatttctgctcctgttgcctggtttggaaactgttgaaatgatggaggaatccagtggaccatattctgatggaacagaaaattcacaactaaatgtgaagataagtggcatggagagaaaatcaaatggaaaaagagattcatttttggcacaaacaaagaataaaaaagaaaatatgaaaccagcagccaaactgaaacttgaatcttcgtctttaaaagtaaagggtgaaattcttttggaagaggaaaagtctactgactttgtgtttatacctccagaaggaaaagatgcaaaggaaagaatattaactgatcatcaaaaagaagttctcaaaacaaagcggtgtgatattcctgccatgtataataatctggatgtttcccaagataccttatttactcagtatagtcaggaagagcctatggaaattcctactttaaccagaaaaccaaaggaggattctaagatgatgattacggaggagcaaatggacagtgacattgtcattcctcaagatgtcacggaagactgtggtatggctgaacatcttgaaaagtcctccctttcgaataatgagtgtggttctcttgacaaaaccagtccagaaatgtcaaacagtaataatgatgaaagaaaaaaagctttaatttcatcaaggaaaacatcaactgaatgtgcatctagtacagaaaattctttcgttgtcagcagtagttcagtttctaataccactgttgctggaactcccccataccctacaagtcggaggcaaacctttattactttggagaagtttgatggttcagaaaatagaccttttagtccatcccccttgaataatatttcatcaactgttacagtgaaaaataaccaggaaaccatgattaaaacagattttctaccaaaagcaaagcaaagagaagggactttttcaaaatctgattctgaaaaaatagtgaatggaactaagagatcaagccggagagctggtaaagctgaacaaacagggaataaaaggtctaagcccttaatgagatctgagccggagaaaaatactgaggaatctgttgaaggcattgtagtcttagaaaataacccacctggtttgcttaatcaaacagaatgtgtgtcagataatcaggttcatctttctgaatctacaatggagcatgacaatacaaagcttaaagcagcaacagtggaaaatgctgtattattggaaactaatactgtagaggagaaaaatgtagaaattaatttggaatccaaagagaatacacccccagtagtaatatcagcagatcaaatggtaaatgaggatagtcaggttcagataactccaaatcagaaaacccttagacggtcttcaaggcgacgttcagaagtagtagagtctaccactgaaagccaagataaggaaaatagtcatcaaaaaaaggaacgacgtaaggaagaagaaaaacctcttcagaagagtccattgcatataaaagatgatgtgttacctaaacaaaaactgattgctgaacaaactctacaggagaatttaattgagaaaggaagtaatttacatgagaagactcttggggaaactagtgctaatgcagaaactgaacaaaataaaaaaaaggcagaccctgagaacattaagtctgagggggatggtacccaggacattgtagataagtcctctgagaaactagtcagaggccgaacacggtatcaaactagaagagcatctcagggtttgctttccagcattgaaaactcagaatctgatagttcggaggcaaaagaagaaggttctaggaagaagagatctggaaaatggaaaaacaaaagcaatgaaagtgttgacattcaagatcaagaagagaaagtggtgaaacaggaatgtataaaagctgaaaatcagtcacatgattataaagcaacttctgaagaagatgtaagcataaaatctccgatttgcgaaaaacaagatgaaagtaatactgtaatatgtcaggattctacagtaacttcagatttgttgcaagttcctgatgatttaccaaatgtgtgtgaggaaaaaaatgaaactagcaaatatgcagaatattcctttacaagtctacctgtgccagaatcaaatctaaggactagaaatgccattaagagattacataagcgagactcttttgataattgtagtttgggagaatcctcaaaaatagggatatcagatatttcttcgctttcagaaaaaacttttcaaacacttgaatgccaacacaagagaagtaggagggtgaggagatctaaaggttgtgattgctgtggggaaaaatcacaacctcaggaaaagtcactcattgggttaaagaatacagaaaataatgacgtagagattagtgaaacaaaaaaggcagatgtgcaagcacctgtaagcccatcagaaacttctcaagctaatccatattctgaaggacaatttttagatgaacatcatagtgtgaattttcatttgggtctcaaagaggataatgatactattaatgattcattaattgtttctgaaaccaaatcaaaagaaaacactatgcaagaatctcttccttctggaatagtaaactttagagaggaaatttgtgatatggattctagtgaagcaatgtctcttgaaagccaggagtcacctaatgaaaattttaaaactgttggcccgtgtttaggagactcgaaaaatgtttcacaggaatctttggagacaaaagaagaaaaaccagaagaaaccccaaaaatggaactgagtctagagaatgttactgttgaaggaaatgcatgtaaagtaacagaatccaatctagagaaagcaaaaactatggaattgaatgtaggaaatgaagctagctttcatggacaagagagaaccaaaactggtatttctgaagaagcagcaatagaagaaaataaaagaaatgatgactctgaagcagacacagctaaactgaatgccaaagaagtagcaactgaggaatttaattcagatattagtctttctgataatactacacctgtaaaattgaatgctcaaactgagatttctgaacaaacagcagctggggaactagatggaggaaatgatgtatctgatctacactcatctgaagaaacgaataccaaaatgaaaaataatgaagaaatgatgatcggcgaggcaatggctgaaactggccatgatggtgaaacagagaatgagggcataactaccaaaacctcaaagcctgatgaagctgaaacaaacatgttgactgcagaaatggacaactttgtttgtgacacagttgaaatgagcactgaagaaggaatcattgacgctaataaaactgaaacaaatactgagtatagtaaatctgaagaaaaattagataacaatcaaatggtaatggaaagtgatattttacaggaagatcaccatacttcacagaaagtggaggaaccatcacagtgtctggcatctggaacagctatctctgagctaataatagaagacaataatgcatctcctcaaaaactaagggaacttgatccttcacttgtgtcagcaaatgacagtcctagtggcatgcagacacgctgtgtctggtctcctttggcttctccgtctacgagcattttaaagagaggactaaaaagatcccaagaagatgaaatctcatcacctgttaataaggttcgccgtgtctcctttgcagatccaatataccaagcaggattggcagatgacattgatagacggtgctctattgttaggtcccattcttccaatagttctcccataggaaaaagtgttaaaacttctcctactacacaatctaagatttcagaaatggccaaagaatccataccatgcccaacagaaagtgtttacccaccattggtgaactgtgtggcaccagttgacatcattttacctcagattacatcaaacatgtgggcaagaggcctgggacaactcattagagctaagaatataaaaactattggtgatttgagtactcttacagcatctgaaataaaaactcttcctatccgttctccaaaagtgtccaatgtaaaaaaggctctcagaatatatcatgagcagcaggtgaagactcgtggactagaagagattccagtttttgatatttctgaaaaaacagtaaatggaatagaaaataaatctttgtcacctgatgaagaaagacttgtctcagatataattgatcctgttgctttagaaattccattatccaaaaaccttctggcacagattagtgctcttgctcttcagctggattcagaagatcttcataattattcaggaagccaactatttgaaatgcacgagaaactaagttgtatggcaaactctgtaataaaaaatctacagtcacgttggagatcaccatcccatgaaaattctatttagtattttcagagaaaattgaaggtttttttaaacatcactggatttcttgattgaggaaacaagttctgaaataatagcacaatttcaaagaagagactctttgcaaagttgataacatttcaaaccctgaaggacagtgacttattatgtaagttcaattttgtaagttcattatgtaagatccttttttttttcataatatgtattcttggctgctatgcgtggtttttcaggaaatttaattatcttactgagatgtgaaagcaaaactagtaacagaacttacattttatttcatgctttcttaaacccgtgca

SEQ ID NO: 175121 - DNA, 1471 bp, Homo sapiens
  Payload ID: 14385
  Gene Symbol: RPRM
  Gene Name: reprimo, TP53 dependent G2 arrest mediator candidate
  Uniprot ID: Q9NS64
  ENST ID: ENST00000325926
  CDS Start-End: 244-573
gcgagcgccgggaacgagcaccaccagggctggagcggacggctttagaagagcctagctgctgcgcgcgtcggagaggctcctgggaaactcccacggcccagggactttcgaaagcagagcgaggagccctcgcacgcgctagtctgcgagtgagcgctcagcccggcacctgttcctccagcgccgccgccttcccacccctcggacccgcgccgctcgcggcgcccgcccgttcctgcgatgaatccggccctaggcaaccagacggacgtggcgggcctgttcctggccaacagcagcgaggcgctggagcgagccgtgcgctgctgcacccaggcgtccgtggtgaccgacgacggcttcgcggagggaggcccggacgagcgtagcctgtacataatgcgcgtggtgcagatcgcggtcatgtgcgtgctctcactcaccgtggtcttcggcatcttcttcctcggctgcaatctgctcatcaagtccgagggcatgatcaacttcctcgtgaaggaccggaggccgtctaaggaggtggaggcggtggtcgtggggccctactgacccgccctctgcccccgcggcaaccgctcccacgcctgcccactttgctagcccggctgtgcccctcactatcagagactgggcgaagcaaacctgtcggagtcaattatttctctcgacttcggcctttcggaaagaagcgaccggtttctccctcgccctctgaaagtcctcatgcctggcagtcggaggagagcgcccagactctgaactcagcagaaagtggcaagaagagggcgattagggcgcagaactttggaagctgctacttacttggaatgcggggagaccgacggtgcgaaggcccttctccacccgcaggtgggccaagctctgggggcaggtggagagggcgggcaggggagagacccagcggcactgatcgccttgtgaccggaagagtgacctgttaaaagccacgcagcagactcatggggtctcacaaatccgtgtccgggtgcgctcccactcttctcctgctccccccctgccctggaggggaggggcgataaatacctttgattgtaacgtgccgttttaagaggttttgtgtttgtttgcttgaatacaaatgtttgataagtctttttctgccccagtggcctgtttgcctgcctgaggagttacagttttgtcattgtgggagaaggggtggggggagggggagcctgcgaatttgaacggggtgagttgtttcttttagtgcatttcccactgggtcttttgggaggcgtctagcgttcctgctggccctgggacaaagacccagaatagaactcgtagctcgtgactgcacggtttacgccacaaaagtgctcttgacatccgtgacaccgttttgactttttgtttttttcttatttaacatttccttaataaatgcaacatttaagcgttt

SEQ ID NO: 175122 - DNA, 1093 bp, Homo sapiens
  Payload ID: 14386
  Gene Symbol: RPRML
  Gene Name: reprimo-like
  Uniprot ID: Q8N4K4
  ENST ID: ENST00000322329
  CDS Start-End: 242-604
aggttctccggctccagctcctgcgccgcctgttgctcgctcctccgggcggtcgcttcccgcccggtgcccaggggtaggcggcccgagagcgcgcaggcagccagcctcccgccttcgtcccctccccgtaccgcaggagccggtccgaggggtccggagcgtccctgagagcgcggaccccggcgagcagcccagtgcacccgggactgcgcgccgagacccccggcgccgcgcggcgatgaacgcgaccttcctgaaccacagcggcttggaggaggtggacggcgtgggcggcggcgccggggccgccctgggaaaccgcacccacgggctgggcacgtggctgggctgctgtccagggggcgcaccgctggccgccagcgacggggtccccgcggggctggcgcccgacgagcgcagcctgtgggtgtcgcgggtggcgcagatcgccgtgctctgcgtgctgtcgcttaccgtggtcttcggcgtcttcttcctgggctgcaacctgctcatcaagtccgagagcatgatcaactttctggtgcaggagcgccggccctccaaggacgtgggcgcagccatcctggggctgtactgagcgccatctgggtccgccctcgccagcgctgctgcaagaaggaccccggagacccggaccctcgccccgctctctgcgctctgccgccgcctccgggcgggcagctacgtgcctggggcgcccgggcggggacgcggcgagactgtcggcgggggcgcgggaagggacttggacgcccggctctgtcctgtgtgcgctgcagcgttgcggggtgggagaatgtggggtgagggttcttaccagttttttttgtttgtttgttttttaagacgttcggggcagggtgggagtgggtatggagatgcaatttgggactgcggtcgctcgcgtgggagttttgtgtgtacgttggtgcgggtgggttcggaacacggtgcgagtgggtgaagatgtgaagcgtcagagtcgctgagcttgttggcctgatcttgcgtttggaaagaaatcttgtaataaaactgcagccgtagggcttcaggcagcttccca

SEQ ID NO: 175123 - DNA, 11350 bp, Homo sapiens
  Payload ID: 14387
  Gene Symbol: RGMA
  Gene Name: repulsive guidance molecule family member a
  Uniprot ID: Q96B86
  ENST ID: ENST00000329082
  CDS Start-End: 273-1625
agttgtctcccgagcgctggctgcgccgcccgagccgctgggccggggaagcactggccgttcgctcccgggccggctccgccaggcgctcgcaggcatgcagcccgggagcaggaggcgctccccgggccgctgctgagccggccggggcggcggggaccagcgccagcggagcccctcccaccttgccccggggcagacgagcggcgccccgacaccccctcttctcccgcagccccgccagcgccaccccccgcgggccgcaggggctcatgcagccgccaagggagaggctagtggtaacaggccgagctggatggatgggtatggggagaggggcaggacgttcagccctgggattctggccgaccctcgccttccttctctgcagcttccccgcagccacctccccgtgcaagatcctcaagtgcaactctgagttctggagcgccacgtcgggcagccacgccccagcctcagacgacacccccgagttctgtgcagccttgcgcagctacgccctgtgcacgcggcggacggcccgcacctgccggggtgacctggcctaccactcggccgtccatggcatagaggacctcatgagccagcacaactgctccaaggatggccccacctcgcagccacgcctgcgcacgctcccaccggccggagacagccaggagcgctcggacagccccgagatctgccattacgagaagagctttcacaagcactcggccacccccaactacacgcactgtggcctcttcggggacccacacctcaggactttcaccgaccgcttccagacctgcaaggtgcagggcgcctggccgctcatcgacaataattacctgaacgtgcaggtcaccaacacgcctgtgctgcccggctcagcggccactgccaccagcaagctcaccatcatcttcaagaacttccaggagtgtgtggaccagaaggtgtaccaggctgagatggacgagctcccggccgccttcgtggatggctctaagaacggtggggacaagcacggggccaacagcctgaagatcactgagaaggtgtcaggccagcacgtggagatccaggccaagtacatcggcaccaccatcgtggtgcgccaggtgggccgctacctgacctttgccgtccgcatgccagaggaagtggtcaatgctgtggaggactgggacagccagggtctctacctctgcctgcggggctgccccctcaaccagcagatcgacttccaggccttccacaccaatgctgagggcaccggtgcccgcaggctggcagccgccagccctgcacccacagcccccgagaccttcccatacgagacagccgtggccaagtgcaaggagaagctgccggtggaggacctgtactaccaggcctgcgtcttcgacctcctcaccacgggcgacgtgaacttcacactggccgcctactacgcgttggaggatgtcaagatgctccactccaacaaagacaaactgcacctgtatgagaggactcgggacctgccaggcagggcggctgcggggctgcccctggccccccggcccctcctgggcgccctcgtcccgctcctggccctgctccctgtgttctgctagacgcgtagatgtggagggaggcgcgggctccgtcctctcggcttccccatgtgtgggctgggaccgcccacggggtgcagatctcctggcgtgtccaccatggccccgcagaacgccagggaccgcctgctgccaagggctcaggcacggacccctccccttctagtgcacgtgacaaggttgtggtgactggtgccatgatgtttgacagtagagctgtgtgagagggagagcagctcccctcgccccgcccctgcagtgtgaatgtgtgaaacatcccctcaggctgaagccccccacccccaccagagacacactgggaaccgtcagagtcagctccttccccctcgcaatgcactgaaaggcccggccgactgctgctcgccgatccgtggggccccctgtgcccgccacacgcacgcacacactcttacacgagagcacactcgatccccctaggccagcggggacaccccagccacacagggaggcatccttggggcttggccccaggcagggcaaccccggggcgctgcttggcaccttagcagactgctggaaccttttggccagtaggtcgtgcccgcctggtgccttctggcctgtggcctccctgcccatgttcacctggctgctgtgggtaccagtgcaggtcccggttttcaggcacctgctcagctgcccgtctctggcctgggcccctgccccttccaccctgtgcttagaaagtcgaagtgcttggttctaaatgtctaaacagagaagagatccttgacttctgttcctctctctcctgcagatgcaagagctcctgggcaggggtgcctgggccccagggtgtggcaggagacccagtggatggggccagctggcctgccctgatcctctgcttcctcctcacaaccccaagagcccccagcccggtccatccacgtctggagtctggggagaggagcagggtcttaggactctcagctctgagcatccctggcagggtcttcaacctctaatctcttcccttaagccctgtggccacacagccaggagagacttgccgctggctcccgcctcatttcagcccagggtgctcatccaggggcccagaacagtcccacctgtgctgctgtgcccacagcacaaagccaggcttcactcccaaaagtgcagccaggccctggagggtgatcctgccagcagccctacagctccacaccctacccacccatcggcagcccctctgctgttccccagggacctctcatacactggccaggaggctgcagaacgtgtgtctccccctccctccaagaggtcctgctccctctgccagaaccgtgtgtgggcgggtgggagggcgctcggggcccggcccctccctctccctgctggttttagttggtccctatgttggaagtaaaaagtgaagcactttattttggttgtgtttgctcacgttctgcttggaagtggggacccctcactgcgtccacgtgtctgcgacctgtgtggagtgtcaccgcgtgtacatactgtaaattatttattaatggctaaatgcaagtaaagtttggtttttttgttattttcttttagacgtgttggagtttgttttctgaacagactttggctcccttgaggcgggtggaggatggactttggtggtgggatcccctgcagcaagtgtgtgtgtgtgcgcgcatgtgtgtgtgcgcgcatgtgtgtatgcatgcctgtgtgtgtgcgtgcctgtgtgcgtgcatgtacgcatgtgtgcgcatgcctgtgtgtgcgcccatgcctatgtgtgtgcatgtaggcatgtgtgtgcgcatgtgtatgtgcgtgagaatggtgtgaaggcggatagaagatgcagcagtttaacagccaccacacattgcttttgtaaagtcacttttcctcctcacgatgagctgtctttggagcttggcaggcccagatcctcttgttctagtgacagtggaacacagtcagggagacaggtgactatgtggtggagagacatatggtgccctctgggatgagatgggtgggatagcctgagatctgggatgactccctctcagccactgctatcagcctggagccccagctgttgggactgcctgccaccctccctgccagtgcccatcttctcatagcccgggcggagcagtggtgctgcaggaggctgctgtccacgtcactgtgggaccaggtttattggcagctgtgatcacatttcatctgtacaaactacccagtgaatcaggaagaaattcaggcccattttgccgatgaaacagactctgagattaactgacttgcctagggctccttagcaacgggaaggacaacctgtgcacctaggttagtattgtcctgaagccccttctcttcaaactaaatgccatgaggcagaatagcagcacagttaagccagcctacatcctggcttctccacctccccagcagtgtgaccatgggcaagtcacttcacctctctgagcctgcatgctgttctctggaagatgggggggtgcctgtcccatacagttgtttggagagtcaggagttcattcctgtaaattgcttaggagagggcggggcacacatggcttgtctggtcgtggggagggagggggtggtattatcccaaagcaagataaatcagttaaggggagaaggaaaggggcgatacagaccctggactcttgggagaggtgaacctgcaggctagcaaggggaggagtcccaagagtggccaagttcattaatcccaggcagaccaggaaggctgaagaaaaaggagaactttattttatttttgaaatggagtctggcgtcttgctctgtcgccaggctggagtgcagtggcaccatcccagctcactgcagcccctgcctcccaggttcaagcaattctcctgcctcagcctcccaagtagctgggactacaggcacacaccaccacgcctggctaattttttgtattttagtagagatggtgtttcaccatgttgaccagtatggtcttgatctcctgacctcgtgatccgcctgccttggcctcccaaagtgttgggattacaggcgtgagccaccaccgtgcccggccaaaaaaggagaacgttctaaagccctgttcttgcagggctcccagagagaacacgggagttgggtttgggaggcaggaaccagactggaaaggacaaaacgtacccagcatcttccctggcggccggaaccgtcactacaggccccgtgcccttagcagtcccagggacagagcgactcagggaggcagcaaggaggagcggagccattggtgctcgtccggcacagagaacagttcctgagaagccagggcacacagaagaaaaagaaaaaagaaatctctactagacgaaaatgctaaatggcactagccacaaagtattcttggtttggaattttttttccaggaccctaaatgtaaccggctggaattctttcccaagtgccatgctacttactactggttgccctcacgagcatggaaatgccgtcgtgaatatggaacacagcatcctgagctaaaagattcccaagaagcagcttcatcttgcaggacgggctaggttgggagcctctggaggttcctggctgccagctccgcggaggcctgcggcctggaggtaaatgcattagcacacggaggtgggcgcctctccccgccccatcctgtctcactgatgtgttgccgagaactggagttcttgtttagctaaccagaatgtgcaaggctataggacaggagagaaatggcctttaaaacaaatgaatgagagtcacgatgaagggggcagacgggggggtgaaaatcattaccagaacacttgggcagagacccgtcagagccaggcaggagacagtcatcagagctgtgccagcaagtggcatggagcaggggtggcacttgggctcgggctgcaggcaaacttggcgtcaaaactggctcaacccgtcgcgagctgtgtggtctccttgggattttttgagccttagattccttatttgtaaaatggatttgtgagtctccacctcccgaggtcagtatggaaatccagtgagctaacactcgtcaatggcctcgcacatggccctggcaccacgcatggaggccgccaaaagtggccgcctcctctctgcaattgcatttatttatccatttgataactctattgggtgtctacccagcattgttcaggggggtgtgaggggctaccgcaatgacccagacagactgctgtgcattcttattggaaagacaaggcaataaaccacagttacaaaacccagggtcccatggtaacgagctccacagagaaaagggaagtgggccagaggttccgagagacacacattttggattgcaggagggtgagaaggggcattcatctgtggtggggttaaggggaggcctccgactagctcacctgcatgaatttcaggaacaagccatgcagagccggacagagcattctgtgcagagaaaacagtgtaacagccctagagcagcagcagcaaagggggagtttaagggatggtgggaagccactgtcactggacagtagcaagtggacagaccaggggtcccaggtgaggccacagagcagccaaagtactgcagggctctccggctccgggaggacttgatgtttgactccagttgccagaggaagccgttcacgggctttgagtgtaggaatgatgtgtccgacttgggtctttttattgttcttttttagagacagggtctcactctgtcacccaggctggagtgcagcggcacaatcacagctcactgcagcctccacttcctgggctcaagcaatcctcccacttcagccactcaagtagctgggattacaggtgcctgccgtcacacccggctaattgttaaatttttttggagagacaggatcttgctgttttcccaggctgatcttgaactcctgggctcaagcgagacgtctgtttcagcctcccaaagtgctgggataacaggtgtgagccactgggcctgccttggcttgggtattaaaggaattgttctagttactatatggaggtgacttggggccgctggggaagaaagaggaagtcaggagccagtctgaggcagtggcaatgcagcgattatcagaaataatgggctcaatgatagactggataaagaaaatgtggcacatatacgccatggagtactatgcagccataaaaagggatgagttcatgtcctttgcagggacatggatgaagctggaaaccatcattctcagcaaactaacacaagaacagaaaaccaaacaccgcatgttctcactcgtaagtgggagttgaacaatgagaacacatggacacagggaagggaacatcacacactggggcctgtcagtgggtggggggctgggggagggagagcatcaggagaaatacccaatgtagatgatgacgggttcataggtgcagcaaaccaccatggcacgtgtatacctatgtaacaaacttgtgcgttctgcacgtgtaccccataactgaaagtataatcataattttaagaaaagaaatgatggcctttggggtctaataagaaggtggggctgacagggcttggggagagagcgagcttgacaggagaccacgatgtcttccccaggggtctgagcacctggggaaatggtggtgccatttaccatgactggaaagatcatgggaggagcaggtttgggacactgaaggcccgagagcccctggcaaaccaccagtgtaagtccaagagtccaaaagctgaagaacttggagtccaatgtttgagggtaaaaaacagccagcatgagaaaaagatgaaggccagaagactcgtccagtctagcccttccacattcctctgcccgcttttatcctagcctcgctggcaggtgattagatggtgcccacccaggttaagcgtgggtctctgtctcccagttcactgactcaaatgttaatttcctttggcgacagcctcacagacacacccaggaacgatactttgcatcctccaatccaatcaagttggcactcaatattaaacagtttcggccgggagcggtggctcacgcctgtaatcccagcactttgggaggccaaagcgggcagatcactaagtcaggagatcgagaccatcctggctaacacggtgaaaccccatctctactaaaaatacaaaaaattagccaggcgtggtggtgggcgcctgtagtcccagctactcgggaggctgaggcaagagagtggcgtgaacccgggaggcagaacttgcagcaagcagagatcgcaccactgcactccagcctccagcctgggcgacagagcaagacaccgtctcaaaaaaaaaaaaaaaacaactaacagtttcgttcattaaggcaatgtccatggggcagctcctgcatgccacgccacccctgccctgacatactcccaggctgaccagccagaactggggagagggcatcttgaagaaacagtccaccctccgccctcgcatacctgtgtctcccagcagacaagacacacaagggcagggactgcactttcctgtgtgcaaatctcaggtatggtccagaaatcacatctctttggtctgattggccttacttaccaaacccttgaaacaatggaaagaagcttgctgcaatgggaagacccctgccccccaaaccctctaaccaggagtctacagacctcattccgtggaagttcccattgtcccctgggaaaccaccaccttctgaatcggcacagccaaggcccccaaccctgctatcaacagctttccttagccaccttccccatcctgcagggcttttcaacatttcgactttttaatccttccctccctaagatatagacatggtgttagtagcagaaccctgaaggcaaaggaacagaaactaacactctcagaaagtcctagcaggatggtctgaattaatagacagctgcaggcagccagtgtgcaaggcacgctcgtaatgtcagtggcgttccggaatgagggctgtgatcccaggcagcccagatcccaaggcgaaaacattcatgtcgcccagcatcaccctgtccttgcccagggtgaccctgagacggcacttggattcttccacatctgaactcaaacctgctccctcagctctccccagcaggaattggagccctctccaggccgttcagccaaagcagaatgtgtctggccaagcagatctgcccagagaagaacaaagacgtgttcagacactgtctggggaattggttttgagctcactctgagctccatctgtgcaacaaggccagcgtcagctgttacagagaaggggcttgtggcagtttattaccctggtgagctggctcggggccatgctgaccgcaggactgtaaaggacataaggcagttggcaatatgggaagcagcagtccccaaagcaccccgtcaaggaaacgatgcaagagctctgtccactggaccagccccaccctaccccgccacgccctggcctagggggagggaccttgtgtttcacgggcctggatggccagggatggacagtggcatgggcacagacacacccagaccgaaggaagggcccgggctccagaaccagacccgatccaggctcccagctctgtcacctactggctgcatgaaaagggtgggttttccttgttttgcagcctcagctatctcagctgtgagggaacaatgacgccacctccctcacgtggcggtcctgaagatgaaatgtaatgcatgcagcgcggcggccggcccaccgtgtgctcttagtaactggccgctgttctcttcagccctcccgttactgaccacctcgagggcaccgttcctccaagctgaccatttcctgccagtcacccactgcccagctcgcccagccatggagtgggctctggtccacgtgcatggtgagctgccatctttgtcgtcctctggacaccacgtctacctccttgggaaatagaaacgagtcctgcattgctttgtcaaatttcacaaaaaccctagaaagcagatattgccctggtttacagacggacagacagaagcaaagagaagccaactgacccactccaggttacaagcagggtctggtaggagagcacgcgtccaccccaccgctcactgcgcccacctactcctcgcttgagggcagagaacgagctggggcggggcgctccagggggcacaggcagcctgtgttcaaggcatgctcgtgagccccacagcaggggcggagtcaaaccagggctctggttctggggtgagcagagggtggggccaggcccccactgggaggctgactgaggaggggctcaaagggcaggcaggctccatcagagcggtttgatgagcagggccgctgagtggccctcaggtcaaggctggggccgggaccaccagggaccaggtctgcggggccaggggtccctccccagggtggagcaggaaaactccggcaaccgccttcttgagtggacttgaccttccctttctctgctaatgatctcagattaatcccttaaggcaagtgccccagggtgggtgttggttgcataaaacaagaggagtccttcttcccttccttcctggcacaaacatttgtaggccacccccgatgtggctggtcgtagtctggatttgggggcacattcaggcattcaacaaatacgtcatgaggccccgtgatgagctggggggctatgcttgatgtcggcagtacagctgtggtcgctcgaatgaatgtgcccgccctcacgggactgacctctagtggtgagagacagacactaaccgagtcacatgtgtgattacacgtgtaatcatacttacatatgtaacaacacgagttacacgtgcagtgtggggagggggcccttcacggtgaccagcccatcagggaaggggatgcgggtggcagaaggaagcggcacacccttgtcctcacggagctcacaggaggttctctgaccctcatcttaagccacaggctgtgtctgagcctcactgccctagctatcaactgggtgcaggactaggccttaatcactgggcagcgggaagaactacataagctcatactggcgcaaagccccttgggagaccgcagggaaagccattgcatgaggtggtgacaggctcggccttcagagtcgggctagaatctgagttctgacaatgatccccgccttgacccatctctcctcaggccgccctgagccttccagttaggcctgggctttgggcttccgtgtttgtctctggattgttcggttttagcaagagtcctgctaaattggtcttgctggaatcctccgccctccacatctgattgcccttcctgtctgatcgtggtcttcatgccccacggcctccaggggacgtctgatcacctggcctgccttcagcaagaatccccccaggtgtttcctcttaagaggttttccatccactgagcccaccctgctccttggccatcaattcccacttgcctgtactgtattcagaggggaccccaatctctcttcccagctgcagcggtccctgtccaacactgccccccacctcaaataaagtctttcttactgtctttaacatatgccgtcaataaagttttagcagatcc

SEQ ID NO: 175124 - DNA, 3078 bp, Homo sapiens
  Payload ID: 14387
  Gene Symbol: RGMA
  Gene Name: repulsive guidance molecule family member a
  Uniprot ID: Q96B86
  ENST ID: ENST00000425933
  CDS Start-End: 182-1486
gtagctgagatgcagagagccatcctgcccagacctagacaactcggaagtgggtttttcagcctcctgcaccggtgtcgcgtctgagtgcgactgatgagccagggggcgtcggtggaagcttggggtcggcagtctggttggaaaggagaggctagtggtaacaggccgagctggatggatgggtatggggagaggggcaggacgttcagccctgggattctggccgaccctcgccttccttctctgcagcttccccgcagccacctccccgtgcaagatcctcaagtgcaactctgagttctggagcgccacgtcgggcagccacgccccagcctcagacgacacccccgagttctgtgcagccttgcgcagctacgccctgtgcacgcggcggacggcccgcacctgccggggtgacctggcctaccactcggccgtccatggcatagaggacctcatgagccagcacaactgctccaaggatggccccacctcgcagccacgcctgcgcacgctcccaccggccggagacagccaggagcgctcggacagccccgagatctgccattacgagaagagctttcacaagcactcggccacccccaactacacgcactgtggcctcttcggggacccacacctcaggactttcaccgaccgcttccagacctgcaaggtgcagggcgcctggccgctcatcgacaataattacctgaacgtgcaggtcaccaacacgcctgtgctgcccggctcagcggccactgccaccagcaagctcaccatcatcttcaagaacttccaggagtgtgtggaccagaaggtgtaccaggctgagatggacgagctcccggccgccttcgtggatggctctaagaacggtggggacaagcacggggccaacagcctgaagatcactgagaaggtgtcaggccagcacgtggagatccaggccaagtacatcggcaccaccatcgtggtgcgccaggtgggccgctacctgacctttgccgtccgcatgccagaggaagtggtcaatgctgtggaggactgggacagccagggtctctacctctgcctgcggggctgccccctcaaccagcagatcgacttccaggccttccacaccaatgctgagggcaccggtgcccgcaggctggcagccgccagccctgcacccacagcccccgagaccttcccatacgagacagccgtggccaagtgcaaggagaagctgccggtggaggacctgtactaccaggcctgcgtcttcgacctcctcaccacgggcgacgtgaacttcacactggccgcctactacgcgttggaggatgtcaagatgctccactccaacaaagacaaactgcacctgtatgagaggactcgggacctgccaggcagggcggctgcggggctgcccctggccccccggcccctcctgggcgccctcgtcccgctcctggccctgctccctgtgttctgctagacgcgtagatgtggagggaggcgcgggctccgtcctctcggcttccccatgtgtgggctgggaccgcccacggggtgcagatctcctggcgtgtccaccatggccccgcagaacgccagggaccgcctgctgccaagggctcaggcacggacccctccccttctagtgcacgtgacaaggttgtggtgactggtgccatgatgtttgacagtagagctgtgtgagagggagagcagctcccctcgccccgcccctgcagtgtgaatgtgtgaaacatcccctcaggctgaagccccccacccccaccagagacacactgggaaccgtcagagtcagctccttccccctcgcaatgcactgaaaggcccggccgactgctgctcgccgatccgtggggccccctgtgcccgccacacgcacgcacacactcttacacgagagcacactcgatccccctaggccagcggggacaccccagccacacagggaggcatccttggggcttggccccaggcagggcaaccccggggcgctgcttggcaccttagcagactgctggaaccttttggccagtaggtcgtgcccgcctggtgccttctggcctgtggcctccctgcccatgttcacctggctgctgtgggtaccagtgcaggtcccggttttcaggcacctgctcagctgcccgtctctggcctgggcccctgccccttccaccctgtgcttagaaagtcgaagtgcttggttctaaatgtctaaacagagaagagatccttgacttctgttcctctctctcctgcagatgcaagagctcctgggcaggggtgcctgggccccagggtgtggcaggagacccagtggatggggccagctggcctgccctgatcctctgcttcctcctcacaaccccaagagcccccagcccggtccatccacgtctggagtctggggagaggagcagggtcttaggactctcagctctgagcatccctggcagggtcttcaacctctaatctcttcccttaagccctgtggccacacagccaggagagacttgccgctggctcccgcctcatttcagcccagggtgctcatccaggggcccagaacagtcccacctgtgctgctgtgcccacagcacaaagccaggcttcactcccaaaagtgcagccaggccctggagggtgatcctgccagcagccctacagctccacaccctacccacccatcggcagcccctctgctgttccccagggacctctcatacactggccaggaggctgcagaacgtgtgtctccccctccctccaagaggtcctgctccctctgccagaaccgtgtgtgggcgggtgggagggcgctcggggcccggcccctccctctccctgctggttttagttggtccctatgttggaagtaaaaagtgaagcactttattttggttgtgtttgctcacgttctgcttggaagtggggacccctcactgcgtccacgtgtctgcgacctgtgtggagtgtcaccgcgtgtacatactgtaaattatttattaatggctaaatgcaagtaaagtttggtttttttgttattttctttta

SEQ ID NO: 175125 - DNA, 3038 bp, Homo sapiens
  Payload ID: 14387
  Gene Symbol: RGMA
  Gene Name: repulsive guidance molecule family member a
  Uniprot ID: Q96B86
  ENST ID: ENST00000542321
  CDS Start-End: 152-1456
cgcccgcggccgaggtggacggagcctcccggctcgctgctcccgccggcggagcgaggctgccctttcttcgcagcgtgatttattttcttctttttttctgaactcttcttccagggagaggctagtggtaacaggccgagctggatggatgggtatggggagaggggcaggacgttcagccctgggattctggccgaccctcgccttccttctctgcagcttccccgcagccacctccccgtgcaagatcctcaagtgcaactctgagttctggagcgccacgtcgggcagccacgccccagcctcagacgacacccccgagttctgtgcagccttgcgcagctacgccctgtgcacgcggcggacggcccgcacctgccggggtgacctggcctaccactcggccgtccatggcatagaggacctcatgagccagcacaactgctccaaggatggccccacctcgcagccacgcctgcgcacgctcccaccggccggagacagccaggagcgctcggacagccccgagatctgccattacgagaagagctttcacaagcactcggccacccccaactacacgcactgtggcctcttcggggacccacacctcaggactttcaccgaccgcttccagacctgcaaggtgcagggcgcctggccgctcatcgacaataattacctgaacgtgcaggtcaccaacacgcctgtgctgcccggctcagcggccactgccaccagcaagctcaccatcatcttcaagaacttccaggagtgtgtggaccagaaggtgtaccaggctgagatggacgagctcccggccgccttcgtggatggctctaagaacggtggggacaagcacggggccaacagcctgaagatcactgagaaggtgtcaggccagcacgtggagatccaggccaagtacatcggcaccaccatcgtggtgcgccaggtgggccgctacctgacctttgccgtccgcatgccagaggaagtggtcaatgctgtggaggactgggacagccagggtctctacctctgcctgcggggctgccccctcaaccagcagatcgacttccaggccttccacaccaatgctgagggcaccggtgcccgcaggctggcagccgccagccctgcacccacagcccccgagaccttcccatacgagacagccgtggccaagtgcaaggagaagctgccggtggaggacctgtactaccaggcctgcgtcttcgacctcctcaccacgggcgacgtgaacttcacactggccgcctactacgcgttggaggatgtcaagatgctccactccaacaaagacaaactgcacctgtatgagaggactcgggacctgccaggcagggcggctgcggggctgcccctggccccccggcccctcctgggcgccctcgtcccgctcctggccctgctccctgtgttctgctagacgcgtagatgtggagggaggcgcgggctccgtcctctcggcttccccatgtgtgggctgggaccgcccacggggtgcagatctcctggcgtgtccaccatggccccgcagaacgccagggaccgcctgctgccaagggctcaggcacggacccctccccttctagtgcacgtgacaaggttgtggtgactggtgccatgatgtttgacagtagagctgtgtgagagggagagcagctcccctcgccccgcccctgcagtgtgaatgtgtgaaacatcccctcaggctgaagccccccacccccaccagagacacactgggaaccgtcagagtcagctccttccccctcgcaatgcactgaaaggcccggccgactgctgctcgccgatccgtggggccccctgtgcccgccacacgcacgcacacactcttacacgagagcacactcgatccccctaggccagcggggacaccccagccacacagggaggcatccttggggcttggccccaggcagggcaaccccggggcgctgcttggcaccttagcagactgctggaaccttttggccagtaggtcgtgcccgcctggtgccttctggcctgtggcctccctgcccatgttcacctggctgctgtgggtaccagtgcaggtcccggttttcaggcacctgctcagctgcccgtctctggcctgggcccctgccccttccaccctgtgcttagaaagtcgaagtgcttggttctaaatgtctaaacagagaagagatccttgacttctgttcctctctctcctgcagatgcaagagctcctgggcaggggtgcctgggccccagggtgtggcaggagacccagtggatggggccagctggcctgccctgatcctctgcttcctcctcacaaccccaagagcccccagcccggtccatccacgtctggagtctggggagaggagcagggtcttaggactctcagctctgagcatccctggcagggtcttcaacctctaatctcttcccttaagccctgtggccacacagccaggagagacttgccgctggctcccgcctcatttcagcccagggtgctcatccaggggcccagaacagtcccacctgtgctgctgtgcccacagcacaaagccaggcttcactcccaaaagtgcagccaggccctggagggtgatcctgccagcagccctacagctccacaccctacccacccatcggcagcccctctgctgttccccagggacctctcatacactggccaggaggctgcagaacgtgtgtctccccctccctccaagaggtcctgctccctctgccagaaccgtgtgtgggcgggtgggagggcgctcggggcccggcccctccctctccctgctggttttagttggtccctatgttggaagtaaaaagtgaagcactttattttggttgtgtttgctcacgttctgcttggaagtggggacccctcactgcgtccacgtgtctgcgacctgtgtggagtgtcaccgcgtgtacatactgtaaattatttattaatggctaaatgcaagtaaagtttggtttttttgtta

SEQ ID NO: 175126 - DNA, 3174 bp, Homo sapiens
  Payload ID: 14387
  Gene Symbol: RGMA
  Gene Name: repulsive guidance molecule family member a
  Uniprot ID: Q96B86
  ENST ID: ENST00000543599
  CDS Start-End: 278-1582
ctcccgctcgacgcccggctgcggagctgcctggccatctcctgccctcggggatgtcggcgcagtgcaccgcgtgggctcgcgtcccggcggccctttgcctcggcgcgccggcgtacgggaaggtgcggaccttggattgagggccgaggatgcccattgccaagccgccccggctttcctaagtggacgggagggcacggcgacgattcagcgccggctcgcgccgcagctcaacccaggggagaggctagtggtaacaggccgagctggatggatgggtatggggagaggggcaggacgttcagccctgggattctggccgaccctcgccttccttctctgcagcttccccgcagccacctccccgtgcaagatcctcaagtgcaactctgagttctggagcgccacgtcgggcagccacgccccagcctcagacgacacccccgagttctgtgcagccttgcgcagctacgccctgtgcacgcggcggacggcccgcacctgccggggtgacctggcctaccactcggccgtccatggcatagaggacctcatgagccagcacaactgctccaaggatggccccacctcgcagccacgcctgcgcacgctcccaccggccggagacagccaggagcgctcggacagccccgagatctgccattacgagaagagctttcacaagcactcggccacccccaactacacgcactgtggcctcttcggggacccacacctcaggactttcaccgaccgcttccagacctgcaaggtgcagggcgcctggccgctcatcgacaataattacctgaacgtgcaggtcaccaacacgcctgtgctgcccggctcagcggccactgccaccagcaagctcaccatcatcttcaagaacttccaggagtgtgtggaccagaaggtgtaccaggctgagatggacgagctcccggccgccttcgtggatggctctaagaacggtggggacaagcacggggccaacagcctgaagatcactgagaaggtgtcaggccagcacgtggagatccaggccaagtacatcggcaccaccatcgtggtgcgccaggtgggccgctacctgacctttgccgtccgcatgccagaggaagtggtcaatgctgtggaggactgggacagccagggtctctacctctgcctgcggggctgccccctcaaccagcagatcgacttccaggccttccacaccaatgctgagggcaccggtgcccgcaggctggcagccgccagccctgcacccacagcccccgagaccttcccatacgagacagccgtggccaagtgcaaggagaagctgccggtggaggacctgtactaccaggcctgcgtcttcgacctcctcaccacgggcgacgtgaacttcacactggccgcctactacgcgttggaggatgtcaagatgctccactccaacaaagacaaactgcacctgtatgagaggactcgggacctgccaggcagggcggctgcggggctgcccctggccccccggcccctcctgggcgccctcgtcccgctcctggccctgctccctgtgttctgctagacgcgtagatgtggagggaggcgcgggctccgtcctctcggcttccccatgtgtgggctgggaccgcccacggggtgcagatctcctggcgtgtccaccatggccccgcagaacgccagggaccgcctgctgccaagggctcaggcacggacccctccccttctagtgcacgtgacaaggttgtggtgactggtgccatgatgtttgacagtagagctgtgtgagagggagagcagctcccctcgccccgcccctgcagtgtgaatgtgtgaaacatcccctcaggctgaagccccccacccccaccagagacacactgggaaccgtcagagtcagctccttccccctcgcaatgcactgaaaggcccggccgactgctgctcgccgatccgtggggccccctgtgcccgccacacgcacgcacacactcttacacgagagcacactcgatccccctaggccagcggggacaccccagccacacagggaggcatccttggggcttggccccaggcagggcaaccccggggcgctgcttggcaccttagcagactgctggaaccttttggccagtaggtcgtgcccgcctggtgccttctggcctgtggcctccctgcccatgttcacctggctgctgtgggtaccagtgcaggtcccggttttcaggcacctgctcagctgcccgtctctggcctgggcccctgccccttccaccctgtgcttagaaagtcgaagtgcttggttctaaatgtctaaacagagaagagatccttgacttctgttcctctctctcctgcagatgcaagagctcctgggcaggggtgcctgggccccagggtgtggcaggagacccagtggatggggccagctggcctgccctgatcctctgcttcctcctcacaaccccaagagcccccagcccggtccatccacgtctggagtctggggagaggagcagggtcttaggactctcagctctgagcatccctggcagggtcttcaacctctaatctcttcccttaagccctgtggccacacagccaggagagacttgccgctggctcccgcctcatttcagcccagggtgctcatccaggggcccagaacagtcccacctgtgctgctgtgcccacagcacaaagccaggcttcactcccaaaagtgcagccaggccctggagggtgatcctgccagcagccctacagctccacaccctacccacccatcggcagcccctctgctgttccccagggacctctcatacactggccaggaggctgcagaacgtgtgtctccccctccctccaagaggtcctgctccctctgccagaaccgtgtgtgggcgggtgggagggcgctcggggcccggcccctccctctccctgctggttttagttggtccctatgttggaagtaaaaagtgaagcactttattttggttgtgtttgctcacgttctgcttggaagtggggacccctcactgcgtccacgtgtctgcgacctgtgtggagtgtcaccgcgtgtacatactgtaaattatttattaatggctaaatgcaagtaaagtttggtttttttgttattttctttta

SEQ ID NO: 175127 - DNA, 3172 bp, Homo sapiens
  Payload ID: 14387
  Gene Symbol: RGMA
  Gene Name: repulsive guidance molecule family member a
  ENST ID: ENST00000554387
  CDS Start-End: 132-317
agacctagacaactcggaagtgggtttttcagcctcctgcaccggtgtcgcgtctgagtgcgactgatgagccagggggcgtcggtggaagcttgggggagaggctagtggtaacaggccgagctggatggatgggtatggggagaggggcaggacgttcagccctgggattctggccgaccctcgccttccttctctgcagcttccccgcagctattaaaagaagcccaggaagtttctgcgcagcgttggagatgaggagactgtggaatttgatgtcgtggaaggagagaagggtgcagaagccgctaatgtaactgggcccggggaggtgcccgtgaagggcagctgttatgcccccaacctacccacctccccgtgcaagatcctcaagtgcaactctgagttctggagcgccacgtcgggcagccacgccccagcctcagacgacacccccgagttctgtgcagccttgcgcagctacgccctgtgcacgcggcggacggcccgcacctgccggggtgacctggcctaccactcggccgtccatggcatagaggacctcatgagccagcacaactgctccaaggatggccccacctcgcagccacgcctgcgcacgctcccaccggccggagacagccaggagcgctcggacagccccgagatctgccattacgagaagagctttcacaagcactcggccacccccaactacacgcactgtggcctcttcggggacccacacctcaggactttcaccgaccgcttccagacctgcaaggtgcagggcgcctggccgctcatcgacaataattacctgaacgtgcaggtcaccaacacgcctgtgctgcccggctcagcggccactgccaccagcaagctcaccatcatcttcaagaacttccaggagtgtgtggaccagaaggtgtaccaggctgagatggacgagctcccggccgccttcgtggatggctctaagaacggtggggacaagcacggggccaacagcctgaagatcactgagaaggtgtcaggccagcacgtggagatccaggccaagtacatcggcaccaccatcgtggtgcgccaggtgggccgctacctgacctttgccgtccgcatgccagaggaagtggtcaatgctgtggaggactgggacagccagggtctctacctctgcctgcggggctgccccctcaaccagcagatcgacttccaggccttccacaccaatgctgagggcaccggtgcccgcaggctggcagccgccagccctgcacccacagcccccgagaccttcccatacgagacagccgtggccaagtgcaaggagaagctgccggtggaggacctgtactaccaggcctgcgtcttcgacctcctcaccacgggcgacgtgaacttcacactggccgcctactacgcgttggaggatgtcaagatgctccactccaacaaagacaaactgcacctgtatgagaggactcgggacctgccaggcagggcggctgcggggctgcccctggccccccggcccctcctgggcgccctcgtcccgctcctggccctgctccctgtgttctgctagacgcgtagatgtggagggaggcgcgggctccgtcctctcggcttccccatgtgtgggctgggaccgcccacggggtgcagatctcctggcgtgtccaccatggccccgcagaacgccagggaccgcctgctgccaagggctcaggcacggacccctccccttctagtgcacgtgacaaggttgtggtgactggtgccatgatgtttgacagtagagctgtgtgagagggagagcagctcccctcgccccgcccctgcagtgtgaatgtgtgaaacatcccctcaggctgaagccccccacccccaccagagacacactgggaaccgtcagagtcagctccttccccctcgcaatgcactgaaaggcccggccgactgctgctcgccgatccgtggggccccctgtgcccgccacacgcacgcacacactcttacacgagagcacactcgatccccctaggccagcggggacaccccagccacacagggaggcatccttggggcttggccccaggcagggcaaccccggggcgctgcttggcaccttagcagactgctggaaccttttggccagtaggtcgtgcccgcctggtgccttctggcctgtggcctccctgcccatgttcacctggctgctgtgggtaccagtgcaggtcccggttttcaggcacctgctcagctgcccgtctctggcctgggcccctgccccttccaccctgtgcttagaaagtcgaagtgcttggttctaaatgtctaaacagagaagagatccttgacttctgttcctctctctcctgcagatgcaagagctcctgggcaggggtgcctgggccccagggtgtggcaggagacccagtggatggggccagctggcctgccctgatcctctgcttcctcctcacaaccccaagagcccccagcccggtccatccacgtctggagtctggggagaggagcagggtcttaggactctcagctctgagcatccctggcagggtcttcaacctctaatctcttcccttaagccctgtggccacacagccaggagagacttgccgctggctcccgcctcatttcagcccagggtgctcatccaggggcccagaacagtcccacctgtgctgctgtgcccacagcacaaagccaggcttcactcccaaaagtgcagccaggccctggagggtgatcctgccagcagccctacagctccacaccctacccacccatcggcagcccctctgctgttccccagggacctctcatacactggccaggaggctgcagaacgtgtgtctccccctccctccaagaggtcctgctccctctgccagaaccgtgtgtgggcgggtgggagggcgctcggggcccggcccctccctctccctgctggttttagttggtccctatgttggaagtaaaaagtgaagcactttattttggttgtgtttgctcacgttctgcttggaagtggggacccctcactgcgtccacgtgtctgcgacctgtgtggagtgtcaccgcgtgtacatactgtaaattatttattaatggctaaatgcaagtaaagtttggtttttttgtt

SEQ ID NO: 175128 - DNA, 547 bp, Homo sapiens
  Payload ID: 14387
  Gene Symbol: RGMA
  Gene Name: repulsive guidance molecule family member a
  ENST ID: ENST00000555598
  CDS Start-End: 278-547
ctcccgctcgacgcccggctgcggagctgcctggccatctcctgccctcggggatgtcggcgcagtgcaccgcgtgggctcgcgtcccggcggccctttgcctcggcgcgccggcgtacgggaaggtgcggaccttggattgagggccgaggatgcccattgccaagccgccccggctttcctaagtggacgggagggcacggcgacgattcagcgccggctcgcgccgcagctcaacccaggggagaggctagtggtaacaggccgagctggatggatgggtatggggagaggggcaggacgttcagccctgggattctggccgaccctcgccttccttctctgcagcttccccgcagccacctccccgtgcaagatcctcaagtgcaactctgagttctggagcgccacgtcgggcagccacgccccagcctcagacgacacccccgagttctgtgcagccttgcgcagctacgccctgtgcacgcggcggacggcccgcacctgccggggtgacctggcctaccactcggccgtccatggcata

SEQ ID NO: 175129 - DNA, 1929 bp, Homo sapiens
  Payload ID: 14387
  Gene Symbol: RGMA
  Gene Name: repulsive guidance molecule family member a
  ENST ID: ENST00000557301
  CDS Start-End: 373-1749
gtttcatccaaaagatgtctctcaggggaagttaccagtcccttaaatatcacaacggcagcagaactgcagggcccagggaaccttgggaaggagatgtttctttcccagaaaaataagcgacagagttaggaaaggtcaccatactgaagccctcccaagtgcagccttgcgggcctcgcagagagcgccaaaccatccggccctgcgcgccacgcggaccggcatagccatctctctggagtggcagctgtgccaaggtggcaaggttaggcccgcaggccctcagcacgggggcgcagccggggcaagtcttcaggaagcagcgaggtgcttgaagggggtgctggaggcaggccaaacccagtcaggatgggtggcctggggccacgacgggcgggaacctcgagggagaggctagtggtaacaggccgagctggatggatgggtatggggagaggggcaggacgttcagccctgggattctggccgaccctcgccttccttctctgcagcttccccgcagccacctccccgtgcaagatcctcaagtgcaactctgagttctggagcgccacgtcgggcagccacgccccagcctcagacgacacccccgagttctgtgcagccttgcgcagctacgccctgtgcacgcggcggacggcccgcacctgccggggtgacctggcctaccactcggccgtccatggcatagaggacctcatgagccagcacaactgctccaaggatggccccacctcgcagccacgcctgcgcacgctcccaccggccggagacagccaggagcgctcggacagccccgagatctgccattacgagaagagctttcacaagcactcggccacccccaactacacgcactgtggcctcttcggggacccacacctcaggactttcaccgaccgcttccagacctgcaaggtgcagggcgcctggccgctcatcgacaataattacctgaacgtgcaggtcaccaacacgcctgtgctgcccggctcagcggccactgccaccagcaagctcaccatcatcttcaagaacttccaggagtgtgtggaccagaaggtgtaccaggctgagatggacgagctcccggccgccttcgtggatggctctaagaacggtggggacaagcacggggccaacagcctgaagatcactgagaaggtgtcaggccagcacgtggagatccaggccaagtacatcggcaccaccatcgtggtgcgccaggtgggccgctacctgacctttgccgtccgcatgccagaggaagtggtcaatgctgtggaggactgggacagccagggtctctacctctgcctgcggggctgccccctcaaccagcagatcgacttccaggccttccacaccaatgctgagggcaccggtgcccgcaggctggcagccgccagccctgcacccacagcccccgagaccttcccatacgagacagccgtggccaagtgcaaggagaagctgccggtggaggacctgtactaccaggcctgcgtcttcgacctcctcaccacgggcgacgtgaacttcacactggccgcctactacgcgttggaggatgtcaagatgctccactccaacaaagacaaactgcacctgtatgagaggactcgggacctgccaggcagggcggctgcggggctgcccctggccccccggcccctcctgggcgccctcgtcccgctcctggccctgctccctgtgttctgctagacgcgtagatgtggagggaggcgcgggctccgtcctctcggcttccccatgtgtgggctgggaccgcccacggggtgcagatctcctggcgtgtccaccatggccccgcagaacgccagggaccgcctgctgccaagggctcaggcacggacccctccccttctagtgcacgtgacaagg

SEQ ID NO: 175130 - DNA, 989 bp, Homo sapiens
  Payload ID: 14387
  Gene Symbol: RGMA
  Gene Name: repulsive guidance molecule family member a
  ENST ID: ENST00000557420
  CDS Start-End: 149-289
ccgcggccgaggtggacggagcctcccggctcgctgctcccgccggcggagcgaggctgccctttcttcgcagcgtgatttattttcttctttttttctgaactcttcttccagggagaggctagtggtaacaggccgagctggatggatgggtatggggagaggggcaggacgttcagccctgggattctggccgaccctcgccttccttctctgcagcttccccgcagctcaccatcatcttcaagaacttccaggagtgtgtggaccagaaggtgtaccaggctgagatggacgagctcccggccgccttcgtggatggctctaagaacggtggggacaagcacggggccaacagcctgaagatcactgagaaggtgtcaggccagcacgtggagatccaggccaagtacatcggcaccaccatcgtggtgcgccaggtgggccgctacctgacctttgccgtccgcatgccagaggaagtggtcaatgctgtggaggactgggacagccagggtctctacctctgcctgcggggctgccccctcaaccagcagatcgacttccaggccttccacaccaatgctgagggcaccggtgcccgcaggctggcagccgccagccctgcacccacagcccccgagaccttcccatacgagacagccgtggccaagtgcaaggagaagctgccggtggaggacctgtactaccaggcctgcgtcttcgacctcctcaccacgggcgacgtgaacttcacactggccgcctactacgcgttggaggatgtcaagatgctccactccaacaaagacaaactgcacctgtatgagaggactcgggacctgccaggcagggcggctgcggggctgcccctggccccccggcccctcctgggcgccctcgtcccgctcctggccctgctccctgtgttctgctagacgcgtagatgtggagggaggcgcgggctccgtcctctcggcttccccatg

SEQ ID NO: 175131 - DNA, 320 bp, Homo sapiens
  Payload ID: 14387
  Gene Symbol: RGMA
  Gene Name: repulsive guidance molecule family member a
  ENST ID: ENST00000556950
  CDS Start-End: 290-320
acacgtcccttacaccgtgtgcgggctgggagctccttccctcagcccggctcgcggagccccggacggagccggccacccgactgtcccgccgtgaacccccattggcccgcgccgcccgggcccccgcctcccgctcgacgcccggctgcggagctgcctggccatctcctgccctcggggatgtcggcgcagtgcaccgcgtgggctcgcgtcccggcggccctttgcctcggcgcgccggcgtacgggaagggagaggctagtggtaacaggccgagctggatggatgggtatggggagaggggcaggacgttcag

SEQ ID NO: 175132 - DNA, 1889 bp, Homo sapiens
  Payload ID: 14387
  Gene Symbol: RGMA
  Gene Name: repulsive guidance molecule family member a
  ENST ID: ENST00000556658
  CDS Start-End: 822-1847
aagtgggtttttcagcctcctgcaccggtgtcgcgtctgagtgcgactgatgagccagggggcgtcggtggaagcttgggggagaggctagtggtaacaggccgagctggatggatgggtatggggagaggggcaggacgttcagccctgggattctggccgaccctcgccttccttctctgcagcttccccgcagacagctattaaaagaagcccaggaagtttctgcgcagcgttggagatgaggagactgtggaatttgatgtcgtggaaggagagaagggtgcagaagccgctaatgtaactgggcccggggaggtgcccgtgaagggcagctgttatgcccccaacctacgtaagtttcgccgattcatcccccggcctccctcagttgccccaccacccatggtggcagagatcccttcagcggggacagaacctggcagagaaggggaacgggccaaagactccgcgcagcggcccagacgacggcgccccccacccttcttctaccgacggtggtttgtgcgagtccctcggccccccagccagcaacagcctacagagagcactgacggggtagagcccaaagagccccattggaggggcagcaacagcagggagccacctccccgtgcaagatcctcaagtgcaactctgagttctggagcgccacgtcgggcagccacgccccagcctcagacgacacccccgagttctgtgcagccttgcgcagctacgccctgtgcacgcggcggacggcccgcacctgccggggtgacctggcctaccactcggccgtccatggcatagaggacctcatgagccagcacaactgctccaaggatggccccacctcgcagccacgcctgcgcacgctcccaccggccggagacagccaggagcgctcggacagccccgagatctgccattacgagaagagctttcacaagcactcggccacccccaactacacgcactgtggcctcttcggggacccacacctcaggactttcaccgaccgcttccagacctgcaaggtgcagggcgcctggccgctcatcgacaataattacctgaacgtgcaggtcaccaacacgcctgtgctgcccggctcagcggccactgccaccagcaagctcaccatcatcttcaagaacttccaggagtgtgtggaccagaaggtgtaccaggctgagatggacgagctcccggccgccttcgtggatggctctaagaacggtggggacaagcacggggccaacagcctgaagatcactgagaaggtgtcaggccagcacgtggagatccaggccaagtacatcggcaccaccatcgtggtgcgccaggtgggccgctacctgacctttgccgtccgcatgccagaggaagtggtcaatgctgtggaggactgggacagccagggtctctacctctgcctgcggggctgccccctcaaccagcagatcgacttccaggccttccacaccaatgctgagggcaccggtgcccgcaggctggcagccgccagccctgcacccacagcccccgagaccttcccatacgagacagccgtggccaagtgcaaggagaagctgccggtggaggacctgtactaccaggcctgcgtcttcgacctcctcaccacgggcgacgtgaacttcacactggccgcctactacgcgttggaggatgtcaagatgctccactccaacaaagacaaactgcacctgtatgagaggactcgggacctgccaggcagggcggctgcggggctgcccctggccccccggcccctcctgggcgccctcgtcccgctcctggccctgctccctgtgttctgctagacgcgtagatgtggagggaggcgcgggctccgtcctctcggc

SEQ ID NO: 175133 - DNA, 4580 bp, Homo sapiens
  Payload ID: 14388
  Gene Symbol: RGMB
  Gene Name: repulsive guidance molecule family member b
  ENST ID: ENST00000308234
  CDS Start-End: 403-1839
atttgaggctgactggggagaaagctgcctggaggaagctgctggggtgcggggggctgagggatttggctccccgccctctcccctagatggcggagaaatcgggctagctggaagggcgcagctcctctcccagagctcattctggagtcggagaactgggagagcggcccccgaggcggagcctccctcccgccccgagtcgcgctgccccccacctgggggagaggggcgggcgccgcgctgccttccctccgcgcctcggccgcgtggcttgcggcttattttcccagctggcaagcgtcgcgctgcagacaagggaatgcctgtggtcctgcgtgttccgaagttcaggggccccctgatcccgctgagccccctccaggagcgaaagggttaagaatgataaggaagaagaggaagcgaagcgcgccccccggcccatgccgcagccacgggcccagacccgccacggcgcccgcgccgccgccctcgccggagcccacgagacctgcatggacgggcatgggcttgagagcagcaccttccagcgccgccgctgccgccgccgaggttgagcagcgccgcagccccgggctctgccccccgccgctggagctgctgctgctgctgctgttcagcctcgggctgctccacgcaggtgactgccaacagccagcccaatgtcgaatccagaaatgcaccacggacttcgtgtccctgacttctcacctgaactctgccgttgacggctttgactctgagttttgcaaggccttgcgtgcctatgctggctgcacccagcgaacttcaaaagcctgccgtggcaacctggtataccattctgccgtgttgggtatcagtgacctcatgagccagaggaattgttccaaggatggacccacatcctctaccaaccccgaagtgacccatgatccttgcaactatcacagccacgctggagccagggaacacaggagaggggaccagaaccctcccagttaccttttttgtggcttgtttggagatcctcacctcagaactttcaaggataacttccaaacatgcaaagtagaaggggcctggccactcatagataataattatctttcagttcaagtgacaaacgtacctgtggtccctggatccagtgctactgctacaaataagatcactattatcttcaaagcccaccatgagtgtacagatcagaaagtctaccaagctgtgacagatgacctgccggccgcctttgtggatggcaccaccagtggtggggacagcgatgccaagagcctgcgtatcgtggaaagggagagtggccactatgtggagatgcacgcccgctatatagggaccacagtgtttgtgcggcaggtgggtcgctacctgacccttgccatccgtatgcctgaagacctggccatgtcctacgaggagagccaggacctgcagctgtgcgtgaacggctgccccctgagtgaacgcatcgatgacgggcagggccaggtgtctgccatcctgggacacagcctgcctcgcacctccttggtgcaggcctggcctggctacacactggagactgccaacactcaatgccatgagaagatgccagtgaaggacatctatttccagtcctgtgtcttcgacctgctcaccactggtgatgccaactttactgccgcagcccacagtgccttggaggatgtggaggccctgcacccaaggaaggaacgctggcacattttccccagcagtggcaatgggactccccgtggaggcagtgatttgtctgtcagtctaggactcacctgcttgatccttatcgtgtttttgtaggggttgtcttttgttttggttttttattttttgtctataacaaaattttaaaatatatattgtcataatatattgagtaaaagagtatatatgtatataccatgtatatgacaggatgtttgtcctgggacacccaccagattgtacatactgtgtttggctgttttcacatatgttggatgtagtgttctttgattgtatcaattttgttttgcagttctgtgaaatgttttataatgtccctgcccagggacctgttagaaagcactttattttttatatattaaatatttatgtgtgtgcttggttgatatgtatagtacatatacacagacatccatatgcagcgtttcctttgaaggtgaccagttgtttgtagctattcttggctgtaccttcctgccctttcccattgctactgatttgccacggtgtgcagcttttactcgccaccttccggtggagctgcctcgttcctttgaactatgccctcacccttctgccctcacttgatttgaaagggtcgttaactctcccttacaggtgctttgactcttaaacgctgatcttaagaagctctcttcatctaagagctgttactttttcagaagggggggtattattggtattctgattactctcaattctaattgttatatatttgagcccatacagtgtattaggttgaaccatagaaactgctattctcgtaggtcaaaagggtctagtgatggaagttttgtagataagtaccaggcatctcagtaactcctagactttttctcatcccatgccccgttttaaattgtcagttttccctctgactcttctgtgttaaaacatgaaactataaatttagtaattatcatgccttgctctttttaatctatatgactgatgcaagcccctcttcttaaccgtttcttggctttgagcccagaaacacagctctccctgtctccaactccagtaagccctcctcagcctcaccttacgaatccaaagaactggggtttgttaggttctttctctaatgtagaggcccagatcccatcacaaagtttttcattcttccttgtccaccatgatcttcatcacagtctttgatatgtctgcatgcaaagtggaacagagttgggcggcaatgacagaagagcttccttggcctgactcggtgtgcggccacttcggcactgcttaatccagatattcttgttaactaagcattgtgcttcccaggtggtctgaagtcaggtactctctctctcaacacctgtagttgaatatgatttggtcagttgctcgttgtaacttggagaaattcctataaagtaagatctccttgcctcttccatccattgttggcacccccttgcaaaaggaaaagaacagcaaaagtcaggagcagtaatctgagaaagttaactccaggataggtaggtttctattgttatagctagatgtaaatctttagttccaagaagtgatagagtttctgctttaataatttgttgataagtttacataaacagaaataaaagatactatctttaccgtagtagttcaggccaagattatgcttagttttagttctccaggtagttacttttgccatgtcctattgatcagtgacactgccagaggcccataccggcaagaggaagaggacgtcattttgtaaagtttaacttcttagcgaactgatgtgccacccagtcacagagtggagttgtgaattcatgtagaggtggcaaacctctaccttgtgttgatgagagaataatcttgggcagtctgggaaaataaggaaggcatctccttcttactcatggagattcaactatagagagttgaaacctaaacccgccttccttttatagaagctggactagagacggactgaccatcagctctgaactgtggctttttttgttcacctatgatgccatgtaccaaattcagaagctatcgttaataatttgttttataattgagtagtacaagcgaggaaaaaatacggaggataaccactatttttgtgcaaataatatgaaagtgaagtaaaagcaatagaagaaatttctataggatctgggtttagagtgtgtatcattaataaatatacctttgctcttttcagggaaaataacaaccacccttactgatagttgggaaaagaagattgggttattttgccatatcatttagctggaagtgacatttaaaagcaccctgcatcactagtaatagtgtattttgctattctgcccttgtaatcggtgtccctgtaaaacaatccccacagattactttcagaaatagatgtatttctctacgtaagggccaggtttattttctccttttttgagatttctagaaaaaatgctgcttgcacatgttggttcttgaaaccttagctagaagaatttcaggtcataccaacatgtggataggctatagctgttcagaggtctcctgggggagcttaaaacgggggaaacactggttttcacagatgctccacatggctgtctttaaaagactcaaaacttttttttgtcctctttgttatgcttggaagctcccccccccccaacagtgtgtcgagtctttgcaaagaaacctttagatgtggttcatagatatatgaatacgtatctgtgtaaaacagtgagtgtgcagtgtgtaaatactttaaattattatgctagaaaaataaagttacataccttgctgtggaa

SEQ ID NO: 175134 - DNA, 2052 bp, Homo sapiens
  Payload ID: 14388
  Gene Symbol: RGMB
  Gene Name: repulsive guidance molecule family member b
  Uniprot ID: Q6NW40
  ENST ID: ENST00000513185
  CDS Start-End: 437-1750
gagattgatcgaccgcgggggctgccgcgcagagatatccgggccgccggtgggtggtcgctagggctgggccagcctcttggaggtccacgcccgccgagcccacgctggctggggccggggtgccggcgcgctcgggactcgtctcagcagtcgctcacggtctttgtgtcttctcttccgcccctttccctgcctgccgcctccggccgccacgatgcccctgcgccccgctgctgccgccgcggactggctgcgccggctgcgcgctgcttgctgcggcggtggtggcgccccatctgctacacgggcctgaagaaggaagaagaggaagcgaagcgcgccccccggcccatgccgcagccacgggcccagacccgccacggcgcccgcgccgccgccctcgccggagcccacgagacctgcatggacgggcatgggcttgagagcagcaccttccagcgccgccgctgccgccgccgaggttgagcagcgccgcagccccgggctctgccccccgccgctggagctgctgctgctgctgctgttcagcctcgggctgctccacgcaggtgactgccaacagccagcccaatgtcgaatccagaaatgcaccacggacttcgtgtccctgacttctcacctgaactctgccgttgacggctttgactctgagttttgcaaggccttgcgtgcctatgctggctgcacccagcgaacttcaaaagcctgccgtggcaacctggtataccattctgccgtgttgggtatcagtgacctcatgagccagaggaattgttccaaggatggacccacatcctctaccaaccccgaagtgacccatgatccttgcaactatcacagccacgctggagccagggaacacaggagaggggaccagaaccctcccagttaccttttttgtggcttgtttggagatcctcacctcagaactttcaaggataacttccaaacatgcaaagtagaaggggcctggccactcatagataataattatctttcagttcaagtgacaaacgtacctgtggtccctggatccagtgctactgctacaaataagatcactattatcttcaaagcccaccatgagtgtacagatcagaaagtctaccaagctgtgacagatgacctgccggccgcctttgtggatggcaccaccagtggtggggacagcgatgccaagagcctgcgtatcgtggaaagggagagtggccactatgtggagatgcacgcccgctatatagggaccacagtgtttgtgcggcaggtgggtcgctacctgacccttgccatccgtatgcctgaagacctggccatgtcctacgaggagagccaggacctgcagctgtgcgtgaacggctgccccctgagtgaacgcatcgatgacgggcagggccaggtgtctgccatcctgggacacagcctgcctcgcacctccttggtgcaggcctggcctggctacacactggagactgccaacactcaatgccatgagaagatgccagtgaaggacatctatttccagtcctgtgtcttcgacctgctcaccactggtgatgccaactttactgccgcagcccacagtgccttggaggatgtggaggccctgcacccaaggaaggaacgctggcacattttccccagcagtggcaatgggactccccgtggaggcagtgatttgtctgtcagtctaggactcacctgcttgatccttatcgtgtttttgtaggggttgtcttttgttttggttttttattttttgtctataacaaaattttaaaatatatattgtcataatatattgagtaaaagagtatatatgtatataccatgtatatgacaggatgtttgtcctgggacacccaccagattgtacatactgtgtttggctgttttcacatatgttggatgtagtgttctttgattgtatcaattttgttttgcagttctgtgaaatgttttataatgtccctgcccagggacctgttagaaagcactttattttttatatattaaatatttatgtgtgtg

SEQ ID NO: 175135 - DNA, 1413 bp, Homo sapiens
  Payload ID: 14389
  Gene Symbol: RMND1
  Gene Name: required for meiotic nuclear division 1 homolog
  Uniprot ID: Q9NWS8
  ENST ID: ENST00000336451
  CDS Start-End: 316-1032
atcaactttaaagatattttaaacttgatgaagacttctgaatctatcagaaaacaggttagaatgtctgtcttcaagtcttgattctgaaaagtagcccctgagcctgtttcattttggctgtgtttttattactgtgcagctgacaccccttggaaaggacctaatgcactgcacagcatttgcaacggcagatgagtatcatctgggaaatctgtctcaagatctggcctcccacggatatgttgaagtaacaagcttgcctagaggtacttcttcttgaacctggggccaaatgcagcaaatattttggtgatgggtgtggaaaattctgcaaaagaaggtgatcctggaacaatattcttcttcagggaaggagctgctgtgttttggaatgtgaaagacaaaactatgaagcatgtgatgaaagttctagaaaaacatgaaattcagccctatgaaatcgcactggtacactgggaaaatgaagaacttaactacataaaaatagagggacagtcaaaacttcacaggggggaaatcaagttaaattcagagctggatttagatgatgccattctagagaagtttgctttctccaatgctctatgcctttctgtaaaactggcaatttgggaagcatcactggataaatttattgaatctattcagtcaattcctgaggctttaaaagctgggaagaaagtgaaactatctcatgaagaagttatgcagaaaatcggtgaactctttgctctaaggcaccgtataaacttgagttcagacttcctgattactcctgatttctactgggacagagaaaacctggaaggactttacgataaaacgtgtcaattccttagcattggccgaagagttaaggtcatgaatgaaaaacttcagcactgcatggaactaacagatctaatgcggaatcacctgaatgagaagagggcactccgcttggagtggatgattgtcatcctcattaccatagaggtaatgtttgagctgggacgagtatttttctgatcaagtgataaccaaagtgtcactgcaagagatattcaagttctacaatcaaaaattaaatgttcggcccggcgcggtgcctcatgcctgtaatcccagcactttcggaggccaagaagggtggcttgagatgagatcaggagctcaagacaagcctggccaacatggtgaaaccccatctctactaaaaataccaaaattagccaggtgtgttggcacacgcccgtcatctcagctactcaggaggctgaggcaggagaatctcttgaacttgggaggcggaggttgcagtgagctaagatcacaccactgcactccagccagggcaacagtgagactcagtctcaaaaataaacaataaaataaataaataaatgttca

SEQ ID NO: 175136 - DNA, 1854 bp, Homo sapiens
  Payload ID: 14389
  Gene Symbol: RMND1
  Gene Name: required for meiotic nuclear division 1 homolog
  Uniprot ID: Q9NWS8
  ENST ID: ENST00000367303
  CDS Start-End: 124-1473
gagatgggttggctgcagtagtgagaggctgggggtgcggctctttccctgcagtcctgccgaggaagcgtgcgtccctggcgcttccttcttctcttccggcggagagcttgggatgtggtaatgccagccacactcctcagagccgtggccagatctcatcatatattatcaaaagcacatcagtgccgaagaatcggtcatctaatgttaaaaccacttaaggaatttgaaaatacaacatgcagcacactgacaatacgtcaaagcttggatttgttccttcctgataaaacagctagtggtttgaataagtctcagatcctggaaatgaaccaaaaaaagtcagataccagcatgctgtctccattaaatgctgctcgttgccaagatgaaaaggcacaccttccaaccatgaaatcctttggtactcacaggagagtgacccacaaaccaaatctgttgggttctaaatggtttataaaaatattaaagaggcatttctcatctgtatcaacggaaacatttgttccaaaacaagacttcccacaggtgaagagaccactaaaagcatccaggaccagacagccatccaggaccaaccttccagttctgtctgtgaacgaggacctaatgcactgcacagcatttgcaacggcagatgagtatcatctgggaaatctgtctcaagatctggcctcccacggatatgttgaagtaacaagcttgcctagagatgcagcaaatattttggtgatgggtgtggaaaattctgcaaaagaaggtgatcctggaacaatattcttcttcagggaaggagctgctgtgttttggaatgtgaaagacaaaactatgaagcatgtgatgaaagttctagaaaaacatgaaattcagccctatgaaatcgcactggtacactgggaaaatgaagaacttaactacataaaaatagagggacagtcaaaacttcacaggggggaaatcaagttaaattcagagctggatttagatgatgccattctagagaagtttgctttctccaatgctctatgcctttctgtaaaactggcaatttgggaagcatcactggataaatttattgaatctattcagtcaattcctgaggctttaaaagctgggaagaaagtgaaactatctcatgaagaagttatgcagaaaatcggtgaactctttgctctaaggcaccgtataaacttgagttcagacttcctgattactcctgatttctactgggacagagaaaacctggaaggactttacgataaaacgtgtcaattccttagcattggccgaagagttaaggtcatgaatgaaaaacttcagcactgcatggaactaacagatctaatgcggaatcacctgaatgagaagagggcactccgcttggagtggatgattgtcatcctcattaccatagaggtaatgtttgagctgggacgagtatttttctgatcaagtgataaccaaagtgtcactgcaagagatattcaagttctacaatcaaaaattaaatgttcggcccggcgcggtgcctcatgcctgtaatcccagcactttcggaggccaagaagggtggcttgagatgagatcaggagctcaagacaagcctggccaacatggtgaaaccccatctctactaaaaataccaaaattagccaggtgtgttggcacacgcccgtcatctcagctactcaggaggctgaggcaggagaatctcttgaacttgggaggcggaggttgcagtgagctaagatcacaccactgcactccagccagggcaacagtgagactcagtctcaaaaataaacaataaaataaataaataaatgttca

SEQ ID NO: 175137 - DNA, 743 bp, Homo sapiens
  Payload ID: 14389
  Gene Symbol: RMND1
  Gene Name: required for meiotic nuclear division 1 homolog
  ENST ID: ENST00000444024
  CDS Start-End: 111-743
gggttggctgcagtagtgagaggctgggggtgcggctctttccctgcagtcctgccgaggaagcgtgcgtccctggcgcttccttcttctcttccggcggagaggacctaatgcactgcacagcatttgcaacggcagatgagtatcatctgggaaatctgtctcaagatctggcctcccacggatatgttgaagtaacaagcttgcctagagatgcagcaaatattttggtgatgggtgtggaaaattctgcaaaagaaggtgatcctggaacaatattcttcttcagggaaggagctgctgtgttttggaatgtgaaagacaaaactatgaagcatgtgatgaaagttctagaaaaacatgaaattcagccctatgaaatcgcactggtacactgggaaaatgaagaacttaactacataaaaatagagggacagtcaaaacttcacaggggggaaatcaagttaaattcagagctggatttagatgatgccattctagagaagtttgctttctccaatgctctatgcctttctgtaaaactggcaatttgggaagcatcactggataaatttattgaatctattcagtcaattcctgaggctttaaaagctgggaagaaagtgaaactatctcatgaagaagttatgcagaaaatcggtgaactctttgctctaaggcaccgtataaacttgagttcagacttcctgattactcctgatttctactgggacagagaaaac

SEQ ID NO: 175138 - DNA, 1484 bp, Homo sapiens
  Payload ID: 14389
  Gene Symbol: RMND1
  Gene Name: required for meiotic nuclear division 1 homolog
  ENST ID: ENST00000622845
  CDS Start-End: 173-1012
ggaccagagttcagtgcggctgcgcagtagcgggggtgggcgggagcgcccttccaggagatgggttggctgcagtagtgagaggctgggggtgcggctctttccctgcagtcctgccgaggaagcgtgcgtccctggcgcttccttcttctcttccggcggagaggacctaatgcactgcacagcatttgcaacggcagatgagtatcatctgggaaatctgtctcaagatctggcctcccacggatatgttgaagtaacaagcttgcctagagatgcagcaaatattttggtgatgggtgtggaaaattctgcaaaagaaggtgatcctggaacaatattcttcttcagggaaggagctgctgtgttttggaatgtgaaagacaaaactatgaagcatgtgatgaaagttctagaaaaacatgaaattcagccctatgaaatcgcactggtacactgggaaaatgaagaacttaactacataaaaatagagggacagtcaaaacttcacaggggggaaatcaagttaaattcagagctggatttagatgatgccattctagagaagtttgctttctccaatgctctatgcctttctgtaaaactggcaatttgggaagcatcactggataaatttattgaatctattcagtcaattcctgaggctttaaaagctgggaagaaagtgaaactatctcatgaagaagttatgcagaaaatcggtgaactctttgctctaaggcaccgtataaacttgagttcagacttcctgattactcctgatttctactgggacagagaaaacctggaaggactttacgataaaacgtgtcaattccttagcattggccgaagagttaaggtcatgaatgaaaaacttcagcactgcatggaactaacagatctaatgcggaatcacctgaatgagaagagggcactccgcttggagtggatgattgtcatcctcattaccatagaggtaatgtttgagctgggacgagtatttttctgatcaagtgataaccaaagtgtcactgcaagagatattcaagttctacaatcaaaaattaaatgttcggcccggcgcggtgcctcatgcctgtaatcccagcactttcggaggccaagaagggtggcttgagatgagatcaggagctcaagacaagcctggccaacatggtgaaaccccatctctactaaaaataccaaaattagccaggtgtgttggcacacgcccgtcatctcagctactcaggaggctgaggcaggagaatctcttgaacttgggaggcggaggttgcagtgagctaagatcacaccactgcactccagccagggcaacagtgagactcagtctcaaaaataaacaataaaataaataaataaatgttcactactgggtgatcatttaataggtgtttttttaatcaagaaattatctttttcagcccagtatatcgtgtgaataaaattatgaagaatct

SEQ ID NO: 175139 - DNA, 6301 bp, Homo sapiens
  Payload ID: 14390
  Gene Symbol: RMND5A
  Gene Name: required for meiotic nuclear division 5 homolog A
  Uniprot ID: Q9H871
  ENST ID: ENST00000283632
  CDS Start-End: 496-1671
cgcgtgtgggcgcccgtcgcgttcctccgcccgttctcgccgggtcgcaccccccaccccgagggtgtacttggtacggcccgcgccgcctcctttcctcgcccgggtggccatccccctccccccagtcggcggcgcttggtgccgcccgggagaaccaggtcatcggtcggttcccgtgaaaacaaaaacaatcggccgcgccgtcgcaggcacccgaacgtcgcgagcggggcctggggacgcggagccgagtgcagcgagcgaacgggagcagcggcgactcgccggggggctagggcgccatggggcaggcgggctccggctgcgcggggctcccccggcgccgcggctagtgcgcccgccgcctcggccgcctcagcctcccgcgccgcccgcttggggaacgaggagcaggacgcggcctcggtggggcccgggccgaacggctgcggacacctgggcgccgaggagccgagcgccgccgcctccggcatggatcagtgcgtgacggtggagcgcgagctggagaaggtgctgcacaagttctcaggctacgggcagctgtgcgagcgcggcctggaggagctcatcgactacaccggcggcctcaagcacgagatcctgcagagccacggccaagatgctgaattatcagggacactttcacttgttttgacacagtgctgtaaaagaataaaggatactgttcaaaaattggcctccgaccacaaagacatccacagcagtgtttctcgggttggaaaagccattgataagaattttgattctgacattagcagtgtgggaatagatggctgctggcaggcagacagccaaaggcttctcaatgaggtgatggtggagcacttctttcgacaaggaatgctggatgtggctgaggagctctgtcaggaatctggtctttctgtagacccaagtcagaaggaaccatttgtggagttaaatagaatattagaggcattaaaggtcagagttctgagacctgctctggagtgggcagtgtcaaaccgggaaatgcttatagctcaaaacagctccttggaatttaagctacacagactgtattttattagcttgttaatgggtggaaccacaaatcagcgagaggcattacaatatgctaaaaattttcagccatttgccctaaatcatcaaaaagacattcaggttttgatgggaagccttgtgtacctgagacaagggattgagaactcaccatatgttcacctacttgatgcaaaccagtgggctgatatctgtgacatctttacacgggatgcttgtgccctcctggggctctccgtggagtcccctctcagtgtcagtttctcagcaggttgtgtggcgctgccagctttaattaacatcaaagccgtgattgaacagaggcagtgtactggagtttggaaccagaaagatgaattacctattgaagtggaccttggtaaaaagtgctggtatcactctatatttgcctgccccattcttcgtcagcaaacaacagataacaatccacccatgaaattggtctgtggtcatattatatcaagagatgccctgaataaaatgtttaatggtagcaaattaaaatgtccctactgtccaatggaacaaagtccaggagatgccaaacagatatttttctgaagagataactttagtttgcaatttgtaagtgaaactgaatcgtgggtgcatttcagaagagaacgttccatataatgcagctaaccaaggactcctgtgtttctataagctaatgctccagaaactttgccaacctgttagtgtacacacactgaggggagtgctcccggtgaatattatcatagggctttattatattcttggtcttcatttctgatcaagtaaatacaccagcagttgtcattcaatgcaggtttttgtacttaattatatggtgatttttttactttttaagagcagaaacggaaattgacctccccgccatgtgtttaatattcctcctgcttttacttttgtcattttcttgataatcgtaagccttgagagtgtttgtgaaaaagttttatttcctgttatgtatacataattaaatgaaaattcttcagaaaaagtttgataaattgaattgtggttatgaaactaatttgcatttttatttgcttaagaaagaaagctgtgatagattccagatatgctttttgatgttttcctctgctccagctccaagaagtcagcacacctgcattttagctctgcatgcagccccagcaggctgcgtgtttaagaatttcattgtttaactggctggtgtgagaagtcttccgttagcatagagtggaaggagtactattgtttggttgggtttttgtttgtttgttttttgtttttgcttttattgccaagaggtgcttgttttaaaagtatgtttaataaaatgaaattctaaagttagaagtgttcttaagttgatatttactctcttggtcttggtagccctattatatcattgcagacacagtgttgtgcatgtgtgtattgtatatgtgcaccagcatcaaacattgtgtatctggaaggaaagcagcatgttccagttctaaaatgcagttaccagacccatcactttaaatccttaaagttagaagctagcaaattttctgtagtgcagaacgtttattgctgtttttgtgtttgaatagtataatgtttgatgcctctcttctgcaaagcgtatcatctcattgactgtgaatctgtatattattctgatggatacagataatgatcttttctcttgtgaggtatcttcatttatgcactgtccaaaaatagccatgtgtaagagtctttctgtatgacgaactacatggaaaagacttctgtggacataattctgaccgaaacccatgaagttacttcagtataagaagaacgttacacggaaatcaccaaatattttgcaactttatttcttctgacatggagtgaacatcaataggaatactttcaaagaaaatgaaaacacagaagcaaagagaaatgtggcacttcacattttaaactacagatggacttggtttgagggagggggaatcacagatttggtgctaagttaattagaaactggcagcgttttacagtagtacaccagcctggatgttttttctaaaatgtttacctgggagagctggggtttgtttgtgaggagaaagagtactgtggaaaacctctgcttgagtaccatgtggccaggcctatgtggatggctactccgtgctgtgcggcttcaccagcggttgggattggcccagcttggagtgcttgtgtggtccaacctcagtctggccccatagcgacttttgccccatgattctgcttcactgttggaatcctctttgaagttccccctctctttgctaaagcagtgaaggaagagaacagagacaaactctttggactgtgaaagagaaggtagagaattccaggcaacagtctgaccaagggtgtaaaccagtttattatatatatatttttcctttgaattaaaacctagagtgttgtatttttctttctttctttttttttttttttttttttaccctttttctccttaggccaagtttagcttattcttatctttccacccaaacacctacacaacgtttaggcttcctgtaaggtttgaatgagacagatgtactctgaaggctggtggtaaatgtgtttgatgaccagactcttcatacagtcggcttgggccactttaaaggacaaaagccagagctcagctttatccctctcccagtgctgggagccaaaaaactgttgacggttttttgtgcagctcaagaaaactttgaaaagaacatgctttaactgaagcattggactctgcagctttctgtgtaaggcccgtgtactcccactgggcagggtgaggaccaaaaatctgaaactcttatgaatctgacatattatatggaaattatatcttgtgaccgtcttcaagtgcatggacttaaaattcatgagagactaaatgtgagggagaggtggatttaaagaggccagaccttaaccaaagatgctgagatacagcattctgtcccccctgccctagaaactccataaatgctgtcacaaccctatcatcgctgatgctttctgcatgtcagcagtccaggaggatgctttttgtctctctttgcctccactttacaaaagataatatgatagaggcaacgtttataacagtcacatttaattataatgtacatcaaaggcagaatttcagaatggtttcttaaatttccttgggaaccgtttccacatatcagttatagacaaaggccatgggactatgctaaaccaataaaaccttattagcaaatctttagattctgacttagccagagcatctgagtgttcaagtacagttttacagtggctaaggttgtctcttgatcttttttctccgttgtgtgatcacagatgctatttctgttttattggtgattatacgagacttctaatacataaatgaacgggtattggtgcctctttattttaaaaaatttgaagaaaagagccacctcatattcatagggtgtgtattttttgagtgtgagcatttaattgaaaataagaaagctatgaagtaaatgttaacttctctgtagcagctaatgcatagagacactaaaacccacaccacattttgtgggaaatgaggatcctgatcctcttttgtcctctccaggtagtctcgcaggttatgcagcttaagttcagtcttctttatgctgcgattgatttccacctcagtggcttagcctttgggacagtggatactgcaacagccaagaactcttggttatccgcacaagctgctggtagactacattagccctctggttttccagctcaacctctgataaagtggactgagagccacgctgctcagtctgtttcgtcagccgactcaggttattttcagggaaggcatggaggcatagtttggttagtttcatcactaggatgtataaggtgacgacacaaaccaaatacctttctttcatcacttaactatacgtactttatctctggtaacactagaatgctgtggtcttgagggaatgttagcaaggaacacatagaagatttggtgtttcataagcctgtctaggtgtggcaggttttgtgtggtacactgatgtttaccataagcaggtacaagcttcatgaaccgttcttaatgaactataattgaatagataccaaaaatagaatgacaaatgtattttaatagcagatgaggcagttttaggatgaattttccactgttgattttacttcaagacatagcaagagaaacaaaattttgttttcaagacatttccactgcagtttcaagctgtagtgggcatatgcttcatttacttccaaagaggcaaaagcagctggaattggcttacagcacatgctttgtttcatgttatgggtgaggacctacatacactcttactttagcagtcacttaaccttctccagcaaggcagttgtggggttcactaggatttagtgcctgatcttttttttgggaaggggcgggaatgaatgtgttggggctgggagggaagcagaagaaaatgggagtgtgagtgagtgtgcatgtgtctgaagttcaccattgcccccacctgcacctagcaaggaacaggtgtttgatgtattttgctcatgactgcagtatgcatgtatttttttccttctctgtgttttctaaacttacactaaaggattcatcaaatcatcttgttcagatggctcaggattgtatttattttgcttaccccgtgctcttgggttctatagtatttctataattatgtaacgagaatagtgttgcactgtaatctatcatatagagctatatgtatggaaaattttgatcaattttttaagaaatgtatcctgtttgcaaaggcacagtaaagttgcatcttatagactataggcaataaagctaacaataaaccttatttaacacaaaccacatccatatcctctgttcatttgattttggaaaaagtagcatatccagtagtttcagggaattcattttaactttaagaattctgatatatttaatttataaatttcggactgatataatagagttttggaaaactataagaaatgctttgttaatgtgtgtattcctatgtaaaacacatggcttttcctgtgtatatttttaaaaattaaagaaatgcacatttaaaaagtg

SEQ ID NO: 175140 - DNA, 1929 bp, Homo sapiens
  Payload ID: 14391
  Gene Symbol: RMND5B
  Gene Name: required for meiotic nuclear division 5 homolog B
  Uniprot ID: Q96G75
  ENST ID: ENST00000313386
  CDS Start-End: 212-1393
gcggcttccggttccgatgacagtggcgccggaagccggggccggggctgcggggcgagttgtcggccctgggccgggagctggagtcccagactcataggtcccggcccagcccccgaagagccgcctcagccggggggagttgctcggactcaaacgtccagtcctcgtgcgaccgcgctgggtcggaagtgagcaggctgaggccaccatggagcagtgtgcgtgcgtggagagagagctggacaaggtcctgcagaagttcctgacctacgggcagcactgtgagcggagcctggaggagctgctgcactacgtgggccagctgcgggctgagctggccagcgcagccctccaggggacccctctctcagccaccctctctctggtgatgtcacagtgctgccggaagatcaaagatacggtgcagaaactggcttcggaccataaggacattcacagcagtgtatcccgagtgggcaaagccattgacaggaacttcgactctgagatctgtggtgttgtgtcagatgcggtgtgggacgcgcgggaacagcagcagcagatcctgcagatggccatcgtggaacacctgtatcagcagggcatgctcagcgtggccgaggagctgtgccaggaatcaacgctgaatgtggacttggatttcaagcagcctttcctagagttgaatcgaatcctggaagccctgcacgaacaagacctgggtcctgcgttggaatgggccgtctcccacaggcagcgcctgctggaactcaacagctccctggagttcaagctgcaccgactgcacttcatccgcctcttggcaggaggccccgcgaagcagctggaggccctcagctatgctcggcacttccagccctttgctcggctgcaccagcgggagatccaggtgatgatgggcagcctggtgtacctgcggctgggcttggagaagtcaccctactgccacctgctggacagcagccactgggcagagatctgtgagacctttacccgggacgcctgttccctgctggggctttctgtggagtccccccttagcgtcagctttgcctctggctgtgtggcgctgcctgtgttgatgaacatcaaggctgtgattgagcagcggcagtgcactggggtctggaatcacaaggacgagttaccgattgagattgaactaggcatgaagtgctggtaccactccgtgttcgcttgccccatcctccgccagcagacgtcagattccaaccctcccatcaagctcatctgtggccatgttatctcccgagatgcactcaataagctcattaatggaggaaagctgaagtgtccctactgtcccatggagcagaacccggcagatgggaaacgcatcatattctgattcctacctggaaggaattttgttgaaaggggttttcacctgtgagccttggtctgtctcggtagggtggtcaacttcagtggactgtggttggtttcagagcgcctggctgaggagttccactgaggggagcactggagcagccctttggcagaggctgaggagggagatggaccagcccacgcctggcacctggctccatggcataaggaaagggagatgctggcctctgtgctcctgctgtcttttcctgtttctgtttgcgtttgacttagtagcaaccgacagagtggcaagggatttggtcttcagcagtagacatccttccacccctgccctcagccaagtctcttgctgccatgccaatgctatgtccacccttgcccctcggcccaagagtgtccagcggtggcccacctcttcctcccactacagcctcaacagtatgtaccatctcccactgtaaatagtcccagttagaacggaatgccgttgttttataactttgaacaaatgtatttactgcccttctcatt

SEQ ID NO: 175141 - DNA, 4066 bp, Homo sapiens
  Payload ID: 14391
  Gene Symbol: RMND5B
  Gene Name: required for meiotic nuclear division 5 homolog B
  Uniprot ID: Q96G75
  ENST ID: ENST00000515098
  CDS Start-End: 352-1533
gcggcttccggttccgatgacagtggcgccggaagccggggccggggctgcggggcgagttgtcggccctgggccgggagctggagtcccagactcataggtcccggcccagcccccgaagagccgcctcagccggggggagttgctcggactcaaacgtccagtcctcgtgcgaccgcgctgggtcggaagtgagcagggtctcactcttgctcaggctggaatgcagtggcataatcatggctgactgcagccttgacctcccgggctcaagcagtcctccgtcccacctcagccttctgaggagctgggaccacaggcgtgtgccaccatgcccaggctgaggccaccatggagcagtgtgcgtgcgtggagagagagctggacaaggtcctgcagaagttcctgacctacgggcagcactgtgagcggagcctggaggagctgctgcactacgtgggccagctgcgggctgagctggccagcgcagccctccaggggacccctctctcagccaccctctctctggtgatgtcacagtgctgccggaagatcaaagatacggtgcagaaactggcttcggaccataaggacattcacagcagtgtatcccgagtgggcaaagccattgacaggaacttcgactctgagatctgtggtgttgtgtcagatgcggtgtgggacgcgcgggaacagcagcagcagatcctgcagatggccatcgtggaacacctgtatcagcagggcatgctcagcgtggccgaggagctgtgccaggaatcaacgctgaatgtggacttggatttcaagcagcctttcctagagttgaatcgaatcctggaagccctgcacgaacaagacctgggtcctgcgttggaatgggccgtctcccacaggcagcgcctgctggaactcaacagctccctggagttcaagctgcaccgactgcacttcatccgcctcttggcaggaggccccgcgaagcagctggaggccctcagctatgctcggcacttccagccctttgctcggctgcaccagcgggagatccaggtgatgatgggcagcctggtgtacctgcggctgggcttggagaagtcaccctactgccacctgctggacagcagccactgggcagagatctgtgagacctttacccgggacgcctgttccctgctggggctttctgtggagtccccccttagcgtcagctttgcctctggctgtgtggcgctgcctgtgttgatgaacatcaaggctgtgattgagcagcggcagtgcactggggtctggaatcacaaggacgagttaccgattgagattgaactaggcatgaagtgctggtaccactccgtgttcgcttgccccatcctccgccagcagacgtcagattccaaccctcccatcaagctcatctgtggccatgttatctcccgagatgcactcaataagctcattaatggaggaaagctgaagtgtccctactgtcccatggagcagaacccggcagatgggaaacgcatcatattctgattcctacctggaaggaattttgttgaaaggggttttcacctgtgagccttggtctgtctcggtagggtggtcaacttcagtggactgtggttggtttcagagcgcctggctgaggagttccactgaggggagcactggagcagccctttggcagaggctgaggagggagatggaccagcccacgcctggcacctggctccatggcataaggaaagggagatgctggcctctgtgctcctgctgtcttttcctgtttctgtttgcgtttgacttagtagcaaccgacagagtggcaagggatttggtcttcagcagtagacatccttccacccctgccctcagccaagtctcttgctgccatgccaatgctatgtccacccttgcccctcggcccaagagtgtccagcggtggcccacctcttcctcccactacagcctcaacagtatgtaccatctcccactgtaaatagtcccagttagaacggaatgccgttgttttataactttgaacaaatgtatttactgcccttctcatttctcctggccaacctttagcctcactgacaaattatgaccacatgtctaccacacacagggactgggcacggcctggtggctgccgcaaacaaaaacatggccagcaggtatccagtgtccaggcaggaagaacacaacttgcatccctgactgcggggagcttagatgtcagaccccgggcaaggtgcttttacatatacccataccagatcttactaactccataggagaaatccgtgtaatgggattcaggaaaatgaagtaacttgcacaacagggctcacagcttagaaaggagagagcttggagttttaaccagatctgaccctcaagcccaagctatttccagtttattccagggtgcctgaacttggctgttatgtatactgagtcctgtgcagggcctctgacagcaggaaggggccccaagtctaaaatacttgaagggattgggttactagggccattatgttaagcaagagagctcgggggaatgcattttagcttcatattcctatttaaaatgtgctgtgtgggtgggtaaattgcttccataagcttcacagtggcatttaaggctcctgggttaagttaggaatgggggtgttcctgatgtgggggctttaggcttccatgaagtgggtctgggccccctgccttacctcacagcccccatctaccctggaagagggagttgaaaatgctgggatagcagcaggatcagttctcagcttgagccaaagcacccggccctgggcagctgagcatcagcacagaaccctctgagtcctttgggctctctgctgaggaagactgcttcactcttcccgcccaccaactcgctggcccaaccagcagctgctgcttaagaaaacacccacagactcaccacattttagtcttagcatttactttccccaccccacattcttggaacagcctttagttctacaggaaatggcactgatggacagaagactagcattaccttcatgaaagggctgttagagctgcctgggaagaaggcgtgccttggggaactgggaagatgccgtcagtgtgggtgggcaggaggacagccagtcgtcctgctgccagcccaatagcttccagcggcaggtgcccaggtgctaccggagcccctcataggggtaggggcagggactgcacctcctccaggcactcatcgtaagcctcctggtactcctcatggggcttgaccattatcacacaggtggggcgcttggagcctgcggctgcacccaggtcctacagaggggaaagaagtgctgtttggaaaaaagctgtacaacctgtatgccaggaagtcaccaactgatgacccaccagcctaatctggcccacaaccatgttctgttcggtccatgttctatttaaaagcatcttgaattggttgccatcatttaaactcaatcagactttgaaggcatggtccagccacacagggcctacattcccacatggcaactatgaaagggctccagcccagcaggggctgtcccggtccctgccacccccacttcctgtgcctcagatctggcccctgttacgtaagataaggacagctacaggtccctctgagcctaaacccacctaaccggactaacatgggtgaagcatcttagcttacaaagctctttcacatacatctatctctttattctcatagtccacagataactgactatttggttcttaccatcaggccaaacggtaagttccttcagaacagggcctcctgctttatcccaagaagtgatactgtaggtacccaagatccacccccagcctctattttttttttttgagacagggcctcactctgtcatgcagtctggagtgtggtggtgtatgatcatggctcactgcagccttgaactcctgggttcaagtgatctcctgctttagcctcccaagtggctgggactacaggcatgtgccaccacacccagctaattaaaaaaattttttttgt

SEQ ID NO: 175142 - DNA, 738 bp, Homo sapiens
  Payload ID: 14391
  Gene Symbol: RMND5B
  Gene Name: required for meiotic nuclear division 5 homolog B
  ENST ID: ENST00000512663
  CDS Start-End: 191-424
agtggcgccggaagccggggccggggctgcggggcgagttgtcggccctgggccgggagctggagtcccagactcataggtcccggcccagcccccgaagagccgcctcagccggggggagttgctcggactcaaacgtccagtcctcgtgcgaccgcgctgggtcggaagtgagcaggctgaggccaccatggagcagtgtgcgtgcgtggagagagagctggacaaggtcctgcagaagttcctgacctacgggcagcactgtgagcggagcctggaggagctgctgcactacgtgggccagctgcgggctgagctggccagcgcaggtgggtggccacccttgcaagtgccctgcgacagcctccctgaggacatgggagacccgaagctactgagtgacagggttccggaaggacgatgatgaggatgttggtacctgcatctgtaggcctccttgaaaccggccctccaggggacccctctctcagccaccctctctctggtgatgtcacagtgctgccggaagatcaaagatacggtgcagaaactggcttcggaccataaggacattcacagcagtgtatcccgagtgggcaaagccattgacaggaacttcgactctgagatctgtggtgttgtgtcagatgcggtgtgggacgcgcgggaacagcagcagcagatcctgcagatggccatcgtggaacacctgtatcagcagggcatgctcagcgtggc

SEQ ID NO: 175143 - DNA, 471 bp, Homo sapiens
  Payload ID: 14391
  Gene Symbol: RMND5B
  Gene Name: required for meiotic nuclear division 5 homolog B
  ENST ID: ENST00000512811
  CDS Start-End: 13-201
gctgaggccaccatggagcagtgtgcgtgcgtggagagagagctggacaaggtcctgcagaagttcctgacctacgggcagcactgtgagcggagcctggaggagctgctgcactacgtgggccagctgcgggctgagctggccagcgcagtgctgccggaagatcaaagatacggtgcagaaactggcttcggaccataaggacattcacagcagtgtatcccgagtgggcaaagccattgacaggaacttcgactctgagatctgtggtgttgtgtcagatgcggtgtgggacgcgcgggaacagcagcagcagatcctgcagatggccatcgtggaacacctgtatcagcagggcatgctcagcgtggccgaggagctgtgccaggaatcaacgctgaatgtggacttggatttcaagcagcctttcctagagttgaatcgaatcctggaagccctgcacgaacaaga

SEQ ID NO: 175144 - DNA, 653 bp, Homo sapiens
  Payload ID: 14391
  Gene Symbol: RMND5B
  Gene Name: required for meiotic nuclear division 5 homolog B
  ENST ID: ENST00000502814
  CDS Start-End: 312-653
gacagtggcgccggaagccggggccggggctgcggggcgagttgtcggccctgggccgggagctggagtcccagactcataggtcccggcccagcccccgaagagccgcctcagccggggggagttgctcggactcaaacgtccagtcctcgtgcgaccgcgctgggtcggaagtgagcaggatggagtgcaatggcgtggtcttggctcactgcaacctccacctcctaggttcaagcgattgtcctgcctcagcctcctgagtagctgggattacaggtgcccgccaccacgcctcggctgaggccaccatggagcagtgtgcgtgcgtggagagagagctggacaaggtcctgcagaagttcctgacctacgggcagcactgtgagcggagcctggaggagctgctgcactacgtgggccagctgcgggctgagctggccagcgcagccctccaggggacccctctctcagccaccctctctctggtgatgtcacagtgctgccggaagatcaaagatacggtgcagaaactggcttcggaccataaggacattcacagcagtgtatcccgagtgggcaaagccattgacaggaacttcgactctgagatctgtggtgttgtgtcagatgcggtgtgggacgcgcgggaa

SEQ ID NO: 175145 - DNA, 808 bp, Homo sapiens
  Payload ID: 14391
  Gene Symbol: RMND5B
  Gene Name: required for meiotic nuclear division 5 homolog B
  ENST ID: ENST00000507457
  CDS Start-End: 365-808
cggaagccggggccggggctgcggggcgaggtgagagcgggcgggcttgggagccggcaggtgcgggccgagggcgggcacagcggccggcggagctgaggcgcgcggcggggaaagctcggccggcctcccgggccccagccttctccagaacccctgctacccacgactaagccccgaacaatctgcccttgggcttgttctcttcgcagttgtcggccctgggccgggagctggagtcccagactcataggtcccggcccagcccccgaagagccgcctcagccggggggagttgctcggactcaaacgtccagtcctcgtgcgaccgcgctgggtcggaagtgagcaggctgaggccaccatggagcagtgtgcgtgcgtggagagagagctggacaaggtcctgcagaagttcctgacctacgggcagcactgtgagcggagcctggaggagctgctgcactacgtgggccagctgcgggctgagctggccagcgcagccctccaggggacccctctctcagccaccctctctctggtgatgtcacagtgctgccggaagatcaaagatacggtgcagaaactggcttcggaccataaggacattcacagcagtgtatcccgagtgggcaaagccattgacaggaacttcgactctgagatctgtggtgttgtgtcagatgcggtgtgggacgcgcgggaacagcagcagcagatcctgcagatggccatcgtggaacacctgtatcagcagggcatgctcagcgtggccgaggagctgtgccaggaatcaacgctgaatgtg

SEQ ID NO: 175146 - DNA, 562 bp, Homo sapiens
  Payload ID: 14391
  Gene Symbol: RMND5B
  Gene Name: required for meiotic nuclear division 5 homolog B
  ENST ID: ENST00000508647
  CDS Start-End: 393-562
ggccggggctgcggggcgagttgtcggccctgggccgggagctggagtcccagactcataggtcccggcccagcccccgaagagccgcctcagccggggggagttgctcggactcaaacgtccagtcctcgtgcgaccgcgctgggtcggaagtgagcagtggcctgtgaagctggtcctgggagtacctgtgatgtgaagtacgtagagaaggactctgaggccagagccagactgtctggcttcagttcagttcccagctcctccacttcccagacgcctgaccttgggcaactgatttaatctttgtgtctcattttctcatctgcaaagtgggtctaatcattgtacctacctcatagtgttttcgtgagcattaggctgaggccaccatggagcagtgtgcgtgcgtggagagagagctggacaaggtcctgcagaagttcctgacctacgggcagcactgtgagcggagcctggaggagctgctgcactacgtgggccagctgcgggctgagctggccagcgcagccctccaggggacccctctctcagccaccct

SEQ ID NO: 175147 - DNA, 1681 bp, Homo sapiens
  Payload ID: 14391
  Gene Symbol: RMND5B
  Gene Name: required for meiotic nuclear division 5 homolog B
  ENST ID: ENST00000542098
  CDS Start-End: 1-1143
atggctgactgcagccttgacctcccgggctcaagcagtcctccgtcccacctcagccttctgaggagctgggaccacaggcgtgtgccaccatgcccagccctccaggggacccctctctcagccaccctctctctggtgatgtcacagtgctgccggaagatcaaagatacggtgcagaaactggcttcggaccataaggacattcacagcagtgtatcccgagtgggcaaagccattgacaggaacttcgactctgagatctgtggtgttgtgtcagatgcggtgtgggacgcgcgggaacagcagcagcagatcctgcagatggccatcgtggaacacctgtatcagcagggcatgctcagcgtggccgaggagctgtgccaggaatcaacgctgaatgtggacttggatttcaagcagcctttcctagagttgaatcgaatcctggaagccctgcacgaacaagacctgggtcctgcgttggaatgggccgtctcccacaggcagcgcctgctggaactcaacagctccctggagttcaagctgcaccgactgcacttcatccgcctcttggcaggaggccccgcgaagcagctggaggccctcagctatgctcggcacttccagccctttgctcggctgcaccagcgggagatccaggtgatgatgggcagcctggtgtacctgcggctgggcttggagaagtcaccctactgccacctgctggacagcagccactgggcagagatctgtgagacctttacccgggacgcctgttccctgctggggctttctgtggagtccccccttagcgtcagctttgcctctggctgtgtggcgctgcctgtgttgatgaacatcaaggctgtgattgagcagcggcagtgcactggggtctggaatcacaaggacgagttaccgattgagattgaactaggcatgaagtgctggtaccactccgtgttcgcttgccccatcctccgccagcagacgtcagattccaaccctcccatcaagctcatctgtggccatgttatctcccgagatgcactcaataagctcattaatggaggaaagctgaagtgtccctactgtcccatggagcagaacccggcagatgggaaacgcatcatattctgattcctacctggaaggaattttgttgaaaggggttttcacctgtgagccttggtctgtctcggtagggtggtcaacttcagtggactgtggttggtttcagagcgcctggctgaggagttccactgaggggagcactggagcagccctttggcagaggctgaggagggagatggaccagcccacgcctggcacctggctccatggcataaggaaagggagatgctggcctctgtgctcctgctgtcttttcctgtttctgtttgcgtttgacttagtagcaaccgacagagtggcaagggatttggtcttcagcagtagacatccttccacccctgccctcagccaagtctcttgctgccatgccaatgctatgtccacccttgcccctcggcccaagagtgtccagcggtggcccacctcttcctcccactacagcctcaacagtatgtaccatctcccactgtaaatagtcccagttagaacggaatgccgttgttttataactttgaacaaatgtatttactgcccttctcatttc

SEQ ID NO: 175148 - DNA, 1147 bp, Homo sapiens
  Payload ID: 14392
  Gene Symbol: RERGL
  Gene Name: RERG/RAS-like
  Uniprot ID: Q9H628
  ENST ID: ENST00000229002
  CDS Start-End: 208-825
acagggcagtgtagttccagaaaataggactgaccaagaagcagaaaagcaagatgaatgatgtgaagcttgctgtcttgggtggtgaaggaacaggcaaatctggtccctacatccttaaataactgcaaatacttggtagtgtctttgtgactattacacatagtaccttgaagccagactgagtttgacagagaaaataaacagatgtcaaacttcttgcatctcaaatataatgagaaatctgtttctgttacaaaagcccttacagtgaggtttcttactaagcgattcattggagaatatgcttctaattttgaatctatctataagaagcacttgtgtttggaaaggaaacaactaaatctagaaatatatgacccttgttctcaaacacagaaagcaaaattctccctcacaagtgagcttcactgggcagatgggtttgttattgtgtatgacatcagtgataggtcttcatttgcttttgcaaaagcgctgatctacagaatccgggagccacaaactagtcattgtaaaagagctgtggaatcagcagtgtttttggttggcaacaaacgagatctttgtcatgtgcgagaggttggctgggaagaagggcaaaagctggcactggaaaaccgatgccaattctgtgaactgtctgcagcagagcagtctctggaggtggaaatgatgtttatcagaattatcaaggacatcctgataaacttcaaactcaaagaaaagagacgtcccagtggatctaaatcaatggccaaattgatcaataatgtatttggaaagagaaggaaatctgtttagtagacaggtaatcctgggagatttcctatatcagagagtttcaaacattcacatgataattaaactaacctttgtatgcaatttttttttggtaaaaagaattctcttggagatatgaaatgattgagtatgaaccacagctgtgttttcaaatatgtagtttgcctttttggttgttgtaccctgctcactctccttcacacagaacctttcatttattgtacaacatcacactcaccctaacctactggcggacagcgatcccagtttgccttgccaaataaactctgtttatgtgaatttattaaacgaccatgccata

SEQ ID NO: 175149 - DNA, 367 bp, Homo sapiens
  Payload ID: 14392
  Gene Symbol: RERGL
  Gene Name: RERG/RAS-like
  ENST ID: ENST00000536890
  CDS Start-End: 2-190
gatgaatgatgtgaagcttgctgtcttgggtggtgaaggaacaggcaaatctgcccttacagtgaggtttcttactaagcgattcattggagaatatgcttctaattttgaatctatctataagaagcacttgtgtttggaaaggaaacaactaaatctagaaatatatgacccttgttctcaacgctgatctacagaatccgggagccacaaactagtcattgtaaaagagctgtggaatcagcagtgtttttggttggcaacaaacgagatctttgtcatgtgcgagaggttggctgggaagaagggcaaaagctggcactggaaaaccgatgccaattctgtgaactgtctgcagcagagcagt

SEQ ID NO: 175150 - DNA, 973 bp, Homo sapiens
  Payload ID: 14392
  Gene Symbol: RERGL
  Gene Name: RERG/RAS-like
  ENST ID: ENST00000538724
  CDS Start-End: 50-664
ggcagtgtagttccagaaaataggactgaccaagaagcagaaaagcaagatgaatgatgtgaagcttgctgtcttgggtggtgaaggaacaggcaaatctgcccttacagtgaggtttcttactaagcgattcattggagaatatgcttctaattttgaatctatctataagaagcacttgtgtttggaaaggaaacaactaaatctagaaatatatgacccttgttctcaaacacagaaagcaaaattctccctcacaagtgagcttcactgggcagatgggtttgttattgtgtatgacatcagtgataggtcttcatttgcttttgcaaaagcgctgatctacagaatccgggagccacaaactagtcattgtaaaagagctgtggaatcagcagtgtttttggttggcaacaaacgagatctttgtcatgtgcgagaggttggctgggaagaagggcaaaagctggcactggaaaaccgatgccaattctgtgaactgtctgcagcagagcagtctctggaggtggaaatgatgtttatcagaattatcaaggacatcctgataaacttcaaactcaaagaaaagagacgtcccagtggatctaaatcaatggccaaattgatcaataatgtatttggaaagagaaggaaatctgtttagtagacaggtaatcctgggagatttcctatatcagagagtttcaaacattcacatgataattaaactaacctttgtatgcaatttttttttggtaaaaagaattctcttggagatatgaaatgattgagtatgaaccacagctgtgttttcaaatatgtagtttgcctttttggttgttgtaccctgctcactctccttcacacagaacctttcatttattgtacaacatcacactcaccctaacctactggcggacagcgatcccagtttgccttgccaaataaactctgtttatgtgaatttattaaa

SEQ ID NO: 175151 - DNA, 520 bp, Homo sapiens
  Payload ID: 14393
  Gene Symbol: RETN
  Gene Name: resistin
  Uniprot ID: Q9HD89
  ENST ID: ENST00000221515
  CDS Start-End: 89-415
accccaagaggcctcaaagaaagagctgcggtgcaggaattcgtgtgccggatttggttagctgagcccaccgagaggcgcctgcaggatgaaagctctctgtctcctcctcctccctgtcctggggctgttggtgtctagcaagaccctgtgctccatggaagaagccatcaatgagaggatccaggaggtcgccggctccctaatatttagggcaataagcagcattggcctggagtgccagagcgtcacctccaggggggacctggctacttgcccccgaggcttcgccgtcaccggctgcacttgtggctccgcctgtggctcgtgggatgtgcgcgccgagaccacatgtcactgccagtgcgcgggcatggactggaccggagcgcgctgctgtcgtgtgcagccctgaggtcgcgcgcagcgcgtgcacagcgcgggcggaggcggctccaggtccggaggggttgcgggggagctggaaataaacctggagatgatgatgatgatgatgatg

SEQ ID NO: 175152 - DNA, 249 bp, Homo sapiens
  Payload ID: 14393
  Gene Symbol: RETN
  Gene Name: resistin
  Uniprot ID: Q9HD89
  ENST ID: ENST00000381324
  CDS Start-End: 1-249
atgaaagctctctgtctcctcctcctccctgtcctggggctgttggtgtctagcaagaccctgtgctccatggaagaagccatcaatgagaggatccaggaggtcgccggctccctaagcttcgccgtcaccggctgcacttgtggctccgcctgtggctcgtgggatgtgcgcgccgagaccacatgtcactgccagtgcgcgggcatggactggaccggagcgcgctgctgtcgtgtgcagccctga

SEQ ID NO: 175153 - DNA, 400 bp, Homo sapiens
  Payload ID: 14393
  Gene Symbol: RETN
  Gene Name: resistin
  Uniprot ID: Q9HD89
  ENST ID: ENST00000629642
  CDS Start-End: 47-295
gtgtgccggatttggttagctgagcccaccgagaggcgcctgcaggatgaaagctctctgtctcctcctcctccctgtcctggggctgttggtgtctagcaagaccctgtgctccatggaagaagccatcaatgagaggatccaggaggtcgccggctccctaagcttcgccgtcaccggctgcacttgtggctccgcctgtggctcgtgggatgtgcgcgccgagaccacatgtcactgccagtgcgcgggcatggactggaccggagcgcgctgctgtcgtgtgcagccctgaggtcgcgcgcagcgcgtgcacagcgcgggcggaggcggctccaggtccggaggggttgcgggggagctggaaataaacctggagatgatgatgatgatgatgatg

SEQ ID NO: 175154 - DNA, 676 bp, Homo sapiens
  Payload ID: 14394
  Gene Symbol: RETNLB
  Gene Name: resistin like beta
  Uniprot ID: Q9BQ08
  ENST ID: ENST00000295755
  CDS Start-End: 200-535
aataaatctgttcttcagcaaccctacctgcttctccaaactgcctaaagagatccagtactgatgacgctgttcttccatctttactccctggaaactaaccacgttgtcttctttccttcaccaccacccaggagctcagagatctaagctgctttccatcttttctcccagccccaggacactgactctgtacaggatggggccgtcctcttgcctccttctcatcctaatcccccttctccagctgatcaacccggggagtactcagtgttccttagactccgttatggataagaagatcaaggatgttctcaacagtctagagtacagtccctctcctataagcaagaagctctcgtgtgctagtgtcaaaagccaaggcagaccgtcctcctgccctgctgggatggctgtcactggctgtgcttgtggctatggctgtggttcgtgggatgttcagctggaaaccacctgccactgccagtgcagtgtggtggactggaccactgcccgctgctgccacctgacctgacagggaggaggctgagaactcagttttgtgaccatgacagtaatgaaaccagggtcccaaccaagaaatctaactcaaacgtcccacttcatttgttccattcctgattcttgggtaataaagacaaactttgtacctctc

SEQ ID NO: 175155 - DNA, 5754 bp, Homo sapiens
  Payload ID: 14395
  Gene Symbol: RCOR1
  Gene Name: REST corepressor 1
  ENST ID: ENST00000262241
  CDS Start-End: 227-1684
gtgagggcggcgatgagagcgaaagttgcgctcggctcgtcgctgggggcttgaagcggctccgcgctctgcccgtttgggcctcccccgactcggactcgcgcccgtgggctcccgccgcgcccgcccggccccgcgccggccccgcgccccctcccccgtctcggcgccccctcctcaggagccgcgggtccccgccactttcgcacggccccggcccccgccgatgccggccatggtggagaagggccccgaggtctcagggaagcggagagggaggaacaacgcggccgcctccgcctccgccgccgccgcctccgccgccgcctcggccgcctgcgcctcgccagccgccactgccgcctcgggcgccgccgcctcctcagcctcggccgccgccgcctcagccgccgccgcccccaataatggccagaataaaagtttggcggcggcggcgcccaatggcaacagcagcagcaactcctgggaggaaggcagctcgggctcgtccagcgacgaggagcacggtggcggtggcatgagggtcggaccccagtaccaggcggtggtgcccgacttcgaccccgccaaactggcaagacgcagtcaagaacgggacaatcttggcatgttggtctggtcacccaatcaaaatctgtcagaagcaaagttggatgaatacattgccattgccaaagaaaagcatgggtacaacatggaacaggctcttgggatgctcttctggcataaacataatatcgaaaagtcattggctgatttgcccaactttacccctttcccagatgagtggactgtggaagataaagtcttatttgagcaagcctttagttttcatgggaaaacttttcatagaatccaacaaatgcttccagataaatctatagcaagtctggtgaaattttactattcttggaagaagacgaggactaaaactagtgtgatggatcgccatgcccggaaacaaaaacgggagcgggaggagagcgaggatgaactggaagaggcaaatggaaacaatcccattgacattgaggttgatcaaaacaaggaaagcaaaaaggaggttccccctactgagacagttcctcaggtcaaaaaagaaaaacatagcacacaagctaaaaatagagcaaaaaggaaacctccaaaaggaatgtttctttctcaagaagatgtggaggctgtttctgccaatgccactgctgctaccacggtgctgagacaactagacatggaattggtttcagtcaaacgacagatccagaatattaaacagacaaacagtgctctcaaagaaaaacttgatggtggaatagaaccatatcgacttccagaggtcattcagaaatgtaatgcacgttggactacagaagagcagcttctcgccgtacaagccatcaggaaatatggccgagattttcaggcaatctcagacgtgattgggaacaaatcagtggtacaagtgaaaaacttttttgtaaattatcgacgccgcttcaacatagatgaagttttacaagaatgggaggcagaacatggtaaagaagagaccaatgggcccagtaaccagaagcctgtgaagtccccagataattccattaagatgcccgaagaggaagacgaggctcctgttctggatgtcagatatgcatctgcctcctgagaaactggtggctttgaacacttggtgtggactactgtgttatccgggatatcaggtattatgagacatcacctagccatctgcatcacatctctctggacaagcagctattaccaaaaaaggcatatacttccagtcctgtgctccatctgccttaattctttgctcgttcctccatgttggcgccacttcccagagagctccactgcatctcacactctgcccacgtgctggggaagtctcacggcctgcacatctcttgtgactctgggaaccgcctctcccgccggagcccccgagccccaccaatggcagctcttcccagtcagcagcttcagagcaggcagtctccttggaaggcccgactctgttcctgcatggcctgcagtttctactttgtgcatagagtcattttcagagtcaccgcgaccctgttggccttctagaaagtttcttttgttcttttctgagacaaccacctaagtgataatacgcttttttggaaactaatatatattgccagactgcatcataacctttatcatgccaagcatcctgatgcaactcacatttccctaaacatggggtacagttatgatttataaattgagttggcttaaatctccctcttctcccttcccaagtgttacaaagatcatttactgcaactgtcgttggacactgtagcttaaagggaacgtggacctcaatgctttctgccttcaacttttcagcattgtgaccccagggtggttgccaccccatcttttcctgaccccccccacccccccacctccaagaggttcggcccacatcactgtacctggtgcttgtaaatttggaattggtgccttctccttttggcaaccatggttatcaatcctttttctgttttagtgtcttatttcttctttcaagttatttgctagccaaagatgacatcactgagattaggagacaggggagagcttgctgcagattctgacagtgcagattttaaatgtcaggatattagaatagctggcgctggtttatgaaagctgcgcgttgttccgcgttctctcggtgtgcctggccttttatgtggcactctgtatgtcagtttgtgtccttcatgtgctgatgtgattacacaaacaccatgcactctcttttcatatcagagtacaggacagagaagtgatcaatgtattggtctagtgagactgagatgaaaagaaataacctacagagtggtctgtaatgccttttggttggactgggaacaagtaaaaatttctaataaacattttgagacttccagaatcacttttgttatcttatcagaccatgggcctgctgagggttgagcagacagcctgcattctaacataccctgttcccaccccacggccattcagactgcactcaatacgctgaagtcgcttttgttgttgttgttgttgtttgcatcatttggatttttttcctgctttcaataccaaaaaaatgcagatgctttaaggcctaaacagaattctgaagaatttaaaatatgcaattaaagtttgatatgttttgtctcccaagcaccttgttttttgttgttgttgttgttgttgaagtcagctgattttctctttagaaagagggtcagctagaaacctaggttttttggaattgtaaatttttttttagtatagtctggagagaaaggtcattcaaaaggaaagtacaatgggacttgctgcccttcatcatctcgttcccgtgccaggtgtgtgttggtcacgtaaaagcctgggaagcatcagaggagtcccggattgctgctgctacctggagacagggttagcaaaataacactagtgatgagggagaggcttcttttcaccataagcctgctgtgtacaccgagggcggcaggagaagcatgggaaggagtcagcctaagtttgcacattgcataaagggtacactaaggtatgagctgaagctttaggttctccgtgcttccctcaagacctccttcttgctaacagaagcagtaggcaattgctgcagtgcgtttctcaccctgccaataggtctgtctgtatctctgttaaggaaaatagcctggtccctcctggcagtgcttggaagcttgatgctaatttttatatagcgtggcaaactgaccagcagtgccaggccttgatctgtattctgcactatccctttacttggttcctggcactgaatggtctccagccctgaagaatcacgtgtgatcacagcagctgacctgggctttctccccgagaggaaggggcatgtcatttttatttgacagagggaaaatgggagctgtccttgactgcctttgttgtgctttcccgcgtaagatagcactgtgttttaaactgttgcattacactgtctttgcaatgatgtaaatgtaagaaatcacttagctttaaaagcgcagtggtttgatcttatttatatgaagactttttaacatatcaagaattaggtgcattggcaggtagggtttggggtgtgataactgcttcagatggaatgttcacttaagctttgtcttcttaaaaattatcaatgtgaatgtcataattatatatatttttgtggaaaattttctcctaagtataagttattgtgcaaaatatagtgtcattgatgcaaataatagtttaacttttagtttagaactcctaaaagatataaattgtattgcatatgcattaaaagtttgttttatttaattttatgtagatgtgtgaagtgttaggtaaaatttttttcacttatccatttaaacaccttgttacttgaatattgtgttgactggtctgcaacagtgatccattctgtaatatagctcttttaactgggaaggaaccacaccccagttgtgccgattacattagtgttggcacacagtcgggtgctagtgtaacacaaatgccgcgttgtctgggtgtacagtgtttgtggagacgccacttcctcaaaatggtttttgattgtttttaacctataagacgttctgatgctcacaaacctctattcaacacacaaaacaaacatgaaaaggtagttagttgggttgtaacagcttactggggtggactcataaaacagtggctttctgttcatctaaagtttcctcagataccacagaccactgttaagtgtgctcattgtcactttaaatttcaacgataccctatttttgtcattctaaatatcagatgtactattggtataattgcacaccaaaaataagccaaacagtgcattacgctaactggatccctgcttttatgtgagctaaggaaagatggagccaactccaacgagggcctctttttctctcttgtctagcctgtttctaaaccgaatgatccaggattcaagcttctattgtcaagtgaaactttcctcagatggactccaggtagccaggtcacctaaacctagtggtcctgtgcgatgctctttctgccagtccctgaatctctgcagcttctcttacctgtcttacctgtagtaaagcacaattgcagtggcgtcgcattcagaagaagggaaggtcagcagaggctatgcatgttgtgtgatgatgagtgtttacagccaccttctcctaaaacgaaatttataccggggtggatagtattccattaggtagacttatcgactttgctaagtgctttttagacagcttaaaaaattttcaagattttaaaagatgtataaggttaagtttgcaaatataatggaaatgctgtatatcttttgaagtgatgaaatccacgttggaattttaaagaaaatatgttgtaataatgctgttgtaagtaatattttaatgtctctttgcctgttttctatttcagcacattcattgtggtgaatgttcatagcattataactgcttagccattgaatgataacatttgttagtggaaattggaaaatttatttgtgaaattctgcagaattcatttttctatttccaatatttgctgaggttaaataaaaattttcaagccattgatgtaataaaatatgaaatgaaagca

SEQ ID NO: 175156 - DNA, 411 bp, Homo sapiens
  Payload ID: 14395
  Gene Symbol: RCOR1
  Gene Name: REST corepressor 1
  ENST ID: ENST00000560472
  CDS Start-End: 1-108
cagacaaacagtgctctcaaagaaaaacttgatggtggaatagaaccatatcgacttccagagccatcaggaaatatggccgagattttcaggcaatctcagacgtgattgggaacaaatcagtggtacaagtgaaaaacttttttgtaaattatcgacgccgcttcaacatagatgaagttttacaagaatgggaggcagaacatggtaaagaagagaccaatgggcccagtaaccagaagcctgtgaagtccccagataattccattaagatgcccgaagaggaagacgaggctcctgttctggatgtcagatatgcatctgcctcctgagaaactggtggctttgaacacttggtgtggactactgtgttatccgggatatcaggtattatgagacatcacctagcca

SEQ ID NO: 175157 - DNA, 2604 bp, Homo sapiens
  Payload ID: 14396
  Gene Symbol: RCOR2
  Gene Name: REST corepressor 2
  Uniprot ID: Q8IZ40
  ENST ID: ENST00000301459
  CDS Start-End: 389-1960
gcgcccagccgctgaacggcgtgggcaggtgggcggtggggttccagggcgccccgaggacagggggccccgacttcaggggaaccccaaccctgaggggcgtacatagtaatcacgccccagccgcaccggaccttgcgctcatcccttgcgtcccccacttctgcacaaacttttctgacgccctggctcgtgggggtcgtggagagcgctggggctaccaggtgggctcccaccccgccggaccctagccacgctgacctcctgcctctcctaacctcagtggcgacctctccaggccgggccgggctcggcactcggagcgagtgcggcaaccactgtcgctctccgaaggctcctgcgccccccggggcagctgggcggggtaatgccctcagtgatggagaagccgagcgcgggctctgggatcctgtcccgtagccgggccaagacggtgcccaacggcggacagccccactcggaggatgacagcagcgaggaggagcactcgcacgacagcatgatccgcgttggaaccaattaccaggccgtaattccggagtgcaagcctgagagccccgcacgctacagcaacaaggagctgaaggggatgctggtgtggtcacccaaccactgtgtgtcagatgccaagcttgacaagtacattgcgatggccaaggagaagcatggctacaacattgagcaggcgctgggcatgcttctgtggcataagcacgatgtggagaagtcgctggccgacctggccaacttcaccccattccctgacgagtggacagtagaggacaaggtgctgtttgaacaggcctttggcttccatggcaaatgcttccagcggatccagcagatgctgcctgacaagttgattcccagcctggtgaaatactactactcttggaagaagacccgcagccgaactagtgtgatggacagacaggcccggcggctggggggccgcaaggacaaagaagacagtgatgagctcgaagagggtcgaggaggcgtgagtgagggagagcccgatcctgcagatcccaagagagagcctctaccctctcggcccctgaatgcacgcccaggccctgggaaaaaggaggtccaggtgtctcagtaccgccaccatcccttgcgaacccggcgtcgcccacccaagggcatgtacctgagccctgaaggcctcacggcagtgtcaggaagcccggaccttgccaacctcacgctccgaggtcttgactctcagctcatctccctcaagcgccaggtacagagcatgaagcagacgaacagcagcctgcgccaagccctggagggcggtattgatccactacgccccccggaggccaacaccaagttcaactcccgctggaccacagatgagcagcttttggctgttcaagccatccgtaggtatggcaaagactttggggctattgcagaggtgattgggaacaagactctgacccaggtgaagactttctttgtgagctaccggcgccgcttcaatctggaggaggtgctgcaggaatgggaggctgagcaggatggggcccctggagccccagtccccatggaggaggctaggagaggggctccattgccagccccagccctagaggaagatgatgaggtccagattacatcggtctccacgtccgtgccccgatcagtgccccctgcgccaccaccccctccacctcccacctcgctgtcccagccacccccgctgctgaggccacctttgcccacggctcccactctgctccgacagccacccccactgcagcagggccgcttcctccagccccggctggcccccaaccagcccccaccgcctctcatccgccccgctctggctgccccccgccacagcgcccgccctggccctcagcccccacccaccctgattggaacccctctggagcccccagcaccctcactctgagccctgacgtcctccaccaaccacgggctccaggacccctttgctggccatccccaggcatctctggtgtcactgaggacagaagggactagggctctggcggggtctttgtaagaccagagtttcggacagcccagccccgccctttgggttctgcatgtgttcctggcagctgggcctgtctcctggggccatggccgggctcaggggcctttgagctggcctgagggcactttcgcttcctggccggtactggaatggctgtgtcctagtctgctggggcttggcctctgggtcctgccctttgtgtgtccggggtagtgaccttagcgtggagtggggagagggcagttgggtgtgctggctgttctcattcctctttcccttcttttagcaataagtctggggtgaggtggggagggaggctgcagggggggaggtgggcagaggggccttacagcagcagaggctggaagagaagctctgtcttcaggggccagctgggaaatgctaaggagctgagggtgcccaccaagcccaccttccagaaacttggagaaatgggggttgggaacttatgcagacatggatttatttttcaacattttttaaaaattaaaaaaaataaaatctaagcttactga

SEQ ID NO: 175158 - DNA, 4246 bp, Homo sapiens
  Payload ID: 14397
  Gene Symbol: RCOR3
  Gene Name: REST corepressor 3
  Uniprot ID: Q9P2K3
  ENST ID: ENST00000367005
  CDS Start-End: 142-1629
gagttgatatcttcccatccacccgccgcttctttcctccatctagcgatttttattttttaagtgtctcttcctttttctttcttttcttcttttttattttttatatatattttttggcattgctttgcagatgttgggatgagagtcggagccgaataccaagctcggatccctgaatttgatccaggtgctacaaagtacacagataaagacaatggagggatgcttgtatggtctccatatcacagtatcccagatgccaaattggatgaatacattgcaattgcaaaggaaaagcatggctacaatgtggaacaggcacttggcatgttgttctggcataaacataacattgagaagtcccttgctgatctccctaatttcactccctttccggatgagtggacagtggaagataaagtcctatttgaacaagcctttagttttcatggaaagagctttcacaggattcagcaaatgcttccagataagacaattgcaagccttgtaaaatattactattcttggaaaaaaactcgctctaggacaagtttgatggatcgccaggctcgtaaactagctaatagacataatcagggtgacagtgatgatgatgtagaagaaacacatccaatggatgggaatgatagtgattatgatcccaaaaaagaagccaaaaaagagggtaatactgaacaacctgtccaaactagcaagattggacttggaagaagagagtatcagagtttacaacatcgccatcattctcagcgttctaagtgccgtccacctaagggcatgtatttaacccaggaagatgtggtagcagtttcctgtagtcccaatgcagccaacaccatcctgaggcaactggacatggagttgatctctctaaaacgtcaggttcagaatgctaagcaagtaaacagtgcacttaaacagaaaatggaaggtggaattgaagaattcaaacctcctgagtcaaatcagaaaattaatgcccgttggaccacagaggagcagcttctagcagtgcaaggtgtccgcaaatatggtaaagattttcaagctattgcagatgtaattggcaacaagactgttggccaagtgaagaacttctttgtaaactacaggcgtcggtttaacttagaggaggtattgcaggagtgggaagcagaacaaggaacccaggcttctaatggtgatgcttctactttaggggaggagacaaaaagtgcttctaatgtgccatcagggaagagcactgatgaagaagaggaggcacagaccccacaggctcctcggacactgggtccatcacctcctgccccatcatccactccaacaccaacagcccctattgccactctgaaccagcctccaccacttcttcgtccaacactgcctgctgccccggctcttcaccggcagcctcctccactccagcagcaggctcggttcatccagccccggccaactttaaatcagcctccaccacctcttattcgccctgctaattccatgccaccccgtctaaacccaagaccggtgttgtccacggttggtggtcaacagccaccatcacttattggaattcagacagattcacagtcctcactgcactaaaaattaaattggacacagctgcagtaacttttcaccccatcattataccagtgctcatctgactgatgaaaaagaggaaagaataatcatttctagatactgaggctgcgaactagttctgtggcagtggactagcataagtggatgtctaagaaatttttcagttcactagactaaaatgttttacaacaaaaagcctccagttagcctcctttctagagtatatgttcagcaatgttgatctcataaaaggaaaaacaaaagatttaagtattctatataccaagtttttgttttgtttttactgtatttattttattgaggttctttatattcctgcctcttcatagtcaaggctcttagtacaggaatattgacttaggaattgtgaaaactccttaagtttcttaagttaaggatgtttggcttttttctttaattttttaaaaaccattttcctatgttaggagtgcaagaatagccagcatttccgattttgacatatgttcattttatgcatatttaagaaattatagctgcatatcccttctttcaaaaaatgttgcttttttttttaaaggaattttaatatattcctttaaaagaaagcaatttaatcaattgcaaagcaattatataaaaccacaaagaatgtactgaacctactaaccctttaacatacagtttagggtcctagcgcagagtccttgtttaaaggtcattgactcatcatctgtcagtaatgagaggattggaagaataattttgcatacaaatgaggacttaatttgttgaaatataatctctttaagttccttgaaaatggagttggttttttttgtttctaaatgctatctgcttttaactagtagttgcctacatctggggacttcagagaagaattatattttgttagttaagtagacacagtggttatggaagcatttctttacagtaccctttacatgtttggtttctgaacttaaaattgccctcatacttaataatatggtctgcatttaatatgaaaggtgttttattgataaatctattgtactatttggatacatttgtgtattccttgcagccaacctgtattcgtgggattggtgtagggttaaatcatcaacattatttcataaaataagaatttgttctgtgttatctaaagatgtatcagtatattgtcacagttgtgctgttaactaaaaatgctgagacccctttttatagaaaaacaaaaagacatcaagtcttcttaattcaacccataatcattaagtacttaacaaagaatattttacaagtgatagtatttcaacaatgtgtaattaatatttttgatacagtgatttcatattggaatcattatttgtgcaaagggacagacagatcacttagattgctatactagtggacataggctacatgtttgcacattcacattcttatcacgtgtagaatacttcacaaaatagtcaacatctaaggccctaatttatgttttgaaagatcatgtgttcccaaagtattccctattgttggctccacagccttaaagtgctatagatttaaattcattgattagttttaatttttaattttagactgtgtatttccataaataccctacgtactggcatatttgaaactctttttccaggttaggtccttttctttctcattgaatcatcttaaatagttcttggccctgaatttagctgatttaaaattcttaatattcaagaatttatacttattttttccttaaaagccacaggggacagttaaatatcttaaaatatctaaaacattttttaaagcacttagattgtcttacgtatgtgcatactatacctttacagcgtttattgtcttgtctcttgtcagtagaccttcagtacacagtatgtgggatatgtcagtcaagttggtcagcaccagcatctgtccagctgttcagtatattgtgattcattaaaaaatctcttctatcccagacatgggccaaggtgctgtatctgagggatgtgctgtaatttgatttacatgcattagagcacacagtagaaaaactttagcttcattagtaatatgacacatgtatatagtgagatgtctttattgtgtgctttgcatattttgtaaatattttgcacgtcattatttttcttttttgtttaagcagtgtttggcctggaagagtgatatgcttgctgcttaatcaaaggattaaagatttaaagatgtctatgtcttctatttttatataatttcatgttctatgaggaatttagtacctcttcactgtgaaattcgaaataatgatttttataaaagcaaaactagaaatcttttaatgacaattttcattaatttcagggttatcatttttgagaaatctacaccaaagtggttttttaaaattacataactaaaaataaaccacactgtggatacatcttataaaactaatggaaacaatgtttttctatatgatttaattctagtgtaatatggatgaggtaagagtaagttatgatcaaactttttatgttcttaataagcttgcaattgagtaaaatagaatataaaataaaggtgaaataatataaaa

SEQ ID NO: 175159 - DNA, 2525 bp, Homo sapiens
  Payload ID: 14397
  Gene Symbol: RCOR3
  Gene Name: REST corepressor 3
  Uniprot ID: Q9P2K3
  ENST ID: ENST00000367006
  CDS Start-End: 283-1593
agagcgcggtgcggccgaggggcgcccgggactgcgcggggcgggcggcggcggagggaggaggggagagaggcggggccggggcgggttgttgtgaggcgactgcgctactgccggagcggggcggttatggcggctccatattaacagcctcctcctcctccgccgccgccgccgtctcctcctcctcctcctttccctcccgcccgcgctctaagccatctccgccttcaccctgacgcctgcctcttcccctcacctttccccctcccctgttctaccatgcccggcatgatggagaaagggcccgagttactggggaagaaccgatcggccaacggcagcgccaagagcccggcaggcggcggcggcagcggcgcctcgtccaccaacggcgggctgcactactcagagcccgagagcggctgcagcagcgacgacgagcacgatgttgggatgagagtcggagccgaataccaagctcggatccctgaatttgatccaggtgctacaaagtacacagataaagacaatggagggatgcttgtatggtctccatatcacagtatcccagatgccaaattggatgaatacattgcaattgcaaaggaaaagcatggctacaatgtggaacaggcacttggcatgttgttctggcataaacataacattgagaagtcccttgctgatctccctaatttcactccctttccggatgagtggacagtggaagataaagtcctatttgaacaagcctttagttttcatggaaagagctttcacaggattcagcaaatgcttccagataagacaattgcaagccttgtaaaatattactattcttggaaaaaaactcgctctaggacaagtttgatggatcgccaggctcgtaaactagctaatagacataatcagggtgacagtgatgatgatgtagaagaaacacatccaatggatgggaatgatagtgattatgatcccaaaaaagaagccaaaaaagagggtaatactgaacaacctgtccaaactagcaagattggacttggaagaagagagtatcagagtttacaacatcgccatcattctcagcgttctaagtgccgtccacctaagggcatgtatttaacccaggaagatgtggtagcagtttcctgtagtcccaatgcagccaacaccatcctgaggcaactggacatggagttgatctctctaaaacgtcaggttcagaatgctaagcaagtaaacagtgcacttaaacagaaaatggaaggtggaattgaagaattcaaacctcctgagtcaaatcagaaaattaatgcccgttggaccacagaggagcagcttctagcagtgcaaggcacagaccccacaggctcctcggacactgggtccatcacctcctgccccatcatccactccaacaccaacagcccctattgccactctgaaccagcctccaccacttcttcgtccaacactgcctgctgccccggctcttcaccggcagcctcctccactccagcagcaggctcggttcatccagccccggccaactttaaatcagcctccaccacctcttattcgccctgctaattccatgccaccccgtctaaacccaagaccggtgttgtccacggttggtggtcaacagccaccatcacttattggaattcagacagattcacagtcctcactgcactaaaaattaaattggacacagctgcagtaacttttcaccccatcattataccagtgctcatctgactgatgaaaaagaggaaagaataatcatttctagatactgaggctgcgaactagttctgtggcagtggactagcataagtggatgtctaagaaatttttcagttcactagactaaaatgttttacaacaaaaagcctccagttagcctcctttctagagtatatgttcagcaatgttgatctcataaaaggaaaaacaaaagatttaagtattctatataccaagtttttgttttgtttttactgtatttattttattgaggttctttatattcctgcctcttcatagtcaaggctcttagtacaggaatattgacttaggaattgtgaaaactccttaagtttcttaagttaaggatgtttggcttttttctttaattttttaaaaaccattttcctatgttaggagtgcaagaatagccagcatttccgattttgacatatgttcattttatgcatatttaagaaattatagctgcatatcccttctttcaaaaaatgttgcttttttttttaaaggaattttaatatattcctttaaaagaaagcaatttaatcaattgcaaagcaattatataaaaccacaaagaatgtactgaacctactaaccctttaacatacagtttagggtcctagcgcagagtccttgtttaaaggtcattgactcatcatctgtcagtaatgagaggattggaagaataattttgcatacaaatgaggacttaatttgttgaaatataatctctttaagttccttgaaaa

SEQ ID NO: 175160 - DNA, 1827 bp, Homo sapiens
  Payload ID: 14397
  Gene Symbol: RCOR3
  Gene Name: REST corepressor 3
  Uniprot ID: Q9P2K3
  ENST ID: ENST00000452621
  CDS Start-End: 174-1523
actgccggagcggggcggttatggcggctccatattaacagcctcctcctcctccgccgccgccgccgtctcctcctcctcctcctttccctcccgcccgcgctctaagccatctccgccttcaccctgacgcctgcctcttcccctcacctttccccctcccctgttctaccatgcccggcatgatggagaaagggcccgagttactggggaagaaccgatcggccaacggcagcgccaagagcccggcaggcggcggcggcagcggcgcctcgtccaccaacggcgggctgcactactcagagcccgagagcggctgcagcagcgacgacgagcacgatgttgggatgagagtcggagccgaataccaagctcggatccctgaatttgatccaggtgctacaaagtacacagataaagacaatggagggatgcttgtatggtctccatatcacagtatcccagatgccaaattggatgaatacattgcaattgcaaaggaaaagcatggctacaatgtggaacaggcacttggcatgttgttctggcataaacataacattgagaagtcccttgctgatctccctaatttcactccctttccggatgagtggacagtggaagataaagtcctatttgaacaagcctttagttttcatggaaagagctttcacaggattcagcaaatgcttccagataagacaattgcaagccttgtaaaatattactattcttggaaaaaaactcgctctaggacaagtttgatggatcgccaggctcgtaaactagctaatagacataatcagggtgacagtgatgatgatgtagaagaaacacatccaatggatgggaatgatagtgattatgatcccaaaaaagaagccaaaaaagagggtaatactgaacaacctgtccaaactagcaagattggacttggaagaagagagtatcagagtttacaacatcgccatcattctcagcgttctaagtgccgtccacctaagggcatgtatttaacccaggaagatgtggtagcagtttcctgtagtcccaatgcagccaacaccatcctgaggcaactggacatggagttgatctctctaaaacgtcaggttcagaatgctaagcaagtaaacagtgcacttaaacagaaaatggaaggtggaattgaagaattcaaacctcctgagtcaaatcagaaaattaatgcccgttggaccacagaggagcagcttctagcagtgcaaggtgtccgcaaatatggtaaagattttcaagctattgcagatgtaattggcaacaagactgttggccaagtgaagaacttctttgtaaactacaggcgtcggtttaacttagaggaggtattgcaggagtgggaagcagaacaaggaacccaggcttctaatggtgatgcttctactttaggggaggagacaaaaagtgcttctaatgtgccatcagggaagagcactgatgaagaagaggaggtgtgtttgtgtatggaatttgagctaatatgagttgaggaatcaccattttgtgtggtattctgtaaggttaatttgtcaagaggactagctaaattgagcatgaaaggttgacaatacacttcttcagtggtgcatctctcgtgactcttaagtcataatgacatgctaagttctgattctagaagaatggagagtgtattgttctttcatagtcttatttttattttcagtgttaagctgtttacaaataaagatgcctgtttggtagcctcattggtttttggtttttggttttgttttgtttaaaataaaagaagcttgtgcttccaataaa

SEQ ID NO: 175161 - DNA, 2041 bp, Homo sapiens
  Payload ID: 14397
  Gene Symbol: RCOR3
  Gene Name: REST corepressor 3
  Uniprot ID: Q9P2K3
  ENST ID: ENST00000419091
  CDS Start-End: 129-1790
ctcctcctccgccgccgccgccgtctcctcctcctcctcctttccctcccgcccgcgctctaagccatctccgccttcaccctgacgcctgcctcttcccctcacctttccccctcccctgttctaccatgcccggcatgatggagaaagggcccgagttactggggaagaaccgatcggccaacggcagcgccaagagcccggcaggcggcggcggcagcggcgcctcgtccaccaacggcgggctgcactactcagagcccgagagcggctgcagcagcgacgacgagcacgatgttgggatgagagtcggagccgaataccaagctcggatccctgaatttgatccaggtgctacaaagtacacagataaagacaatggagggatgcttgtatggtctccatatcacagtatcccagatgccaaattggatgaatacattgcaattgcaaaggaaaagcatggctacaatgtggaacaggcacttggcatgttgttctggcataaacataacattgagaagtcccttgctgatctccctaatttcactccctttccggatgagtggacagtggaagataaagtcctatttgaacaagcctttagttttcatggaaagagctttcacaggattcagcaaatgcttccagataagacaattgcaagccttgtaaaatattactattcttggaaaaaaactcgctctaggacaagtttgatggatcgccaggctcgtaaactagctaatagacataatcagggtgacagtgatgatgatgtagaagaaacacatccaatggatgggaatgatagtgattatgatcccaaaaaagaagccaaaaaagagggtaatactgaacaacctgtccaaactagcaagattggacttggaagaagagagtatcagagtttacaacatcgccatcattctcagcgttctaagtgccgtccacctaagggcatgtatttaacccaggaagatgtggtagcagtttcctgtagtcccaatgcagccaacaccatcctgaggcaactggacatggagttgatctctctaaaacgtcaggttcagaatgctaagcaagtaaacagtgcacttaaacagaaaatggaaggtggaattgaagaattcaaacctcctgagtcaaatcagaaaattaatgcccgttggaccacagaggagcagcttctagcagtgcaaggtgtccgcaaatatggtaaagattttcaagctattgcagatgtaattggcaacaagactgttggccaagtgaagaacttctttgtaaactacaggcgtcggtttaacttagaggaggtattgcaggagtgggaagcagaacaaggaacccaggcttctaatggtgatgcttctactttaggggaggagacaaaaagtgcttctaatgtgccatcagggaagagcactgatgaagaagaggaggcacagaccccacaggctcctcggacactgggtccatcacctcctgccccatcatccactccaacaccaacagcccctattgccactctgaaccagcctccaccacttcttcgtccaacactgcctgctgccccggctcttcaccggcagcctcctccactccagcagcaggctcggttcatccagccccggccaactttaaatcagcctccaccacctcttattcgccctgctaattccatgccaccccgtctaaacccaagaccggtgttgtccacggttggtggtcaacagccaccatcacttattggaattcagacagattcacagtcctcactgcactaaaaattaaattggacacagctgcagtaacttttcaccccatcattataccagtgctcatctgactgatgaaaaagaggaaagaataatcatttctagatactgaggctgcgaactagttctgtggcagtggactagcataagtggatgtctaagaaatttttcagttcactagactaaaatgttttacaacaaaaagcctccagttagcctcctttctagagtatatgttcagcaatgttgatctcataaaa

SEQ ID NO: 175162 - DNA, 1497 bp, Homo sapiens
  Payload ID: 14397
  Gene Symbol: RCOR3
  Gene Name: REST corepressor 3
  ENST ID: ENST00000528926
  CDS Start-End: 166-1290
agcggggcggttatggcggctccatattaacagcctcctcctcctccgccgccgccgccgtctcctcctcctcctcctttccctcccgcccgcgctctaagccatctccgccttcaccctgacgcctgcctcttcccctcacctttccccctcccctgttctaccatgcccggcatgatggagaaagggcccgagttactggggaagaaccgatcggccaacggcagcgccaagagcccggcaggcggcggcggcagcggcgcctcgtccaccaacggcgggctgcactactcagagcccgagagcggctgcagcagcgacgacgagcacgatgttgggatgagagtcggagccgaataccaagctcggatccctgaatttgatccagtagagacaaggtcttgctatgtttcccaggctggtctcaaactccggggctcaagccatccgccctccttggcctcccaaagtgctgggattataggtgctacaaagtacacagataaagacaatggagggatgcttgtatggtctccatatcacagtatcccagatgccaaattggatgaatacattgcaattgcaaaggaaaagcatggctacaatgtggaacaggcacttggcatgttgttctggcataaacataacattgagaagtcccttgctgatctccctaatttcactccctttccggatgagtggacagtggaagataaagtcctatttgaacaagcctttagttttcatggaaagagctttcacaggattcagcaaatgcttccagataagacaattgcaagccttgtaaaatattactattcttggaaaaaaactcgctctaggacaagtttgatggatcgccaggctcgtaaactagctaatagacataatcagggtgacagtgatgatgatgtagaagaaacacatccaatggatgggaatgatagtgattatgatcccaaaaaagaagccaaaaaagagggtaatactgaacaacctgtccaaactagcaagattggacttggaagaagagagtatcagagtttacaacatcgccatcattctcagcgttctaagtgccgtccacctaagggcatgtatttaacccaggaagatgtggtagcagtttcctgtagtcccaatgcagccaacaccatcctgaggcaactggacatggagttgatctctctaaaacgtcagtttcaggcatccactgggagttttggactgtatcccctgcggatatgggaggactactatattctgcttacaaaatgttcagaatgctaagcaagtaaacagtgcacttaaacagaaaatggaaggtggaattgaagaattcaaacctcctgagtcaaatcagaaaattaatgcccgttggaccacagaggagcagcttctagcagtgcaaggtgtccgcaaatatggtaaagattttcaagctattgcagatgtaattggcaacaagactgttggccaagtgaagaacttctttgt

SEQ ID NO: 175163 - DNA, 427 bp, Homo sapiens
  Payload ID: 14397
  Gene Symbol: RCOR3
  Gene Name: REST corepressor 3
  ENST ID: ENST00000534460
  CDS Start-End: 1-427
tgatgatgatgtagaagaaacacatccaatggatgggaatgatagtgattatgatcccaaaaaagaagccaaaaaagagggtaatactgaacaacctgtccaaactagcaagattggacttggaagaagagagtatcagagtttacaacatcgccatcattctcagcgttctaagtgccgtccacctaagggcatgtatttaacccaggaagatgtggtagcagtttcctgtagtcccaatgcagccaacaccatcctgaggcaactggacatggagttgatctctctaaaacgtcaggttcagaatgctaagcaagtaaacagtgcacttaaacagaaaatggaaggtggaattgaagaattcaaacctcctgaggcacagaccccacaggctcctcggacactgggtccatcacctcctgcccca

SEQ ID NO: 175164 - DNA, 434 bp, Homo sapiens
  Payload ID: 14397
  Gene Symbol: RCOR3
  Gene Name: REST corepressor 3
  ENST ID: ENST00000485186
  CDS Start-End: 1-224
gtcccaatgcagccaacaccatcctgaggcaactggacatggagttgatctctctaaaacgtcaggttcagaatgctaagcaagtaaacagtgcacttaaacagaaaatggaaggtggaattgaagaattcaaacctcctgagtcaaatcagaaaattaatgcccgttggaccacagaggagcagcttctagcagtgcaaggtgactggctactagggaaataaatgaatgtggaattgaggatggaacaaagaattcaatgctttacaataaatggactgtatttgagagttcaagagaggattggagaaaataactgagtatgtaaaaaatggtgtccgcaaatatggtaaagattttcaagctattgcagatgtaattggcaacaagactgttggccaagtgaagaacttctttgtaaactacaggcgtcg

SEQ ID NO: 175165 - DNA, 1022 bp, Homo sapiens
  Payload ID: 14397
  Gene Symbol: RCOR3
  Gene Name: REST corepressor 3
  ENST ID: ENST00000529572
  CDS Start-End: 170-304
aatccgctgccatctcccggagtgccccgagttgatatcttcccatccacccgccgcttctttcctccatctagcgatttttattttttaagtgtctcttcctttttctttcttttcttcttttttattttttatatatattttttggcattgctttgcagatgttgggatgagagtcggagccgaataccaagctcggatccctgaatttgatccaggtgctacaaagtacacagataaagacaatggagggatgcttgtatggtctccatatcacagtatcccagatgccaaatgcccatgaagaatgaaaaaacctaggatctgatggcattgctgcttaaatcctcaagcaggggagggagttactatgtagacatctgcccaggcttttcctcagtatatggagcggtaaagacatgccttcaaacttcaaagagcccactatcattaccattttaaagaggaaaggggaaagaactgacttcagcagccatcaggtcatctttgtgctctccatttctggacggagaccttctggatcattgaccatgcacttcttgaatcatggtgtggctttagacttcaatgtgatgtagcggacctgatcctttgcggcacatcagatataggaaacgtgcagtggatgaatacattgcaattgcaaaggaaaagcatggctacaatgtggaacaggcacttggcatgttgttctggcataaacataacattgagaagtcccttgctgatctccctaatttcactccctttccggatgagtggacagtggaagataaagtcctatttgaacaagcctttagttttcatggaaagagctttcacaggattcagcaaatgcttccagataagacaattgcaagccttgtaaaatattactattcttggaaaaaaactcgctctaggacaagtttgatggatcgccaggctcgtaaactagctaatagacataatcagggtgacagtgatgatgatgtagaagaaacacatccaatggatgggaa

SEQ ID NO: 175166 - DNA, 564 bp, Homo sapiens
  Payload ID: 14397
  Gene Symbol: RCOR3
  Gene Name: REST corepressor 3
  ENST ID: ENST00000534478
  CDS Start-End: 306-564
gcattacagagcacaactccttccaggctggaaacgctgccagaaagcagctctcgcttcacctctgccgggggactccgccctctcccccagcgctccaagcggagaccgcaggtcagcaagaactgaaaacgcgtctactgggccagaaagggcccgagttactggggaagaaccgatcggccaacggcagcgccaagagcccggcaggcggcggcggcagcggcgcctcgtccaccaacggcgggctgcactactcagagcccgagagcggctgcagcagcgacgacgagcacgatgttgggatgagagtcggagccgaataccaagctcggatccctgaatttgatccaggtgctacaaagtacacagataaagacaatggagggatgcttgtatggtctccatatcacagtatcccagatgccaaattggatgaatacattgcaattgcaaaggaaaagcatggctacaatgtggaacaggcacttggcatgttgttctggcataaacataacattgagaagtcccttgctgatctccctaatttcactccctttccgg

SEQ ID NO: 175167 - DNA, 540 bp, Homo sapiens
  Payload ID: 14397
  Gene Symbol: RCOR3
  Gene Name: REST corepressor 3
  ENST ID: ENST00000533469
  CDS Start-End: 92-540
aaacgctgccagaaagcagctctcgcttcacctctgccgggggactccgccctctcccccagcgctccaagcggagaccgcagatgttgggatgagagtcggagccgaataccaagctcggatccctgaatttgatccaggtgctacaaagtacacagataaagacaatggagggatgcttgtatggtctccatatcacagtatcccagatgccaaattggatgaatacattgcaattgcaaaggaaaagcatggctacaatgtggaacaggcacttggcatgttgttctggcataaacataacattgagaagtcccttgctgatctccctaatttcactccctttccggatgagtggacagtggaagataaagtcctatttgaacaagcctttagttttcatggaaagagctttcacaggattcagcaaatgcttccagataagacaattgcaagccttgtaaaatattactattcttggaaaaaaactcgctctaggacaagtttgatggatcgccaggctcgtaaactagctaatag

SEQ ID NO: 175168 - DNA, 720 bp, Homo sapiens
  Payload ID: 14397
  Gene Symbol: RCOR3
  Gene Name: REST corepressor 3
  ENST ID: ENST00000529763
  CDS Start-End: 1-720
ggtaatactgaacaacctgtccaaactagcaagattggacttggaagaagagagtatcagagtttacaacatcgccatcattctcagcgttctaagtgccgtccacctaagggcatgtatttaacccaggaagatgtggtagcagtttcctgtagtcccaatgcagccaacaccatcctgaggcaactggacatggagttgatctctctaaaacgtcaggttcagaatgctaagcaagtaaacagtgcacttaaacagaaaatggaaggtggaattgaagaattcaaacctcctgagtcaaatcagaaaattaatgcccgttggaccacagaggagcagcttctagcagtgcaaggtgtccgcaaatatggtaaagattttcaagctattgcagatgtaattggcaacaagactgttggccaagtgaagaacttctttgtaaactacaggcgtcggtttaacttagaggaggcacagaccccacaggctcctcggacactgggtccatcacctcctgccccatcatccactccaacaccaacagcccctattgccactctgaaccagcctccaccacttcttcgtccaacactgcctgctgccccggctcttcaccggcagcctcctccactccagcagcaggctcggttcatccagccccggccaactttaaatcagcctccaccacctcttattcgccctgctaattccatgccaccc

SEQ ID NO: 175169 - DNA, 1496 bp, Homo sapiens
  Payload ID: 14398
  Gene Symbol: RFPL1
  Gene Name: ret finger protein-like 1
  Uniprot ID: O75677
  ENST ID: ENST00000354373
  CDS Start-End: 210-1163
gccgtgtcactggctcaggctcagttgctgggtcaccagtagaatggacccttcctccacctcagttcagagcacagtgatgattcgtgactttctttcccaatagaacttcaaatctctgaagacggggggtggggggatgtgcttgagtgtttgtactcatggtcttgttctagaagtgacaaagctgggacacaatacctttatgcatgaaaaggttgtcacttgtcacaactaacaggctttcacctcacggaaattttcttcccttgtgcacttttcccctggcagtggacatggctgcactcttccaagaagcaagcagctgtcccgtctgctcagactatctagagaaaccaatgtccctggagtgtggatgcgctgtctgcttcaagtgcatcaattcactgcagaaggagccccatggggaggatctactttgctgttgctgttccatggtctctcagaagaacaaaatcaggcccagttggcagctagagaggctggcttcccacatcaaggaactggagcccaagctgaagaagattctgcagatgaacccaaggatgcggaagttccaagtggatatgaccttggatgccgacacagccaacaacttcctcctcatttctgacgacctcaggagcgtccgaagtgggtgcatcacacagaatcggcaagaccttgccgagagatttgacgtgtccatttgcatcctgggctcccctcgctttacctgtggccgccactactgggaggtggacgtgggaacaagcacagaatgggacctgggagtctgcagagaatctgttcaccgcaaagggaggatccatctgaccacagagcgtggattctggactgtgagtttgagggatggaagccgcctctctgccagcacggtgccgctgactttcctcttcgtagaccgcaagttacagcgagtggggatttttctggatatgggcatgcagaacgtttccttttttgatgctgaaggtggttcccatgtctatacattcaggagtgtctctgctgaggagccactgcacttgttttttgctcctccaagtccacctaatggtgataagagtgtcttgagtatctgtcctgtgataaacccgggcactactgatgctccagtccatcctggggaggccaaataagcccccactgcaaaaaaacaaaaaacaggttaagaaaattacttgggtgggcagacttaggaacgctctactcggtaaaagcgttatacaaagtcataggagaaaaatatgggacaattcatgattatacttaatctaatttgattagtttataaattgagtcctaagtattaattattgccaccatccaactcattgagtcttatggttcacatcttgtttcctatagaaatattctgtattctgggatcaatttccaaatgcttttttatttctgtaagttcaaattaatgtattatagaagttatgagttaaataaacattggaatatca

SEQ ID NO: 175170 - DNA, 1496 bp, Homo sapiens
  Payload ID: 14399
  Gene Symbol: RFPL2
  Gene Name: ret finger protein-like 2
  Uniprot ID: O75678
  ENST ID: ENST00000248980
  CDS Start-End: 206-1159
gccatgtcactggctcaggctcagctgctgggtcaccaggagaatggacgcttcctccacctcagctcagagcacagtgatgattcgtgactttcccaatagaacttcaaatctctgaagacggggggtggggggatgtgcttgagtgtttgtactcatggtcttattctcggagtgacaaagctggaacacaatacctctatgcatgaaaaggttgtcacttgtcacaactaacaggctttcacctcatggaaatttttttaccttgtgtacttttcccctggcagtggacatggctgcactcttccaagaagcaagcagctgtcccgtctgctcagactatctggaaaaaccaatgtccctggagtgtggatgcgccgtctgcctcaagtgcattaattcactgcagaaggagccccatggggaggatctactttgctgttgctcttccatggtctctcggaagaacaaaatcaggcgcaatcggcagctagagaggctggcttcccacatcaaggaactggagcccaagctgaagaagattctgcagatgaacccaaggatgcggaagttccaagtggatatgaccttggatgccaacacagccaacaacttcctcctcatttctgacgacctcaggagcgtccgaagtgggcgcatcagacagaatcggcaagaccttgccgagagatttgacgtgtccgtttgcatcctgggctcccctcgctttacctgtggccgccactgctgggaggtggacgtgggaacaagcacagaatgggacctgggagtctgcagagaatctgttcaccgcaaagggaggatccagctgaccacagagcttggattctggactgtgagtttgagggatggaggccgcctctctgccaccacggtgccgctgactttcctcttcgtagaccgcaagttacagcgagtggggatttttctggatatgggcatgcagaacgtttccttttttgatgctgaaagtggttcccatgtctatacattcaggagcgtatctgctgaggagccattgcgcccatttttggctccttcagttccacctaatggtgatcaaggtgtcttgagcatctgtcctttgatgaactcaggcactactgatgctccagtccgtcctggggaggccaaataagccctcactccaaaaaaacaaaaaacagggtaagaaaattacttgggtgggtagacttaggaacgctctacttcgtaaaagcattatacaaagtcacgggagaaaaatatgggacatttcttgattgtacttaatctaatttgattagattatagagtcctaagtattaattattgccaccatcaaactcattgagtcctatggttcacatcttgtttcctatagaaatgtcctgtattctgggatcaatttccaaatgctttacttttttatttctgcaagttcaaattaatgtattatagaagttatgagttaaataaagattggaatatcacct

SEQ ID NO: 175171 - DNA, 1474 bp, Homo sapiens
  Payload ID: 14399
  Gene Symbol: RFPL2
  Gene Name: ret finger protein-like 2
  Uniprot ID: O75678
  ENST ID: ENST00000248983
  CDS Start-End: 1-1137
atggaggtggctgaattaggcttcccagagactgcagtgtcccaatccaggatctgtctatgtgctgtattgtgtggccactgggactttgcagacatgatggtgataaggagcctgagcctcatcaggttagagggtgtggaagggcgtgacccagtgggaggtgggaatctcaccaataaaaggccctcgtgtgccccttccccacaagacctgagcgcccagtggaagcagctggaggacagaggagcttccagcagaagagtggacatggctgcactcttccaagaagcaagcagctgtcccgtctgctcagactatctggaaaaaccaatgtccctggagtgtggatgcgccgtctgcctcaagtgcattaattcactgcagaaggagccccatggggaggatctactttgctgttgctcttccatggtctctcggaagaacaaaatcaggcgcaatcggcagctagagaggctggcttcccacatcaaggaactggagcccaagctgaagaagattctgcagatgaacccaaggatgcggaagttccaagtggatatgaccttggatgccaacacagccaacaacttcctcctcatttctgacgacctcaggagcgtccgaagtgggcgcatcagacagaatcggcaagaccttgccgagagatttgacgtgtccgtttgcatcctgggctcccctcgctttacctgtggccgccactgctgggaggtggacgtgggaacaagcacagaatgggacctgggagtctgcagagaatctgttcaccgcaaagggaggatccagctgaccacagagcttggattctggactgtgagtttgagggatggaggccgcctctctgccaccacggtgccgctgactttcctcttcgtagaccgcaagttacagcgagtggggatttttctggatatgggcatgcagaacgtttccttttttgatgctgaaagtggttcccatgtctatacattcaggagcgtatctgctgaggagccattgcgcccatttttggctccttcagttccacctaatggtgatcaaggtgtcttgagcatctgtcctttgatgaactcaggcactactgatgctccagtccgtcctggggaggccaaataagccctcactccaaaaaaacaaaaaacagggtaagaaaattacttgggtgggtagacttaggaacgctctacttcgtaaaagcattatacaaagtcacgggagaaaaatatgggacatttcttgattgtacttaatctaatttgattagattatagagtcctaagtattaattattgccaccatcaaactcattgagtcctatggttcacatcttgtttcctatagaaatgtcctgtattctgggatcaatttccaaatgctttacttttttatttctgcaagttcaaattaatgtattatagaagttatgagttaaataaagattggaatatcacct

SEQ ID NO: 175172 - DNA, 2407 bp, Homo sapiens
  Payload ID: 14399
  Gene Symbol: RFPL2
  Gene Name: ret finger protein-like 2
  Uniprot ID: O75678
  ENST ID: ENST00000400237
  CDS Start-End: 937-2073
tatcgctacactgccgcggcgagtaccgggttggcggcgctatcctgggctacaccgccggtggcgggaggcgttttaggggcgctatctggtgctgcactgcccgcgcaggagttgggttgggtgacctactccaggcgtcactgcccgaggctgggggctgatttggggcgctatcccgggagtcatttcctgtggcgaggggctggttgagggtggtatccgtggctgcactgcccacagcacagagcgggtttggggagttatcccgggctgcgctgcccgtggcagggggcaggctgccagcgccattgggtgctgcatgtactaggcacggatgagttaggggcgccatctgggactgcactgccggtggcgggcggtggaggtgtcagtgacagcggtggtctgcaagagaggagcggtcctcctcttcccggccacctcctcctgttcttgctcaagtgcggcgggcgcacagcatttcctgagcgcggcaggggccccagccccgtggtgcttcctggacccgcctcctattgctctgtgttgcagagaccgcctgggaccccggggcacgcagtagtggacacgaggaggctacagggccctgtgggtggaggaggcatcaggaacgggaaccggcacttgggtggggagggctggctggggttgagtttctgctgctcctgcttcccgaggagtgcagccagggtggctgcagctgttcctgtggagtgggaagcccgggcactgtggtgtctgcagtccccactccaggccgcagttcctggccagcttgcgctaaaaggagaggctggactttgaagtgtgggtgcttttctggctttgtctgcccggatgcccagtgccctgagaaggagctacatgccacgggctggaggctagagcctgtggcaccatgatttgcctccgatggaggtggctgaattaggcttcccagagactgcagtgtcccaatccaggatctgtctatgtgctgtattgtgtggccactgggactttgcagacatgatggtgataaggagcctgagcctcatcaggttagagggtgtggaagggcgtgacccagtgggaggtgggaatctcaccaataaaaggccctcgtgtgccccttccccacaagacctgagcgcccagtggaagcagctggaggacagaggagcttccagcagaagagtggacatggctgcactcttccaagaagcaagcagctgtcccgtctgctcagactatctggaaaaaccaatgtccctggagtgtggatgcgccgtctgcctcaagtgcattaattcactgcagaaggagccccatggggaggatctactttgctgttgctcttccatggtctctcggaagaacaaaatcaggcgcaatcggcagctagagaggctggcttcccacatcaaggaactggagcccaagctgaagaagattctgcagatgaacccaaggatgcggaagttccaagtggatatgaccttggatgccaacacagccaacaacttcctcctcatttctgacgacctcaggagcgtccgaagtgggcgcatcagacagaatcggcaagaccttgccgagagatttgacgtgtccgtttgcatcctgggctcccctcgctttacctgtggccgccactgctgggaggtggacgtgggaacaagcacagaatgggacctgggagtctgcagagaatctgttcaccgcaaagggaggatccagctgaccacagagcttggattctggactgtgagtttgagggatggaggccgcctctctgccaccacggtgccgctgactttcctcttcgtagaccgcaagttacagcgagtggggatttttctggatatgggcatgcagaacgtttccttttttgatgctgaaagtggttcccatgtctatacattcaggagcgtatctgctgaggagccattgcgcccatttttggctccttcagttccacctaatggtgatcaaggtgtcttgagcatctgtcctttgatgaactcaggcactactgatgctccagtccgtcctggggaggccaaataagccctcactccaaaaaaacaaaaaacagggtaagaaaattacttgggtgggtagacttaggaacgctctacttcgtaaaagcattatacaaagtcacgggagaaaaatatgggacatttcttgattgtacttaatctaatttgattagattatagagtcctaagtattaattattgccaccatcaaactcattgagtcctatggttcacatcttgtttcctatagaaatgtcctgtattctgggatcaatttccaaatgctttacttttttatttctgcaagttcaaattaatgtattatagaagttatgagttaaataaagattggaatatca

SEQ ID NO: 175173 - DNA, 1445 bp, Homo sapiens
  Payload ID: 14399
  Gene Symbol: RFPL2
  Gene Name: ret finger protein-like 2
  ENST ID: ENST00000626996
  CDS Start-End: 121-351
ccactctgcatcctgttctaggcttttctggctttgtctgcccggatgcccagtgccctgagaaggagctacatgccacgggctggaggctagagcctgtggcaccatgatttgcctccgatggaggtggctgaattaggcttcccagagactgcagtgtcccaatccaggatctgtctatgtgctgtattgtgtggccactgggactttgcagacatgatggtgataaggagcctgagtggacatggctgcactcttccaagaagcaagcagctgtcccgtctgctcagactatctggaaaaaccaatgtccctggagtgtggatgcgccgtctgcctcaagtgcattaattcactgcagaaggagccccatggggaggatctactttgctgttgctcttccatggtctctcggaagaacaaaatcaggcgcaatcggcagctagagaggctggcttcccacatcaaggaactggagcccaagctgaagaagattctgcagatgaacccaaggatgcggaagttccaagtggatatgaccttggatgccaacacagccaacaacttcctcctcatttctgacgacctcaggagcgtccgaagtgggcgcatcagacagaatcggcaagaccttgccgagagatttgacgtgtccgtttgcatcctgggctcccctcgctttacctgtggccgccactgctgggaggtggacgtgggaacaagcacagaatgggacctgggagtctgcagagaatctgttcaccgcaaagggaggatccagctgaccacagagcttggattctggactgtgagtttgagggatggaggccgcctctctgccaccacggtgccgctgactttcctcttcgtagaccgcaagttacagcgagtggggatttttctggatatgggcatgcagaacgtttccttttttgatgctgaaagtggttcccatgtctatacattcaggagcgtatctgctgaggagccattgcgcccatttttggctccttcagttccacctaatggtgatcaaggtgtcttgagcatctgtcctttgatgaactcaggcactactgatgctccagtccgtcctggggaggccaaataagccctcactccaaaaaaacaaaaaacagggtaagaaaattacttgggtgggtagacttaggaacgctctacttcgtaaaagcattatacaaagtcacgggagaaaaatatgggacatttcttgattgtacttaatctaatttgattagattatagagtcctaagtattaattattgccaccatcaaactcattgagtcctatggttcacatcttgtttcctatagaaatgtcctgtattctgggatcaatttccaaatgctttacttttttatttctgcaagttcaaattaatgtattatagaagttatgagttaaataaagattggaatatca

SEQ ID NO: 175174 - DNA, 1171 bp, Homo sapiens
  Payload ID: 14399
  Gene Symbol: RFPL2
  Gene Name: ret finger protein-like 2
  ENST ID: ENST00000628378
  CDS Start-End: 61-345
agaaggagctacatgccacgggctggaggctagagcctgtggcaccatgatttgcctccgatggaggtggctgaattaggcttcccagagactgcagtgtcccaatccaggatctgtctatgtgctgtattgtgtggccactgggactttgcagacatgatggtgataaggagcctgagacctgagcgcccagtggaagcagctggaggacagaggagcttccagcagaagagtggacatggctgcactcttccaagaagcaagcagctgtcccgtctgctcagactatctggaaaaaccaatgtccctggagtgtggatgcgccgtctgcctcaagtgcattaattcactgcagaaggagccccatggggaggatctactttgctgttgctcttccatggtctctcggaagaacaaaatcaggcgcaatcggcagctagagaggctggcttcccacatcaaggaactggagcccaagctgaagaagattctgcagatgaacccaaggatgcggaagttccaagtggatatgaccttggatgccaacacagccaacaacttcctcctcatttctgacgacctcaggagcgtccgaagtgggcgcatcagacagaatcggcaagaccttgccgagagatttgacgtgtccgtttgcatcctgggctcccctcgctttacctgtggccgccactgctgggaggtggacgtgggaacaagcacagaatgggacctgggagtctgcagagaatctgttcaccgcaaagggaggatccagctgaccacagagcttggattctggactgtgagtttgagggatggaggccgcctctctgccaccacggtgccgctgactttcctcttcgtagaccgcaagttacagcgagtggggatttttctggatatgggcatgcagaacgtttccttttttgatgctgaaagtggttcccatgtctatacattcaggagcgtatctgctgaggagccattgcgcccatttttggctccttcagttccacctaatggtgatcaaggtgtcttgagcatctgtcctttgatgaactcaggcactactgatgctccagtccgtcctggggaggccaaataagccctcactccaaaaaaacaaaaaacagggtaagaaaattacttgggtgggtagacttaggaacgc

SEQ ID NO: 175175 - DNA, 1488 bp, Homo sapiens
  Payload ID: 14400
  Gene Symbol: RFPL3
  Gene Name: ret finger protein-like 3
  Uniprot ID: O75679
  ENST ID: ENST00000249007
  CDS Start-End: 206-1159
gccacgtcactggctcaggctcagctgctgggtcaccaggagaatggacccttcctccacctcagctcagagcacagtgatgattcgtgactttcccaatagaacttcaaatctctgaggacggggggtggggggatgtgcttgagtgtttgtactcatggtcttgttctcggagtgacaaagctggaacacaatacctctatgcatgaaaaggttgtcacttgtcacaactaacaggctttcacctcaaggaaattttcttcccttgtgtacttttcccctggcagtggacatggctgcactcttccaagaagcaagcagctgtcccgtctgctcagactatctggaaaaaccaatgtccctggagtgtggatgcaccgtctgcctcaagtgcatcaattcgctgcagaaggagccccatggggaggatctgctttgctgttgctgttccatggtctctcagaggaacaaaatcaggcccaatcggcagctagagaggctggtttcccacatcaaggaactggagcccaagctgaagaagattctacagatgaacccaaggatgcggaagttccaagtggatatgaccttggatgccgacacagccaacaacttcctcctcatttctgacgacctcaggagcgtccgaagtgggctcatcacacagaatcggcaagaccttgccgagagatttgacgtgtccgtttgcatcctgggctcccctcgctttacctgtggccgccactactgggaggtggacgtgggaacaagcacagaatgggacctgggagtctgcagagaatctgttcactgcaaagggaagatccagctgaccacagagcttggattctggactgtgagtttgagggatggaagccgcctctctgccagcacggtgccgctgactttcctcttagtagaccgcaagttacagcgagtggggatttttctggatatgggcatgcagaacgtttccttttttgatgctgaaagtggttcccatgtctatacattcaggagcgtctctgctgaggagccactgcgcccatttttggctccttcaattccacctaatggtgatcaaggtgtcttgagcatctgtcctttgatgaactcaggcactactgatgctccagtccgtcctggggaggccaaataagccgccactgcaaaaaaaaacagggtcagaaaattacttgggtgggtagacttaggaattttctacttggtaaaagcattatacagtcataggagaaagatatgggacatttctataatctatattctaatttgattcgattattgagtcgtaagtattaattattgccaccatccaactcattgagtcttatggttcacatcttgtttcctatagaaatgttctgtattctcggatcaatttccaaatgctttactttttcatttctgtaagttcaaatcaatgtttaaattatagaagttatgaggtaaataaacatttggatatca

SEQ ID NO: 175176 - DNA, 1214 bp, Homo sapiens
  Payload ID: 14400
  Gene Symbol: RFPL3
  Gene Name: ret finger protein-like 3
  Uniprot ID: O75679
  ENST ID: ENST00000397468
  CDS Start-End: 19-885
cggcagcagcgagtggacatggctgcactcttccaagaagcaagcagctgtcccgtctgctcagactatctggaaaaaccaatgtccctggagtgtggatgcaccgtctgcctcaagtgcatcaattcgctgcagaaggagccccatggggaggatctgctttgctgttgctgttccatggtctctcagaggaacaaaatcaggcccaatcggcagctagagaggctggtttcccacatcaaggaactggagcccaagctgaagaagattctacagatgaacccaaggatgcggaagttccaagtggatatgaccttggatgccgacacagccaacaacttcctcctcatttctgacgacctcaggagcgtccgaagtgggctcatcacacagaatcggcaagaccttgccgagagatttgacgtgtccgtttgcatcctgggctcccctcgctttacctgtggccgccactactgggaggtggacgtgggaacaagcacagaatgggacctgggagtctgcagagaatctgttcactgcaaagggaagatccagctgaccacagagcttggattctggactgtgagtttgagggatggaagccgcctctctgccagcacggtgccgctgactttcctcttagtagaccgcaagttacagcgagtggggatttttctggatatgggcatgcagaacgtttccttttttgatgctgaaagtggttcccatgtctatacattcaggagcgtctctgctgaggagccactgcgcccatttttggctccttcaattccacctaatggtgatcaaggtgtcttgagcatctgtcctttgatgaactcaggcactactgatgctccagtccgtcctggggaggccaaataagccgccactgcaaaaaaaaacagggtcagaaaattacttgggtgggtagacttaggaattttctacttggtaaaagcattatacagtcataggagaaagatatgggacatttctataatctatattctaatttgattcgattattgagtcgtaagtattaattattgccaccatccaactcattgagtcttatggttcacatcttgtttcctatagaaatgttctgtattctcggatcaatttccaaatgctttactttttcatttctgtaagttcaaatcaatgtttaaattatagaagttatgaggtaaataaacatttggatatca

SEQ ID NO: 175177 - DNA, 1035 bp, Homo sapiens
  Payload ID: 14401
  Gene Symbol: RFPL4A
  Gene Name: ret finger protein-like 4A
  Uniprot ID: A6NLU0
  ENST ID: ENST00000434937
  CDS Start-End: 172-1035
atgaaatcagaatctgattggattaaaaaggagggaaagggtgtggctaaggtgggtggagacaccctctggtataaaagcccctggcaggcagctctcactccagatctgagctgtccgcagaagcagctggaggccaggggagaaactccagaaggagagacatttgccatggctgagcacttcaaacagatcattagatgtcctgtctgtctaaaagatcttgaagaagccgtgcaactgaaatgtggatatgcctgctgcctccagtgcctcaattcactccagaaggagcccgatggggaaggtttactgtgccgtttctgctctgtggtctctcagaaggatgacatcaagcccaagtacaagctgagggcgctggtttccatcatcaaggaactagagcccaagctgaaatctgttctaacaatgaacccaaggatgaggaagtttcaagtggatatgacgttcgatgtggacacagccaacaactatctcatcatttctgaagacctgaggagtttccgaagtggggatttgagccagaataggaaggagcaagctgagaggttcgacactgccctgtgcgtcctgggcacccctcgcttcacttccggccgccattactgggaggtggacgtgggcaccagccaagtgtgggatgtgggcgtgtgcaaggaatctgtgaaccgacaggggaagattgtgctttcttcagaacacggcttcttgactgtgggttgcagagaaggaaaggtctttgctgccagcactgtgcctatgactcctctctgggtgagtccccagttgcacagagtggggattttcctggatgtaggtatgaggtccattgccttttacaatgttagtgatgggtgccatatctacacattcatcgagattcctgtttgcgagccctggcgtccattttttgctcataaacgtggaagtcaagatgatcagagcatcctgagtatctgttctgtgatcaatccatccgctgccagtgccccagtttcttctgagggaaagtaa

SEQ ID NO: 175178 - DNA, 908 bp, Homo sapiens
  Payload ID: 14402
  Gene Symbol: RFPL4AL1
  Gene Name: ret finger protein-like 4A-like 1
  Uniprot ID: F8VTS6
  ENST ID: ENST00000341750
  CDS Start-End: 45-908
agctggaggccaggggagaaactccagaaggagagacatttgccatggctgagcacttcaaacagatcattagatgtcctgtctgtctaaaagatcttgaagaagccgtgcaactgaaatgtggatatgcctgctgcctccagtgcctcaattcactccagaaggagcccgatggggaaggtttactgtgccgtttctgctctgtggtctctcagaaggatgacatcaagcccaagtacaagctgagggcgctggtttccatcatcaaggaactagagcccaagctgaaatctgttctaacaatgaacccaaggatgaggaagtttcaagtggatatgaccttcgatgtggacacagccaacaactatctcatcatttctgaagacctgaggagtttccgaagtggggatttgagccagaataggaaggagcaagctgagaggttcgacactgccctgtgcgtcctgggcacccctcgcttcacttccggccgccattactgggaggtggacgtgggcaccagccaagtgtgggatgtgggcgtgtgcaaggaatctgtcaaccgacaggggaagattgagctttcttcagaacacggcttcttgactgtgggttgcagagaaggaaaggtctttgctgccagcactgtgcctatgactcctctctgggtgagtccccagttgcacagagtggggattttcctggatgtaggtatgaggtccattgccttttacaatgttagtgatgggtgccatatcaacacattcatcgagattcctgtttgcgagccctggcgtccattttttgctcataaacgtggaagtcaagatgatcagagcatcctgagtatctgttctgtgatcaatccatccactgccagtgccccagtttcttctgagggaaagtaa

SEQ ID NO: 175179 - DNA, 1900 bp, Homo sapiens
  Payload ID: 14403
  Gene Symbol: RFPL4B
  Gene Name: ret finger protein-like 4B
  Uniprot ID: Q6ZWI9
  ENST ID: ENST00000441065
  CDS Start-End: 313-1104
gagaggagcagaggtctgtagaggtagagacgtaggcttcggatcttttagaattctgctggaagtctccaagtcaagaggatctacaaagaaatactgagtggagactatactgagattctgttaaagacccacttgaattcagcccccattaggagaaactttggccggagcagccaacacatcacctggaagtcttcagactagactattgaagagtggattgtgtactgagggctcccaagtgcttccagaagccaataaaggatcacttcagtttacttcacggctaaggagtaacccttaagaaccatggccaaacgcctgcaagcagagttgtcctgtccagtttgcctggattttttctcctgttccatttctctctcttgtacacacgtgttctgctttgattgcatccagaggtatatactagaaaaccatgattttagagcgatgtgccccttgtgtcgagacgtggtgaaggtacctgctttggaagaatggcaagtgagcgtcctaacacttatgaccaagcagcacaatagccgacttgagcaaagtctgcacgtgagggaggagctccggcattttcgggaggatgtgaccctggatgcagccactgccagctccctccttgtcttctccaatgatctaagaagcgctcagtgtaagaagatccaccacgatctgacaaaagatcccaggctggcctgtgtcctgggtactccctgcttctcctccggccaacattactgggaggttgaagtgggagaggtgaagtcatggtccctgggcgtctgcaaggagccggctgacagaaagagcaatgatttattccctgagcatggcttctggatcagcatgaaggcaggagcaatccatgctaacacccacctggagagaattcctgcaagccctcgccttcgccgtgtgggaattttcctggatgctgacttagaagaaatccagttttttgatgttgacaataatgtcctcatctatacacatgatggtttcttctctttggagcttttgtgtccattcttctgtcttgagctcttgggagaaggggagagtggcaacgtcctgaccatctgcccatgagaaagtcagcccttcctagaagctttctgagaggtgaaagagaattttggcctgagaaaggtcagcatgattgaggaagagataatgtgctatagtgcaaagacttggtaaatttttaaagtagattttgtagactttgtagcaaaacaattttcggatttttggggtaaattttgtggaatttgtagctaggtaactggggtctttagggatgttattaagtactgtaagcttcagttttctagtctgtagatgcggataattgtatctcagtcaaacagctgtggtaattagagacaatactatgcctttgtcttatagtaaataacaaatagagaaatcttagattgtaagtaagctagatattaggttttgtggatagacaatatctttttcattatttcaagctgttttgtgtaattcctgataatgtctgaggaggaagaaaaattcaacagccagtgtgagttattttgttgatacagcatgaaatttcagagagacaaactgatattggggaagaactaagtttttcatttttattttctttgaaacacagccacataagttttcttgaaagacaaagaactttgaccaaaatgcattgttaatggtgattcatattcttatgggaagtgtcatttacccatctcaataattggactattgtgatttataagaattcttatcaaccatgttaactaacacatattcatcaaaaattgttttcaaggttgcttttggattttttatttgtagaatttattttcttgcaaataaatttataaagcattgg

SEQ ID NO: 175180 - DNA, 4149 bp, Homo sapiens
  Payload ID: 14404
  Gene Symbol: RET
  Gene Name: ret proto-oncogene
  Uniprot ID: P07949
  ENST ID: ENST00000340058
  CDS Start-End: 181-3399
ccgaagcagggcgcgcagcagcgctgagtgccccggaacgtgcgtcgcgcccccagtgtccgtcgcgtccgccgcgccccgggcggggatggggcggccagactgagcgccgcacccgccatccagacccgccggccctagccgcagtccctccagccgtggccccagcgcgcacgggcgatggcgaaggcgacgtccggtgccgcggggctgcgtctgctgttgctgctgctgctgccgctgctaggcaaagtggcattgggcctctacttctcgagggatgcttactgggagaagctgtatgtggaccaggcagccggcacgcccttgctgtacgtccatgccctgcgggacgcccctgaggaggtgcccagcttccgcctgggccagcatctctacggcacgtaccgcacacggctgcatgagaacaactggatctgcatccaggaggacaccggcctcctctaccttaaccggagcctggaccatagctcctgggagaagctcagtgtccgcaaccgcggctttcccctgctcaccgtctacctcaaggtcttcctgtcacccacatcccttcgtgagggcgagtgccagtggccaggctgtgcccgcgtatacttctccttcttcaacacctcctttccagcctgcagctccctcaagccccgggagctctgcttcccagagacaaggccctccttccgcattcgggagaaccgacccccaggcaccttccaccagttccgcctgctgcctgtgcagttcttgtgccccaacatcagcgtggcctacaggctcctggagggtgagggtctgcccttccgctgcgccccggacagcctggaggtgagcacgcgctgggccctggaccgcgagcagcgggagaagtacgagctggtggccgtgtgcaccgtgcacgccggcgcgcgcgaggaggtggtgatggtgcccttcccggtgaccgtgtacgacgaggacgactcggcgcccaccttccccgcgggcgtcgacaccgccagcgccgtggtggagttcaagcggaaggaggacaccgtggtggccacgctgcgtgtcttcgatgcagacgtggtacctgcatcaggggagctggtgaggcggtacacaagcacgctgctccccggggacacctgggcccagcagaccttccgggtggaacactggcccaacgagacctcggtccaggccaacggcagcttcgtgcgggcgaccgtacatgactataggctggttctcaaccggaacctctccatctcggagaaccgcaccatgcagctggcggtgctggtcaatgactcagacttccagggcccaggagcgggcgtcctcttgctccacttcaacgtgtcggtgctgccggtcagcctgcacctgcccagtacctactccctctccgtgagcaggagggctcgccgatttgcccagatcgggaaagtctgtgtggaaaactgccaggcattcagtggcatcaacgtccagtacaagctgcattcctctggtgccaactgcagcacgctaggggtggtcacctcagccgaggacacctcggggatcctgtttgtgaatgacaccaaggccctgcggcggcccaagtgtgccgaacttcactacatggtggtggccaccgaccagcagacctctaggcaggcccaggcccagctgcttgtaacagtggaggggtcatatgtggccgaggaggcgggctgccccctgtcctgtgcagtcagcaagagacggctggagtgtgaggagtgtggcggcctgggctccccaacaggcaggtgtgagtggaggcaaggagatggcaaagggatcaccaggaacttctccacctgctctcccagcaccaagacctgccccgacggccactgcgatgttgtggagacccaagacatcaacatttgccctcaggactgcctccggggcagcattgttgggggacacgagcctggggagccccgggggattaaagctggctatggcacctgcaactgcttccctgaggaggagaagtgcttctgcgagcccgaagacatccaggatccactgtgcgacgagctgtgccgcacggtgatcgcagccgctgtcctcttctccttcatcgtctcggtgctgctgtctgccttctgcatccactgctaccacaagtttgcccacaagccacccatctcctcagctgagatgaccttccggaggcccgcccaggccttcccggtcagctactcctcttccggtgcccgccggccctcgctggactccatggagaaccaggtctccgtggatgccttcaagatcctggaggatccaaagtgggaattccctcggaagaacttggttcttggaaaaactctaggagaaggcgaatttggaaaagtggtcaaggcaacggccttccatctgaaaggcagagcagggtacaccacggtggccgtgaagatgctgaaagagaacgcctccccgagtgagctgcgagacctgctgtcagagttcaacgtcctgaagcaggtcaaccacccacatgtcatcaaattgtatggggcctgcagccaggatggcccgctcctcctcatcgtggagtacgccaaatacggctccctgcggggcttcctccgcgagagccgcaaagtggggcctggctacctgggcagtggaggcagccgcaactccagctccctggaccacccggatgagcgggccctcaccatgggcgacctcatctcatttgcctggcagatctcacaggggatgcagtatctggccgagatgaagctcgttcatcgggacttggcagccagaaacatcctggtagctgaggggcggaagatgaagatttcggatttcggcttgtcccgagatgtttatgaagaggattcctacgtgaagaggagccagggtcggattccagttaaatggatggcaattgaatccctttttgatcatatctacaccacgcaaagtgatgtatggtcttttggtgtcctgctgtgggagatcgtgaccctagggggaaacccctatcctgggattcctcctgagcggctcttcaaccttctgaagaccggccaccggatggagaggccagacaactgcagcgaggagatgtaccgcctgatgctgcaatgctggaagcaggagccggacaaaaggccggtgtttgcggacatcagcaaagacctggagaagatgatggttaagaggagagactacttggaccttgcggcgtccactccatctgactccctgatttatgacgacggcctctcagaggaggagacaccgctggtggactgtaataatgcccccctccctcgagccctcccttccacatggattgaaaacaaactctatggtagaatttcccatgcatttactagattctagcaccgctgtcccctttgcactatccttcctctctgtgatgctttttaaaaatgtttctggtctgaacaaaaccaaagtctgctctgaacctttttatttgtaaatgtctgactttgcatccagtttacatttaggcattattgcaactatgtttttctaaaaggatgtgaaaataagtgtaattaccacattgcccagcaacttaggatggtagaggaaaaaacagatcagggcggaactctcaggggagaccaagaacaggttgaataaggcgcttctggggtgggaatcaagtcatagtacttctactttaactaagtggataaatatacaaatctggggaggtattcagttgagaaaggagccaccagcaccactcagcctgcactgggagcacagccaggttcccccagacccctcctgggcaggcaggtgcctctcagaggccacccggcactggcgagcagccactggccaagcctcagccccagtcccagccacatgtcctccatcaggggtagcgaggttgcaggagctggctggccctgggaggacgcacccccactgctgttttcacatcctttcccttacccaccttcaggacggttgtcacttatgaagtcagtgctaaagctggagcagttgctttttgaaagaacatggtctgtggtgctgtggtcttacaatggacagtaaatatggttcttgccaaaactccttcttttgtctttgattaaatactagaaattt

SEQ ID NO: 175181 - DNA, 5659 bp, Homo sapiens
  Payload ID: 14404
  Gene Symbol: RET
  Gene Name: ret proto-oncogene
  Uniprot ID: P07949
  ENST ID: ENST00000355710
  CDS Start-End: 233-3577
ccctacccgctcctccggcgcagccggcgcttacctcgcttcagtcccgcgaccgaagcagggcgcgcagcagcgctgagtgccccggaacgtgcgtcgcgcccccagtgtccgtcgcgtccgccgcgccccgggcggggatggggcggccagactgagcgccgcacccgccatccagacccgccggccctagccgcagtccctccagccgtggccccagcgcgcacgggcgatggcgaaggcgacgtccggtgccgcggggctgcgtctgctgttgctgctgctgctgccgctgctaggcaaagtggcattgggcctctacttctcgagggatgcttactgggagaagctgtatgtggaccaggcagccggcacgcccttgctgtacgtccatgccctgcgggacgcccctgaggaggtgcccagcttccgcctgggccagcatctctacggcacgtaccgcacacggctgcatgagaacaactggatctgcatccaggaggacaccggcctcctctaccttaaccggagcctggaccatagctcctgggagaagctcagtgtccgcaaccgcggctttcccctgctcaccgtctacctcaaggtcttcctgtcacccacatcccttcgtgagggcgagtgccagtggccaggctgtgcccgcgtatacttctccttcttcaacacctcctttccagcctgcagctccctcaagccccgggagctctgcttcccagagacaaggccctccttccgcattcgggagaaccgacccccaggcaccttccaccagttccgcctgctgcctgtgcagttcttgtgccccaacatcagcgtggcctacaggctcctggagggtgagggtctgcccttccgctgcgccccggacagcctggaggtgagcacgcgctgggccctggaccgcgagcagcgggagaagtacgagctggtggccgtgtgcaccgtgcacgccggcgcgcgcgaggaggtggtgatggtgcccttcccggtgaccgtgtacgacgaggacgactcggcgcccaccttccccgcgggcgtcgacaccgccagcgccgtggtggagttcaagcggaaggaggacaccgtggtggccacgctgcgtgtcttcgatgcagacgtggtacctgcatcaggggagctggtgaggcggtacacaagcacgctgctccccggggacacctgggcccagcagaccttccgggtggaacactggcccaacgagacctcggtccaggccaacggcagcttcgtgcgggcgaccgtacatgactataggctggttctcaaccggaacctctccatctcggagaaccgcaccatgcagctggcggtgctggtcaatgactcagacttccagggcccaggagcgggcgtcctcttgctccacttcaacgtgtcggtgctgccggtcagcctgcacctgcccagtacctactccctctccgtgagcaggagggctcgccgatttgcccagatcgggaaagtctgtgtggaaaactgccaggcattcagtggcatcaacgtccagtacaagctgcattcctctggtgccaactgcagcacgctaggggtggtcacctcagccgaggacacctcggggatcctgtttgtgaatgacaccaaggccctgcggcggcccaagtgtgccgaacttcactacatggtggtggccaccgaccagcagacctctaggcaggcccaggcccagctgcttgtaacagtggaggggtcatatgtggccgaggaggcgggctgccccctgtcctgtgcagtcagcaagagacggctggagtgtgaggagtgtggcggcctgggctccccaacaggcaggtgtgagtggaggcaaggagatggcaaagggatcaccaggaacttctccacctgctctcccagcaccaagacctgccccgacggccactgcgatgttgtggagacccaagacatcaacatttgccctcaggactgcctccggggcagcattgttgggggacacgagcctggggagccccgggggattaaagctggctatggcacctgcaactgcttccctgaggaggagaagtgcttctgcgagcccgaagacatccaggatccactgtgcgacgagctgtgccgcacggtgatcgcagccgctgtcctcttctccttcatcgtctcggtgctgctgtctgccttctgcatccactgctaccacaagtttgcccacaagccacccatctcctcagctgagatgaccttccggaggcccgcccaggccttcccggtcagctactcctcttccggtgcccgccggccctcgctggactccatggagaaccaggtctccgtggatgccttcaagatcctggaggatccaaagtgggaattccctcggaagaacttggttcttggaaaaactctaggagaaggcgaatttggaaaagtggtcaaggcaacggccttccatctgaaaggcagagcagggtacaccacggtggccgtgaagatgctgaaagagaacgcctccccgagtgagctgcgagacctgctgtcagagttcaacgtcctgaagcaggtcaaccacccacatgtcatcaaattgtatggggcctgcagccaggatggcccgctcctcctcatcgtggagtacgccaaatacggctccctgcggggcttcctccgcgagagccgcaaagtggggcctggctacctgggcagtggaggcagccgcaactccagctccctggaccacccggatgagcgggccctcaccatgggcgacctcatctcatttgcctggcagatctcacaggggatgcagtatctggccgagatgaagctcgttcatcgggacttggcagccagaaacatcctggtagctgaggggcggaagatgaagatttcggatttcggcttgtcccgagatgtttatgaagaggattcctacgtgaagaggagccagggtcggattccagttaaatggatggcaattgaatccctttttgatcatatctacaccacgcaaagtgatgtatggtcttttggtgtcctgctgtgggagatcgtgaccctagggggaaacccctatcctgggattcctcctgagcggctcttcaaccttctgaagaccggccaccggatggagaggccagacaactgcagcgaggagatgtaccgcctgatgctgcaatgctggaagcaggagccggacaaaaggccggtgtttgcggacatcagcaaagacctggagaagatgatggttaagaggagagactacttggaccttgcggcgtccactccatctgactccctgatttatgacgacggcctctcagaggaggagacaccgctggtggactgtaataatgcccccctccctcgagccctcccttccacatggattgaaaacaaactctatggcatgtcagacccgaactggcctggagagagtcctgtaccactcacgagagctgatggcactaacactgggtttccaagatatccaaatgatagtgtatatgctaactggatgctttcaccctcagcggcaaaattaatggacacgtttgatagttaacatttctttgtgaaaggtaatggactcacaaggggaagaaacatgctgagaatggaaagtctaccggccctttctttgtgaacgtcacattggccgagccgtgttcagttcccaggtggcagactcgtttttggtagtttgttttaacttccaaggtggttttacttctgatagccggtgattttccctcctagcagacatgccacaccgggtaagagctctgagtcttagtggttaagcattcctttctcttcagtgcccagcagcacccagtgttggtctgtgtccatcagtgaccaccaacattctgtgttcacatgtgtgggtccaacacttactacctggtgtatgaaattggacctgaactgttggatttttctagttgccgccaaacaaggcaaaaaaatttaaacatgaagcacacacacaaaaaaggcagtaggaaaaatgctggccctgatgacctgtccttattcagaatgagagactgcggggggggcctgggggtagtgtcaatgcccctccagggctggaggggaagaggggccccgaggatgggcctgggctcagcattcgagatcttgagaatgattttttttaaatcatgcaacctttccttaggaagacatttggttttcatcatgattaagatgattcctagatttagcacaatggagagattccatgccatctttactatgtggatggtggtatcagggaagagggctcacaagacacatttgtcccccgggcccaccacatcatcctcacgtgttcggtactgagcagccactacccctgatgagaacagtatgaagaaagggggctgttggagtcccagaattgctgacagcagaggctttgctgctgtgaatcccacctgccaccagcctgcagcacaccccacagccaagtagaggcgaaagcagtggctcatcctacctgttaggagcaggtagggcttgtactcactttaatttgaatcttatcaacttactcataaagggacaggctagctagctgtgttagaagtagcaatgacaatgaccaaggactgctacacctctgattacaattctgatgtgaaaaagatggtgtttggctcttatagagcctgtgtgaaaggcccatggatcagctcttcctgtgtttgtaatttaatgctgctacaagatgtttctgtttcttagattctgaccatgactcataagcttcttgtcattcttcattgcttgtttgtggtcacagatgcacaacactcctccagtcttgtgggggcagcttttgggaagtctcagcagctcttctggctgtgttgtcagcactgtaacttcgcagaaaagagtcggattaccaaaacactgcctgctcttcagacttaaagcactgataggacttaaaatagtctcattcaaatactgtattttatataggcatttcacaaaaacagcaaaattgtggcattttgtgaggccaaggcttggatgcgtgtgtaatagagccttgtggtgtgtgcgcacacacccagagggagagtttgaaaaatgcttattggacacgtaacctggctctaatttgggctgtttttcagatacactgtgataagttcttttacaaatatctatagacatggtaaacttttggttttcagatatgcttaatgatagtcttactaaatgcagaaataagaataaactttctcaaattattaaaaatgcctacacagtaagtgtgaattgctgcaacaggtttgttctcaggagggtaagaactccaggtctaaacagctgacccagtgatggggaatttatccttgaccaatttatccttgaccaataacctaattgtctattcctgagttataaaagtccccatccttattagctctactggaattttcatacacgtaaatgcagaagttactaagtattaagtattactgagtattaagtagtaatctgtcagttattaaaatttgtaaaatctatttatgaaaggtcattaaaccagatcatgttcctttttttgtaatcaaggtgactaagaaaatcagttgtgtaaataaaatcatgtatcataaaa

SEQ ID NO: 175182 - DNA, 729 bp, Homo sapiens
  Payload ID: 14404
  Gene Symbol: RET
  Gene Name: ret proto-oncogene
  ENST ID: ENST00000498820
  CDS Start-End: 186-729
cgcgaccgaagcagggcgcgcagcagcgctgagtgccccggaacgtgcgtcgcgcccccagtgtccgtcgcgtccgccgcgccccgggcggggatggggcggccagactgagcgccgcacccgccatccagacccgccggccctagccgcagtccctccagccgtggccccagcgcgcacgggcgatggcgaaggcgacgtccggtgccgcggggctgcgtctgctgttgctgctgctgctgccgctgctaggcaaagatgtggccgaggaggcgggctgccccctgtcctgtgcagtcagcaagagacggctggagtgtgaggagtgtggcggcctgggctccccaacaggcaggtgtgagtggaggcaaggagatggcaaagggatcaccaggaacttctccacctgctctcccagcaccaagacctgccccgacggccactgcgatgttgtggagacccaagacatcaacatttgccctcaggactgcctccggggcagcattgttgggggacacgagcctggggagccccgggggattaaagctggctatggcacctgcaactgcttccctgaggaggagaagtgcttctgcgagcccgaagacatccaggatccactgtgcgacgagctgtgccgcacggtgatcgcagccgctgtcctcttctccttcatcgtctcggtgctgctgtctgccttctgcatccactgctaccacaagtttgccc

SEQ ID NO: 175183 - DNA, 4337 bp, Homo sapiens
  Payload ID: 14404
  Gene Symbol: RET
  Gene Name: ret proto-oncogene
  ENST ID: ENST00000615310
  CDS Start-End: 191-1567
agtcccgcgaccgaagcagggcgcgcagcagcgctgagtgccccggaacgtgcgtcgcgcccccagtgtccgtcgcgtccgccgcgccccgggcggggatggggcggccagactgagcgccgcacccgccatccagacccgccggccctagccgcagtccctccagccgtggccccagcgcgcacgggcgatggcgaaggcgacgtccggtgccgcggggctgcgtctgctgttgctgctgctgctgccgctgctaggcaaagtggcattgggcctctacttctcgagggatgcttactgggagaagctgtatgtggaccaggcagccggcacgcccttgctgtacgtccatgccctgcgggacgcccctgaggaggtgcccagcttccgcctgggccagcatctctacggcacgtaccgcacacggctgcatgagaacaactggatctgcatccaggaggacaccggcctcctctaccttaaccggagcctggaccatagctcctgggagaagctcagtgtccgcaaccgcggctttcccctgctcaccgtctacctcaaggtcttcctgtcacccacatcccttcgtgagggcgagtgccagtggccaggctgtgcccgcgtatacttctccttcttcaacacctcctttccagcctgcagctccctcaagccccgggagctctgcttcccagagacaaggccctccttccgcattcgggagaaccgacccccaggcaccttccaccagttccgcctgctgcctgtgcagttcttgtgccccaacatcagcgtggcctacaggctcctggagggtgagggtctgcccttccgctgcgccccggacagcctggaggtgagcacgcgctgggccctggaccgcgagcagcgggagaagtacgagctggtggccgtgtgcaccgtgcacgccggcgcgcgcgaggaggtggtgatggtgcccttcccggtgaccgtgtacgacgaggacgactcggcgcccaccttccccgcgggcgtcgacaccgccagcgccgtggtggagttcaagcggaaggaggacaccgtggtggccacgctgcgtgtcttcgatgcagacgtggtacctgcatcaggggagctggtgaggcggtacacaagcacgctgctccccggggacacctgggcccagcagaccttccgggtggaacactggcccaacgagacctcggtccaggccaacggcagcttcgtgcgggcgaccgtacatgactataggctggttctcaaccggaacctctccatctcggagaaccgcaccatgcagctggcggtgctggtcaatgactcagacttccagggcccaggagcgggcgtcctcttgctccacttcaacgtgtcggtgctgccggtcagcctgcacctgcccagtacctactccctctccgtgagcaggagggctcgccgatttgcccagatcgggaaagtctgtgtggaaaactgcctggcagatctcacaggggatgcagtatctggccgagatgaagctcgttcatcgggacttggcagccagaaacatcctggtagctgaggggcggaagatgaagatttcggatttcggcttgtcccgagatgtttatgaagaggattcctacgtgaagaggagccagggtcggattccagttaaatggatggcaattgaatccctttttgatcatatctacaccacgcaaagtgatgtatggtcttttggtgtcctgctgtgggagatcgtgaccctagggggaaacccctatcctgggattcctcctgagcggctcttcaaccttctgaagaccggccaccggatggagaggccagacaactgcagcgaggagatgtaccgcctgatgctgcaatgctggaagcaggagccggacaaaaggccggtgtttgcggacatcagcaaagacctggagaagatgatggttaagaggagagactacttggaccttgcggcgtccactccatctgactccctgatttatgacgacggcctctcagaggaggagacaccgctggtggactgtaataatgcccccctccctcgagccctcccttccacatggattgaaaacaaactctatggcatgtcagacccgaactggcctggagagagtcctgtaccactcacgagagctgatggcactaacactgggtttccaagatatccaaatgatagtgtatatgctaactggatgctttcaccctcagcggcaaaattaatggacacgtttgatagttaacatttctttgtgaaaggtaatggactcacaaggggaagaaacatgctgagaatggaaagtctaccggccctttctttgtgaacgtcacattggccgagccgtgttcagttcccaggtggcagactcgtttttggtagtttgttttaacttccaaggtggttttacttctgatagccggtgattttccctcctagcagacatgccacaccgggtaagagctctgagtcttagtggttaagcattcctttctcttcagtgcccagcagcacccagtgttggtctgtgtccatcagtgaccaccaacattctgtgttcacatgtgtgggtccaacacttactacctggtgtatgaaattggacctgaactgttggatttttctagttgccgccaaacaaggcaaaaaaatttaaacatgaagcacacacacaaaaaaggcagtaggaaaaatgctggccctgatgacctgtccttattcagaatgagagactgcggggggggcctgggggtagtgtcaatgcccctccagggctggaggggaagaggggccccgaggatgggcctgggctcagcattcgagatcttgagaatgattttttttaaatcatgcaacctttccttaggaagacatttggttttcatcatgattaagatgattcctagatttagcacaatggagagattccatgccatctttactatgtggatggtggtatcagggaagagggctcacaagacacatttgtcccccgggcccaccacatcatcctcacgtgttcggtactgagcagccactacccctgatgagaacagtatgaagaaagggggctgttggagtcccagaattgctgacagcagaggctttgctgctgtgaatcccacctgccaccagcctgcagcacaccccacagccaagtagaggcgaaagcagtggctcatcctacctgttaggagcaggtagggcttgtactcactttaatttgaatcttatcaacttactcataaagggacaggctagctagctgtgttagaagtagcaatgacaatgaccaaggactgctacacctctgattacaattctgatgtgaaaaagatggtgtttggctcttatagagcctgtgtgaaaggcccatggatcagctcttcctgtgtttgtaatttaatgctgctacaagatgtttctgtttcttagattctgaccatgactcataagcttcttgtcattcttcattgcttgtttgtggtcacagatgcacaacactcctccagtcttgtgggggcagcttttgggaagtctcagcagctcttctggctgtgttgtcagcactgtaacttcgcagaaaagagtcggattaccaaaacactgcctgctcttcagacttaaagcactgataggacttaaaatagtctcattcaaatactgtattttatataggcatttcacaaaaacagcaaaattgtggcattttgtgaggccaaggcttggatgcgtgtgtaatagagccttgtggtgtgtgcgcacacacccagagggagagtttgaaaaatgcttattggacacgtaacctggctctaatttgggctgtttttcagatacactgtgataagttcttttacaaatatctatagacatggtaaacttttggttttcagatatgcttaatgatagtcttactaaatgcagaaataagaataaactttctcaaattattaaaaatgcctacacagtaagtgtgaattgctgcaacaggtttgttctcaggagggtaagaactccaggtctaaacagctgacccagtgatggggaatttatccttgaccaatttatccttgaccaataacctaattgtctattcctgagttataaaagtccccatccttattagctctactggaattttcatacacgtaaatgcagaagttactaagtattaagtattactgagtattaagtagtaatctgtcagttattaaaatttgtaaaatctatttatgaaaggtcattaaaccagatcatgttcctttttttgtaatcaaggtgactaagaaaatcagttgtgtaaataaaatcatgtatc

SEQ ID NO: 175184 - DNA, 1328 bp, Homo sapiens
  Payload ID: 14405
  Gene Symbol: RTBDN
  Gene Name: retbindin
  Uniprot ID: Q9BSG5
  ENST ID: ENST00000322912
  CDS Start-End: 319-1104
gcgcggacccaacctggctgctgcagtacttgctctaactttgccgcagctgcctcccttctctcggaacccactctcctaacccacccccgagaggcggagagaatgtgggagcacttcagagaggcctaggctccggagatcgggccatctgggctctgaaagcaaattagttttccaactcatgtctggctccggcgttacccagacgcctggaaggtccttcctgcagtctgatcaccatttttcctgctgcactgaccaatcagctccccttggccttcaacctcgggaatgatggattaggggagtctagaaatggacgaagccctagaaacgcagctgaagacgagcagaggacgcttctcggctacagaatccctccccaccttggagctcttatctcaggtggacatggactgcagggtccacatgcgacccatcggcctgacgtgggtgctgcaactgaccttggcatggatcctgctagaagcctgtggagggagccgcccactccaagccaggtcccagcaacaccatgggctggcagctgatctgggcaaaggcaagctgcacctggcaggaccttgttgtccctcagagatggacacaacagagacatcgggccctggaaaccatccagaacgctgtggagtgccgagccctgaatgcgaatccttcctggaacacctccaacgtgcccttcgcagtcgcttccgcctgcggctattgggggtacgccaggcacagccgctctgcgaggagctctgccaggcctggttcgccaactgcgaagatgatatcacctgcggcccgacttggctcccactctcagaaaaaaggggctgtgagcccagctgccttacctatggacagaccttcgcagacgggacggacctttgtcgctcggctctgggccacgccctaccggtggctgctcctggagcccgtcactgcttcaacatctccatctccgcggtacctcgtcccagaccaggacgacggggccgggaagctccctcccggcgttcccgcagccctcgcacctccatcctggacgctgcgggcagcgggagtggcagtggaagcggcagcggcccctagcggacgcgtggccctgagttgggggagcgacccttcccccagccccgcccctcaggacacccagaaccccacccctcgtcctctcggccttctgtaatagttttgagatgtctgtccctcctccctggagctccagagacccacccctctccaggttatcccagaaatgacccaactctctcacttttccctctcccctttgaataaagtcgccagctagagca

SEQ ID NO: 175185 - DNA, 1000 bp, Homo sapiens
  Payload ID: 14405
  Gene Symbol: RTBDN
  Gene Name: retbindin
  Uniprot ID: Q9BSG5
  ENST ID: ENST00000393233
  CDS Start-End: 83-772
gccagtttcctggactggatcctgaggtgtcttagcggcctctagaccccaatccagccaacagctcttatctcaggtggacatggactgcagggtccacatgcgacccatcggcctgacgtgggtgctgcaactgaccttggcatggatcctgctagaagcctgtggagggagccgcccactccaagccaggtcccagcaacaccatgggctggcagctgatctgggcaaaggcaagctgcacctggcaggaccttgttgtccctcagagatggacacaacagagacatcgggccctggaaaccatccagaacgctgtggagtgccgagccctgaatgcgaatccttcctggaacacctccaacgtgcccttcgcagtcgcttccgcctgcggctattgggggtacgccaggcacagccgctctgcgaggagctctgccaggcctggttcgccaactgcgaagatgatatcacctgcggcccgacttggctcccactctcagaaaaaaggggctgtgagcccagctgccttacctatggacagaccttcgcagacgggacggacctttgtcgctcggctctgggccacgccctaccggtggctgctcctggagcccgtcactgcttcaacatctccatctccgcggtacctcgtcccagaccaggacgacggggccgggaagctccctcccggcgttcccgcagccctcgcacctccatcctggacgctgcgggcagcgggagtggcagtggaagcggcagcggcccctagcggacgcgtggccctgagttgggggagcgacccttcccccagccccgcccctcaggacacccagaaccccacccctcgtcctctcggccttctgtaatagttttgagatgtctgtccctcctccctggagctccagagacccacccctctccaggttatcccagaaatgacccaactctctcacttttccctctcccctttgaataaagtcgccagctagagcacgtg

SEQ ID NO: 175186 - DNA, 1066 bp, Homo sapiens
  Payload ID: 14405
  Gene Symbol: RTBDN
  Gene Name: retbindin
  Uniprot ID: Q9BSG5
  ENST ID: ENST00000458671
  CDS Start-End: 154-843
gcagggagcgagagagggaggagggaggccgcatagaagagagggaggaattactgaacaggagagggggattggaagacctagggaggtccccttcattctgagaaaagaaggggtctcttgaagactaaaaagctcttatctcaggtggacatggactgcagggtccacatgcgacccatcggcctgacgtgggtgctgcaactgaccttggcatggatcctgctagaagcctgtggagggagccgcccactccaagccaggtcccagcaacaccatgggctggcagctgatctgggcaaaggcaagctgcacctggcaggaccttgttgtccctcagagatggacacaacagagacatcgggccctggaaaccatccagaacgctgtggagtgccgagccctgaatgcgaatccttcctggaacacctccaacgtgcccttcgcagtcgcttccgcctgcggctattgggggtacgccaggcacagccgctctgcgaggagctctgccaggcctggttcgccaactgcgaagatgatatcacctgcggcccgacttggctcccactctcagaaaaaaggggctgtgagcccagctgccttacctatggacagaccttcgcagacgggacggacctttgtcgctcggctctgggccacgccctaccggtggctgctcctggagcccgtcactgcttcaacatctccatctccgcggtacctcgtcccagaccaggacgacggggccgggaagctccctcccggcgttcccgcagccctcgcacctccatcctggacgctgcgggcagcgggagtggcagtggaagcggcagcggcccctagcggacgcgtggccctgagttgggggagcgacccttcccccagccccgcccctcaggacacccagaaccccacccctcgtcctctcggccttctgtaatagttttgagatgtctgtccctcctccctggagctccagagacccacccctctccaggttatcccagaaatgacccaactctctcacttttccctctcccctttgaataaagtcgccagctagagc

SEQ ID NO: 175187 - DNA, 692 bp, Homo sapiens
  Payload ID: 14405
  Gene Symbol: RTBDN
  Gene Name: retbindin
  ENST ID: ENST00000586969
  CDS Start-End: 51-692
cctgaggtgtcttagcggcctctagaccccaatccagccaacaggtggacatggactgcagggtccacatgcgacccatcggcctgacgtgggtgctgcaactgaccttggcatggatcctgctagaagcctgtggagggagccgcccactccaagccaggtcccagcaacaccatgggctggcagctgatctgggcaaaggcaagctgcacctggcaggaccttgttgtccctcagagatggacacaacagagacatcgggccctggaaaccatccagaacgctgtggagtgccgagccctgaatgcgaatccttcctggaacacctccaacgtgcccttcgcagtcgcttccgcctgcggctattgggggtacgccaggcacagccgctctgcgaggagctctgccaggcctggttcgccaactgcgaagatgatatcacctgcggcccgacttggctcccactctcagaaaaaaggggctgtgagcccagctgccttacctatggacagaccttcgcagacgggacggacctttgtcgctcggctctgggccacgccctaccggtggctgctcctggagcccgtcactgcttcaacatctccatctccgcggtacctcgtcccagaccaggacgacggggccgggaagctccctcccggcgttcccgcagccctcgcacctccatcctg

SEQ ID NO: 175188 - DNA, 641 bp, Homo sapiens
  Payload ID: 14405
  Gene Symbol: RTBDN
  Gene Name: retbindin
  ENST ID: ENST00000589808
  CDS Start-End: 83-641
gccagtttcctggactggatcctgaggtgtcttagcggcctctagaccccaatccagccaacagctcttatctcaggtggacatggactgcagggtccacatgcgacccatcggcctgacgtgggtgctgcaactgaccttggcatggatcctgctagaagcctgtggagggagccgcccactccaagccaggtcccagcaacaccatgggctggcagctgatctgggcaaaggcaagctgcacctggcaggaccttgttgtccctcagagatggacacaacagagacatcgggccctggaaaccatccagaacgctgtggagtgccgagccctgaatgcgaatccttcctggaacacctccaacgtgcccttcgcagtcgcttccgcctgcggctattgggggtacgccaggcacagccgctctgcgaggagctctgccaggcctggttcgccaactgcgaagatgatatcacctgcggcccgacttggctcccactctcagaaaaaaggggctgtgagcccagctgccttacctatggacagaccttcgcagacgggacggacctttgtcgctcggctctgggccacgccctaccggtggctgctcctggagcccgtcactgcttcaacatctccatct

SEQ ID NO: 175189 - DNA, 637 bp, Homo sapiens
  Payload ID: 14405
  Gene Symbol: RTBDN
  Gene Name: retbindin
  ENST ID: ENST00000589681
  CDS Start-End: 58-637
actggatcctgaggtgtcttagcggcctctagaccccaatccagccaacaggtggacatggactgcagggtccacatgcgacccatcggcctgacgtgggtgctgcaactgaccttggcatggatcctgctagaagcctgtggagggagccgcccactccaagccaggtcccagcaacaccatgggctggcagctgatctgggcaaaggcaagctgcacctggcagagatggacacaacagagacatcgggccctggaaaccatccagaacgctgtggagtgccgagccctgaatgcgaatccttcctggaacacctccaacgtgcccttcgcagtcgcttccgcctgcggctattgggggtacgccaggcacagccgctctgcgaggagctctgccaggcctggttcgccaactgcgaagatgatatcacctgcggcccgacttggctcccactctcagaaaaaaggggctgtgagcccagctgccttacctatggacagaccttcgcagacgggacggacctttgtcgctcggctctgggccacgccctaccggtggctgctcctggagcccgtcactgcttcaacatctccatctccgcggtacctcgtcccagaccaggacgacggggccggg

SEQ ID NO: 175190 - DNA, 1024 bp, Homo sapiens
  Payload ID: 14405
  Gene Symbol: RTBDN
  Gene Name: retbindin
  Uniprot ID: Q9BSG5
  ENST ID: ENST00000592204
  CDS Start-End: 77-796
gtagtggaggaggtggaatgaagagtgagaaagctgtctaggtgcctgtccaattagggcagtaggaagaatcctgatggccaggcagctcttatctcaggtggacatggactgcagggtccacatgcgacccatcggcctgacgtgggtgctgcaactgaccttggcatggatcctgctagaagcctgtggagggagccgcccactccaagccaggtcccagcaacaccatgggctggcagctgatctgggcaaaggcaagctgcacctggcaggaccttgttgtccctcagagatggacacaacagagacatcgggccctggaaaccatccagaacgctgtggagtgccgagccctgaatgcgaatccttcctggaacacctccaacgtgcccttcgcagtcgcttccgcctgcggctattgggggtacgccaggcacagccgctctgcgaggagctctgccaggcctggttcgccaactgcgaagatgatatcacctgcggcccgacttggctcccactctcagaaaaaaggggctgtgagcccagctgccttacctatggacagaccttcgcagacgggacggacctttgtcgctcggctctgggccacgccctaccggtggctgctcctggagcccgtcactgcttcaacatctccatctccgcggtacctcgtcccagaccaggacgacggggccgggaagctccctcccggcgttcccgcagccctcgcacctccatcctggacgctgcgggcagcgggagtggcagtggaagcggcagcggcccctagcggacgcgtggccctgagttgggggagcgacccttcccccagccccgcccctcaggacacccagaaccccacccctcgtcctctcggccttctgtaatagttttgagatgtctgtccctcctccctggagctccagagacccacccctctccaggttatcccagaaatgacccaactctctcacttttccctctcccctttgaataaagtcgccagctagagcacgtg

SEQ ID NO: 175191 - DNA, 465 bp, Homo sapiens
  Payload ID: 14405
  Gene Symbol: RTBDN
  Gene Name: retbindin
  ENST ID: ENST00000589567
  CDS Start-End: 75-465
gggattggaagacctagggaggtccccttcattctgagaaaagaaggggtctcttgaagactaaaaaggtggacatggactgcagggtccacatgcgacccatcggcctgacgtgggtgctgcaactgaccttggcatggatcctgctagaagcctgtggagggagccgcccactccaagccaggtcccagcaacaccatgggctggcagctgatctgggcaaaggcaagctgcacctggcaggaccttgttgtccctcagagatggacacaacagagacatcgggccctggaaaccatccagaacgctgtggagtgccgagccctgaatgcgaatccttcctggaacacctccaacgtgcccttcgcagtcgcttccgcctgcggctattgggggtacgccaggcacagccgctctgcgaggagctctgccaggcctggttcgccaactgcgaagatgatatca

SEQ ID NO: 175192 - DNA, 592 bp, Homo sapiens
  Payload ID: 14405
  Gene Symbol: RTBDN
  Gene Name: retbindin
  ENST ID: ENST00000585384
  CDS Start-End: 71-592
gactggatcctgaggtgtcttagcggcctctagaccccaatccagccaacagctcttatctcaggtggacatggactgcagggtccacatgcgacccatcggcctgacgtgggtgctgcaactgaccttggcatggatcctgctagaagcctgtggagggagccgcccactccaagccaggtcccagcaacaccatgggctggcagctgatctgggcaaaggcaagctgcacctggcaggggatccccaggcctcagttcccaaaccttacctgaatatccaagaccctagctcacagggttcccctttgccaggaccttgttgtccctcagagatggacacaacagagacatcgggccctggaaaccatccagaacgctgtggagtgccgagccctgaatgcgaatccttcctggaacacctccaacgtgcccttcgcagtcgcttccgcctgcggctattgggggtacgccaggcacagccgctctgcgaggagctctgccaggcctggttcgccaactgcgaagatgatatcacctgcggcccgacttggctcccactctcagaaaaaaggggctgtgagcccagctgc

SEQ ID NO: 175193 - DNA, 620 bp, Homo sapiens
  Payload ID: 14405
  Gene Symbol: RTBDN
  Gene Name: retbindin
  ENST ID: ENST00000590404
  CDS Start-End: 49-620
gaaagctgtctaggtgcctgtccaattagggcagtaggaagaatcctgatggccaggcaggtggacatggactgcagggtccacatgcgacccatcggcctgacgtgggtgctgcaactgaccttggcatggatcctgctagaagcctgtggagggagccgcccactccaagccaggtcccagcaacaccatgggctggcagctgatctgggcaaaggcaagctgcacctggcaggaccttgttgtccctcagagatggacacaacagagacatcgggccctggaaaccatccagaacgctgtggagtgccgagccctgaatgcgaatccttcctggaacacctccaacgtgcccttcgcagtcgcttccgcctgcggctattgggggtacgccaggcacagccgctctgcgaggagctctgccaggcctggttcgccaactgcgaagatgatatcacctgcggcccgacttggctcccactctcagaaaaaaggggctgtgagcccagctgccttacctatggacagaccttcgcagacgggacggacctttgtcgctcggctctgggccacgccctaccggtggctgctcctggagcccgtcactgcttcaacatctc

SEQ ID NO: 175194 - DNA, 861 bp, Homo sapiens
  Payload ID: 14405
  Gene Symbol: RTBDN
  Gene Name: retbindin
  ENST ID: ENST00000591512
  CDS Start-End: 650-861
cgcggacccaacctggctgctgcagtacttgctctaactttgccgcagctgcctcccttctctcggaacccactctcctaacccacccccgagaggcggagagaatgtgggagcacttcagagaggcctaggctccggagatcgggccatctgggctctgaaagcaaattagttttccaactcatgtctggctccggcgttacccagacgcctggaaggtccttcctgcagtctgatcaccatttttcctgctgcactgaccaatcagctccccttggccttcaacctcgggaatgatggattaggggagtctagaaatggacgaagccctaggtgagggtttgaatcctcttttcccaagattcaggctggggatggagcctgagtctgggcccattctcggctttatctaaactccagattaccaagcctggggctgagccccaaggaggctcagaagggccagaccccaggcagggccttggggcacagatatcatcaccttcccctctgggatgtttgggaccggacctccgtattaaccctgaacttccgtactaacccctcagaaacgcagctgaagacgagcagaggacgcttctcggctacagaatccctccccaccttggagctcttatctcaggtggacatggactgcagggtccacatgcgacccatcggcctgacgtgggtgctgcaactgaccttggcatggatcctgctagaagcctgtggagggagccgcccactccaagccaggtcccagcaacaccatgggctggcagctgatctgggcaaaggcaagctgcacctggcagagatggacacaacagagacatcgggccctggaaaccatccaga

SEQ ID NO: 175195 - DNA, 2076 bp, Homo sapiens
  Payload ID: 14405
  Gene Symbol: RTBDN
  Gene Name: retbindin
  ENST ID: ENST00000589272
  CDS Start-End: 331-948
agaaacccgacggcgcggacccaacctggctgctgcagtacttgctctaactttgccgcagctgcctcccttctctcggaacccactctcctaacccacccccgagaggcggagagaatgtgggagcacttcagagaggcctaggctccggagatcgggccatctgggctctgaaagcaaattagttttccaactcatgtctggctccggcgttacccagacgcctggaaggtccttcctgcagtctgatcaccatttttcctgctgcactgaccaatcagctccccttggccttcaacctcgggaatgatggattaggggagtctagaaatggacgaagccctagaaacgcagctgaagacgagcagaggacgcttctcggctacagaatccctccccaccttggagctcttatctcaggtggacatggactgcagggtccacatgcgacccatcggcctgacgtgggtgctgcaactgaccttggcatggatcctgctagaagcctgtggagggagccgcccactccaagccaggtcccagcaacaccatgggctggcagctgatctgggcaaaggcaagctgcacctggcaggaccttgttgtccctcagagatggacacaacagagacatcgggccctggaaaccatccagaacgctgtggagtgccgagccctgaatgcgaatccttcctggaacacctccaacgtgcccttcgcagtcgcttccgcctgcggctattgggggtacgccaggcacagccgctctgcgaggagctctgccaggcctggttcgccaactgcgaagatgatatcacctgcggcccgacttggctcccactctcagaaaaaaggggctgtgagcccagctgccttacctatggacaggctggagtgcagtggcgcgatctcagctcgatgcaacctccgcctccggggttcaagtgattctcctgccgcaacctcccgaatagctgggatttcaggcgcatgccaccatgcccagctaatttttgtatttttagtagagtcagcgtttcaccatgttggccaggctggtttcgaactcctgacctcaggtgatccgcccacctcggcctcccaaagtgttgggattacaggtgtgagccaccgcccccggcccccaccaagttctttcttaccgtgtctagaccccagagaccggattggtactccccaggtccctgctcccacccttccctagcccaacctcctactgggttgtgccctttgaccccaaaagctctcgaagtccagatttgcccttcccaagaaaccattcctgctctgggtccatccacattttaccctggaggacccagaagcccagtcactctctacaaaaccccagccttgatacagacctctctgcgcgccccccaactgccccaaccctgattcatcccgctagggcccagtaagaacattcaccctccccaaggacctgcccccactcacgttccgcacatagactcccaggccgcacgctccggctctgaccccaatccctaaggaatttacacatttttcccttcccgaggccacgccccccacgtctctggactccgcccactagggccttaactccactttttcctagaccttcgcagacgggacggacctttgtcgctcggctctgggccacgccctaccggtggctgctcctggagcccgtcactgcttcaacatctccatctccgcggtacctcgtcccagaccaggacgacggggccgggaagctccctcccggcgttcccgcagccctcgcacctccatcctggacgctgcgggcagcgggagtggcagtggaagcggcagcggcccctagcggacgcgtggccctgagttgggggagcgacccttcccccagccccgcccctcaggacacccagaaccccacccctcgtcctctcggccttctgtaatagttttgagatgtctgtccctcctccctggagctccagagacccacccctctccaggttatcccagaaatgacccaactctctcacttttccctctcccctttgaataaagtcgccagctagagcacgt

SEQ ID NO: 175196 - DNA, 658 bp, Homo sapiens
  Payload ID: 14405
  Gene Symbol: RTBDN
  Gene Name: retbindin
  ENST ID: ENST00000587549
  CDS Start-End: 318-658
cgcggacccaacctggctgctgcagtacttgctctaactttgccgcagctgcctcccttctctcggaacccactctcctaacccacccccgagaggcggagagaatgtgggagcacttcagagaggcctaggctccggagatcgggccatctgggctctgaaagcaaattagttttccaactcatgtctggctccggcgttacccagacgcctggaaggtccttcctgcagtctgatcaccatttttcctgctgcactgaccaatcagctccccttggccttcaacctcgggaatgatggattaggggagtctagaaatggacgaagccctagaaacgcagctgaagacgagcagaggacgcttctcggctacagaatccctccccaccttggagctcttatctcaggtggacatggactgcagggtccacatgcgacccatcggcctgacgtgggtgctgcaactgaccttggcatggatcctgctagaagcctgtggagggagccgcccactccaagccaggtcccagcaacaccatgggctggcagctgatctgggcaaaggcaagctgcacctggcaggggatccccaggcctcagttcccaaaccttacctgaatatccaagaccctagctcacagggttcccctttgccagg

SEQ ID NO: 175197 - DNA, 695 bp, Homo sapiens
  Payload ID: 14406
  Gene Symbol: RER1
  Gene Name: retention in endoplasmic reticulum sorting receptor 1
  ENST ID: ENST00000306256
  CDS Start-End: 165-695
gtgctcgctgcagcttcccggagccggagcgcagcgcctgcggccgcccgtgccccgccgtcctccttcccgcggccgtgagggagaccgcggctcggccgtagcggagctgcgagggaagcctgtgtacctgctactttttcccgaacaattcatgttacagaatgtctgaaggggacagtgtgggagaatccgtccatgggaaaccttcggtggtgtacagatttttcacaagacttggacagatttatcagtcctggctagacaagtccacaccctacacggctgtgcgatgggtcgtgacactgggcctgagctttgtctacatgattcgagtttacctgctgcagggttggtacattgtgacctatgccttggggatctaccatctaaatcttttcatagcttttctttctcccaaagtggatccttccttaatggaagactcagatgacggtccttcgctacccaccaaacagaacgaggaattccgccccttcattcgaaggctcccagagtttaaattttggcatgcggctaccaagggcatccttgtggctatggtctgtactttcttcgacgctttcaacgtcccggtgttctggccgattctggtgatgtacttcatcatgctcttctgtatcacgatgaagaggcaaatcaagcacatgattaagtaccggtacatcccgttc

SEQ ID NO: 175198 - DNA, 1404 bp, Homo sapiens
  Payload ID: 14406
  Gene Symbol: RER1
  Gene Name: retention in endoplasmic reticulum sorting receptor 1
  ENST ID: ENST00000378512
  CDS Start-End: 77-640
ccgtgccccgccgtcctccttcccgcggccgtgagggagaccgcggctcggccgtagcggagctgcgagttacagaatgtctgaaggggacagtgtgggagaatccgtccatgggaaaccttcggtggtgtacagatttttcacaagacttggacagatttatcagtcctggctagacaagtccacaccctacacggctgtgcgatgggtcgtgacactgggcctgagctttgtctacatgattcgagtttacctgctgcagggttggtacattgtgacctatgccttggggatctaccatctaaatcttttcatagcttttctttctcccaaagtggatccttccttaatggaagactcagatgacggtccttcgctacccaccaaacagaacgaggaattccgccccttcattcgaaggctcccagagtttaaattttgggatgcttctgtttgcggggacggtcggtgcagctgcaaggctggaggcggccggcaggtgcccggtgctggctgcagatgcggcgctaaccttctctccccacttgaaggcatgcggctaccaagggcatccttgtggctatggtctgtactttcttcgacgctttcaacgtcccggtgttctggccgattctggtgatgtacttcatcatgctcttctgtatcacgatgaagaggcaaatcaagcacatgattaagtaccggtacatcccgttcacacatgggaagagaaggtacagaggcaaggaggatgccggcaaggccttcgccagctagaagcgggactgaggctgcctcacgtgttgcaagaacagttttgagccattgttaacaatgccttttttcttcacataaagtagttgattacgagggagtcaaattttctttttaaaaaggagcttcaatgatttgtaactgaaatatcaggttctagaagaaactggcgcttaaaccaaatcgcatggatttctttttcagtgacgttcaagtgtttctcacggatggaattctagtcagctgcaggcgggaagccaggcgggtggagcccatgggagcaagggcgagtggccggtccccgctgtgccaggtgggcaggcaggagcaaggcctgcgagggaggaacgggccgctccccgccagccgccttccccagcagccgcaggtggtgccagccactccacagagcccgagggatgatctagcctgattcctgcgtgtccgaaagaacttaacgttttaaaggtgattgtcaagtaactgtgtggggttctaatgccagtttcctaattccatctcactggagatgtttaaagttggcctctatcctaatgactcaaaacttggttcttaactaccatgattgcttttgagggcccggaattataaatatatattatattttaa

SEQ ID NO: 175199 - DNA, 3000 bp, Homo sapiens
  Payload ID: 14406
  Gene Symbol: RER1
  Gene Name: retention in endoplasmic reticulum sorting receptor 1
  ENST ID: ENST00000378513
  CDS Start-End: 192-545
agcccttggccccgccctcgcgccatcttgggggccctggaggcggcgccgcggaggacggagcggaagtgctcgctgcagcttcccggagccggagcgcagcgcctgcggccgcccgtgccccgccgtcctccttcccgcggccgtgagggagaccgcggctcggccgtagcggagctgcgagttacagaatgtctgaaggggacagtgtgggagaatccgtccatgggaaaccttcggtggtgtacagatttttcacaagacttggacagatttatcagtcctggctagacaagtccacaccctacacggctgtgcgatgggtcgtgacactgggcctgagctttgtctacatgattcgagtttacctgctgcagatgacggtccttcgctacccaccaaacagaacgaggaattccgccccttcattcgaaggctcccagagtttaaattttggcatgcggctaccaagggcatccttgtggctatggtctgtactttcttcgacgctttcaacgtcccggtgttctggccgattctggtgatgtacttcatcatgctcttctgtatcacgatgaagaggcaaatcaagcacatgattaagtaccggtacatcccgttcacacatgggaagagaaggtacagaggcaaggaggatgccggcaaggccttcgccagctagaagcgggactgaggctgcctcacgtgttgcaagaacagttttgagccattgttaacaatgccttttttcttcacataaagtagttgattacgagggagtcaaattttctttttaaaaaggagcttcaatgatttgtaactgaaatatcaggttctagaagaaactggcgcttaaaccaaatcgcatggatttctttttcagtgacgttcaagtgtttctcacggatggaattctagtcagctgcaggcgggaagccaggcgggtggagcccatgggagcaagggcgagtggccggtccccgctgtgccaggtgggcaggcaggagcaaggcctgcgagggaggaacgggccgctccccgccagccgccttccccagcagccgcaggtggtgccagccactccacagagcccgagggatgatctagcctgattcctgcgtgtccgaaagaacttaacgttttaaaggtgattgtcaagtaactgtgtggggttctaatgccagtttcctaattccatctcactggagatgtttaaagttggcctctatcctaatgactcaaaacttggttcttaactaccatgattgcttttgagggcccggaattataaatatatattatattttaattgtttgagattattttgacacatttctttgatacgtagagtgttttgtttttaatttaaatctgtcctcatgcaaccctccatgaggggcagcgaagctggcagggagcagactggctttgtaggttcagcactcggccccccactgcgggagaggcggaacccacttgcatgtcagcgtttttgattcgagaaaagaaatactctcaacgttttaccaagtgattttacctccacctttactaaagtctttacctaaaacatggcagtcgctggacacaggaaagcccaccttttgtttggccttttcgaaaggtgacccatattgcacagcagaacatcacagctgtggtcccagatgagacactgacatgcgagtgaaggcctctcctcctgggccccgggctgcgcaggctcctcactctgggcggtgtttcctgtctcagaattgacacggtgaatgcttagtgtctggattttcttgtaccagtgtttacatatctgacatcgagctcctctaagaggccacgttcaagcttgtgtgtccctgacccaagatagccagtgctgctcccaggtggtacttctggtaccgtgttgagacacttgggattctcagactgtggacaggagtgtttgtcatttttcatactgttttcttaataagcgctcaggcctaaggtgtgacaggaagtcgcacgcgcttggccagagcacagtgaagcaaaggactgggtgctgatggatggagccacggcggcatctgcccacccggccgcagcccccagtgcctctcctggtggtcctcccagtctagagggtcacggcccccccgccctcctccgtctctggcaagctgaccttgactaacccaggaatacagggtcatcctcattcctaagtaagtcaaacagcaagacatggtttgcgcgggtctttgccggaagccggtcctgctggccaggtgttttacgtcagcagggaaatgtggcacacgccctcgaggcattttaacactgcgcttcaggaaatctcaagttccatcttgtgttagtaacgtacccacattttgctggagttagtttattaaagatgcctacggtgaactctctggcgcaggttaaatgcagttttgaaaacctggaaacatcaaatggaggcgggaaataggctggggccgagctgaggggctgaacacagcagtgaccgtgggtcagcaggtcgcctgcccagcaggccccccaggagagggctcgggcgcccctggcagcccccatacccccaggacctggctcgtgagtgcgtctgggtcaggaagagacctctctgtgcgtctcaggctgagatgcagatttctgttttctaaaactggaagcgaccttgacgtgtattgaaggtgtgtgtgccaaatgcttccgacggaggtgctggccttggttggtttctctctgccccgtgtggtcatcaagtcctgggggatgtgctctgcccagccgccctcggggagagcagcgccgcctcccatggggccgtggggctgctgttctcactgcactggctgaagcaacccgccagcctccgtgccccaccccacccagcacgcactcattcagtccattgccttaacacaagcctgatggggctgttttctcacaatataaacgaataaagtgtcttctggcctacttctg

SEQ ID NO: 175200 - DNA, 522 bp, Homo sapiens
  Payload ID: 14406
  Gene Symbol: RER1
  Gene Name: retention in endoplasmic reticulum sorting receptor 1
  ENST ID: ENST00000378518
  CDS Start-End: 139-492
gaggacggagcggaagtgctcgctgcagcttcccggagccggagcgcagcgcctgcggccgcccgtgccccgccgtcctccttcccgcggccgtgagggagaccgcggctcggccgtagcggagctgcgagttacagaatgtctgaaggggacagtgtgggagaatccgtccatgggaaaccttcggtggtgtacagatttttcacaagacttggacagatttatcagtcctggctagacaagtccacaccctacacggctgtgcgatgggtcgtgacactgggcctgagctttgtctacatgattcgagtttacctgctgcagatgacggtccttcgctacccaccaaacagaacgaggaattccgccccttcattcgaaggctcccagagtttaaattttggcatgcggctaccaagggcatccttgtggctatggtctgtactttcttcgacgctttcaacgtcccggtgttctggccgattctggtgatgtacttcatcatgctcttctgtatcacga

SEQ ID NO: 175201 - DNA, 540 bp, Homo sapiens
  Payload ID: 14406
  Gene Symbol: RER1
  Gene Name: retention in endoplasmic reticulum sorting receptor 1
  ENST ID: ENST00000443438
  CDS Start-End: 66-540
gttttatctccctttctgttttgtttgtgaccaggcataaagcagtcaccttcaacagttacagaatgtctgaaggggacagtgtgggagaatccgtccatgggaaaccttcggtggtgtacagatttttcacaagacttggacagatttatcagtcctggctagacaagtccacaccctacacggctgtgcgatgggtcgtgacactgggcctgagctttgtctacatgattcgagtttacctgctgcagggttggtacattgtgacctatgccttggggatctaccatctaaatcttttcatagcttttctttctcccaaagtggatccttccttaatggaagactcagatgacggtccttcgctacccaccaaacagaacgaggaattccgccccttcattcgaaggctcccagagtttaaattttggcatgcggctaccaagggcatccttgtggctatggtctgtactttcttcgacgctttcaacgtcccggtgttctggccgattctggtgatgtacttcatcatgctcttct

SEQ ID NO: 175202 - DNA, 2469 bp, Homo sapiens
  Payload ID: 14406
  Gene Symbol: RER1
  Gene Name: retention in endoplasmic reticulum sorting receptor 1
  Uniprot ID: O15258
  ENST ID: ENST00000488353
  CDS Start-End: 1787-2377
gctttaatgggaaacagtctgagtaaaacggggaaacttacaaggagctataggacgaacaatgtgacgggtggctttcagatggcctggctttggcctaaatagggtggccattccaggtgacacattttagtgtagcctctatttaaatatggagttctttcagtggagagtaaaggtgctcctcctctgtgtctggtttacacggctccgcgagaccaaagggcccctcggtctccttgagcagcctggcactctgcacagaggatccaggaacggtgtcatggagccacattctgcacagacttgatgatgtggagggagctgcctggatcacttcagcgcatcagttgtgatgggagagccaaggcacttgagggcgggattgcgtctggccacctgttgccttccacctgaagggaagatttccccagtgctcacagtgaggatgggactggaaaagcgttggtttcaggaaggtgcaggttctggctcctgcccactgcgaacatgctgatgggccagggcaactctttagtctttgtgagcttcagttttcttatctgtaaatgagaacaataagactgaccccaactgttgctgaggaatgatgtctttgctttcatgtctggtatttcttagagcctcattttacagatgaggaaactgaggctggctgcgtgctcagagggtttgctgaaggcctcacagccgcttagcacaggtgggactttaagccaaacttgagaccagagtctgtttctcctcactgccctgccgagggagcagatggggggtggtgggggaggtgaacgtcacccctggcgtcttctctagctcaggggccaggaggcctctcatctttaaagtaggaatgacaaccggcaggccctgggtactgagctgtgctttaccgaagagcggcaggtcctgacgccgtctcctctcaggagtggggtggcggcgtgctcagctgaggagccaggtggcagtcaggcttggcttggcctgcccagaagcagggctgtggcaggaccttggacacgtggcttccactgtttgagacttggtgaaatgggggtcatgatgcccttcacttgagcatctgggaattaagtgggtgaacaatgtgacctctggcacctgggttctcaggtgaattcctcatggcatcacagcagtgttgaaataggagcagatacgttacctccgcttgccagataagaaactgggacgcagatggatggactacctgagagttgtagataacattttcctgttcatggggtggaggacctggccctgagaggacaggatccctcctgctcctgccagaccagagacccaggacagggcgtggagcagacaaggtgcctgggcgggggaaccctgagggatccacagagggtgcggtccttggagggaggacatgcagtgccacgtgccatggaccagccagtggaccccatggccagcaaggctgctcctggggccagtggggtggacagtcccgcccacgcaggtgactgaggtgccagtgtgggaatgaaaatgcggcctgtgctcctgggcccatgcgtctcacgctgcccttcctctccagggaagcctgtgtacctgctactttttcccgaacaattcatggtaaaaacacaaatggtatatggacaaaatactgaatgtggaagaaacctacttgacagtgttggtgaaaatagggccaggatttcacacccgtgaatgctttttactgaaaagtattttgtgtttttctcccagttacagaatgtctgaaggggacagtgtgggagaatccgtccatgggaaaccttcggtggtgtacagatttttcacaagacttggacagatttatcagtcctggctagacaagtccacaccctacacggctgtgcgatgggtcgtgacactgggcctgagctttgtctacatgattcgagtttacctgctgcagggttggtacattgtgacctatgccttggggatctaccatctaaatcttttcatagcttttctttctcccaaagtggatccttccttaatggaagactcagatgacggtccttcgctacccaccaaacagaacgaggaattccgccccttcattcgaaggctcccagagtttaaattttggcatgcggctaccaagggcatccttgtggctatggtctgtactttcttcgacgctttcaacgtcccggtgttctggccgattctggtgatgtacttcatcatgctcttctgtatcacgatgaagaggcaaatcaagcacatgattaagtaccggtacatcccgttcacacatgggaagagaaggtacagaggcaaggaggatgccggcaaggccttcgccagctagaagcgggactgaggctgcctcacgtgttgcaagaacagttttgagccattgttaacaatgccttttttcttcacataaagtagttgattacg

SEQ ID NO: 175203 - DNA, 3044 bp, Homo sapiens
  Payload ID: 14406
  Gene Symbol: RER1
  Gene Name: retention in endoplasmic reticulum sorting receptor 1
  Uniprot ID: O15258
  ENST ID: ENST00000605895
  CDS Start-End: 134-724
cggagcggaagtgctcgctgcagcttcccggagccggagcgcagcgcctgcggccgcccgtgccccgccgtcctccttcccgcggccgtgagggagaccgcggctcggccgtagcggagctgcgagttacagaatgtctgaaggggacagtgtgggagaatccgtccatgggaaaccttcggtggtgtacagatttttcacaagacttggacagatttatcagtcctggctagacaagtccacaccctacacggctgtgcgatgggtcgtgacactgggcctgagctttgtctacatgattcgagtttacctgctgcagggttggtacattgtgacctatgccttggggatctaccatctaaatcttttcatagcttttctttctcccaaagtggatccttccttaatggaagactcagatgacggtccttcgctacccaccaaacagaacgaggaattccgccccttcattcgaaggctcccagagtttaaattttggcatgcggctaccaagggcatccttgtggctatggtctgtactttcttcgacgctttcaacgtcccggtgttctggccgattctggtgatgtacttcatcatgctcttctgtatcacgatgaagaggcaaatcaagcacatgattaagtaccggtacatcccgttcacacatgggaagagaaggtacagaggcaaggaggatgccggcaaggccttcgccagctagaagcgggactgaggctgcctcacgtgttgcaagaacagttttgagccattgttaacaatgccttttttcttcacataaagtagttgattacgagggagtcaaattttctttttaaaaaggagcttcaatgatttgtaactgaaatatcaggttctagaagaaactggcgcttaaaccaaatcgcatggatttctttttcagtgacgttcaagtgtttctcacggatggaattctagtcagctgcaggcgggaagccaggcgggtggagcccatgggagcaagggcgagtggccggtccccgctgtgccaggtgggcaggcaggagcaaggcctgcgagggaggaacgggccgctccccgccagccgccttccccagcagccgcaggtggtgccagccactccacagagcccgagggatgatctagcctgattcctgcgtgtccgaaagaacttaacgttttaaaggtgattgtcaagtaactgtgtggggttctaatgccagtttcctaattccatctcactggagatgtttaaagttggcctctatcctaatgactcaaaacttggttcttaactaccatgattgcttttgagggcccggaattataaatatatattatattttaattgtttgagattattttgacacatttctttgatacgtagagtgttttgtttttaatttaaatctgtcctcatgcaaccctccatgaggggcagcgaagctggcagggagcagactggctttgtaggttcagcactcggccccccactgcgggagaggcggaacccacttgcatgtcagcgtttttgattcgagaaaagaaatactctcaacgttttaccaagtgattttacctccacctttactaaagtctttacctaaaacatggcagtcgctggacacaggaaagcccaccttttgtttggccttttcgaaaggtgacccatattgcacagcagaacatcacagctgtggtcccagatgagacactgacatgcgagtgaaggcctctcctcctgggccccgggctgcgcaggctcctcactctgggcggtgtttcctgtctcagaattgacacggtgaatgcttagtgtctggattttcttgtaccagtgtttacatatctgacatcgagctcctctaagaggccacgttcaagcttgtgtgtccctgacccaagatagccagtgctgctcccaggtggtacttctggtaccgtgttgagacacttgggattctcagactgtggacaggagtgtttgtcatttttcatactgttttcttaataagcgctcaggcctaaggtgtgacaggaagtcgcacgcgcttggccagagcacagtgaagcaaaggactgggtgctgatggatggagccacggcggcatctgcccacccggccgcagcccccagtgcctctcctggtggtcctcccagtctagagggtcacggcccccccgccctcctccgtctctggcaagctgaccttgactaacccaggaatacagggtcatcctcattcctaagtaagtcaaacagcaagacatggtttgcgcgggtctttgccggaagccggtcctgctggccaggtgttttacgtcagcagggaaatgtggcacacgccctcgaggcattttaacactgcgcttcaggaaatctcaagttccatcttgtgttagtaacgtacccacattttgctggagttagtttattaaagatgcctacggtgaactctctggcgcaggttaaatgcagttttgaaaacctggaaacatcaaatggaggcgggaaataggctggggccgagctgaggggctgaacacagcagtgaccgtgggtcagcaggtcgcctgcccagcaggccccccaggagagggctcgggcgcccctggcagcccccatacccccaggacctggctcgtgagtgcgtctgggtcaggaagagacctctctgtgcgtctcaggctgagatgcagatttctgttttctaaaactggaagcgaccttgacgtgtattgaaggtgtgtgtgccaaatgcttccgacggaggtgctggccttggttggtttctctctgccccgtgtggtcatcaagtcctgggggatgtgctctgcccagccgccctcggggagagcagcgccgcctcccatggggccgtggggctgctgttctcactgcactggctgaagcaacccgccagcctccgtgccccaccccacccagcacgcactcattcagtccattgccttaacacaagcctgatggggctgttttctcacaatataaacgaataaagtgtcttctggcctacttctgaa

SEQ ID NO: 175204 - DNA, 1348 bp, Homo sapiens
  Payload ID: 14406
  Gene Symbol: RER1
  Gene Name: retention in endoplasmic reticulum sorting receptor 1
  ENST ID: ENST00000630837
  CDS Start-End: 134-778
cggagcggaagtgctcgctgcagcttcccggagccggagcgcagcgcctgcggccgcccgtgccccgccgtcctccttcccgcggccgtgagggagaccgcggctcggccgtagcggagctgcgagttacagaatgtctgaaggggacagtgtgggagaatccgtccatgggaaaccttcggtggtgtacagatttttcacaagacttggacagatttatcagtcctggctagacaagtccacaccctacacggctgtgcgatgggtcgtgacactgggcctgagctttgtctacatgattcgagtttacctgctgcagggttggtacattgtgacctatgccttggggatctaccatctaaatcttttcatagcttttctttctcccaaagtggatccttccttaatggaagactcagatgacggtccttcgctacccaccaaacagaacgaggaattccgccccttcattcgaaggctcccagagtttaaattttggcatgcggctaccaagggcatccttgtggctatggtctgtactttcttcgacgctttcaacgtcccggtgttctggccgattctggtgatgtacttcatcatgctcttctgtatcacgatgaagaggcaaatcaagcacatgattaagtaccggtacatcccgttcacacatgggaagagaaggtacagaggcaaggaggatgccggcaagccttcgccagctagaagcgggactgaggctgcctcacgtgttgcaagaacagttttgagccattgttaacaatgccttttttcttcacataaagtagttgattacgagggagtcaaattttctttttaaaaaggagcttcaatgatttgtaactgaaatatcaggttctagaagaaactggcgcttaaaccaaatcgcatggatttctttttcagtgacgttcaagtgtttctcacggatggaattctagtcagctgcaggcgggaagccaggcgggtggagcccatgggagcaagggcgagtggccggtccccgctgtgccaggtgggcaggcaggagcaaggcctgcgagggaggaacgggccgctccccgccagccgccttccccagcagccgcaggtggtgccagccactccacagagcccgagggatgatctagcctgattcctgcgtgtccgaaagaacttaacgttttaaaggtgattgtcaagtaactgtgtggggttctaatgccagtttcctaattccatctcactggagatgtttaaagttggcctctatcctaatgactcaaaacttggttcttaactaccatgattgcttttgagggcccggaattataaatatatattatatttt

SEQ ID NO: 175205 - DNA, 2572 bp, Homo sapiens
  Payload ID: 14407
  Gene Symbol: RCN1
  Gene Name: reticulocalbin 1, EF-hand calcium binding domain
  Uniprot ID: Q15293
  ENST ID: ENST00000054950
  CDS Start-End: 294-1289
agccccgcgcccaccaccccagctggcgacgtggctccgcggccccggcttcccccggcagctcagcgaccaatgggcgcgcgagcggggccgcccgcagcttcccagcccgaggcccaggcgcgcccctctgctccggctcggggcgggcactggcggagggactggccagtcccctcctccgcgccggccccaaccctgtcgctgccgccgcgctccgagtccccattcccgagctgccgctgttgtcgctcgctcagcgtctccctctcggccgccctctcctcgggacgatggcgcgcggtggccgcggccgccgcctggggttagccctggggctgctgctggcgctggtgctggcgccgcgggttctgcgggccaagcccacggtgcgcaaagagcgcgtggtgcggcccgactcggagctgggcgagcggccccctgaggacaaccagagcttccagtacgaccacgaggccttcctgggcaaggaggactccaagaccttcgaccagctcaccccggacgagagcaaggagaggctagggaagattgttgatcgaatcgacaatgatggggatggctttgtcactactgaggagctgaaaacctggatcaaacgggtgcagaaaagatacatctttgataatgtcgccaaagtctggaaggattatgatagggacaaggatgataaaatttcctgggaagaatacaaacaagccacctatggttactacctaggaaaccccgcagagtttcatgattcttcagatcatcacacctttaaaaagatgctgccacgtgatgagagaagattcaaagctgcagacctcaatggtgacctgacagctactcgggaggagttcactgcctttctgcatcctgaagagtttgaacatatgaaggaaattgtggttttggaaaccctggaggacatcgacaagaacggggatgggtttgtggatcaggatgagtatattgcggatatgttttcccatgaggagaatggccctgagccagactgggttttatcagaacgggagcagtttaacgaattccgggatctgaacaaggacgggaagttagacaaagatgagattcgccactggatcctccctcaagattatgatcatgcacaggctgaggccaggcatctggtatatgaatcagacaaaaacaaggatgagaagctaactaaagaggaaatattggagaactggaacatgtttgtcggaagccaagctaccaattacggggaagatctcacaaaaaatcatgatgagctttgatagacactcaccagaatatggcagactgtcataggcattctgttattgtcttggattgttgctacaattgtctaatttacagcagttgtgatcccacaaaaagcaagtttatacctcagattggggtataaaaattgtttttcgctcagtatttactggaaaatggacatcactagtctttcagtaagatttctctcaaaacacgtgaaaaccttggtaaattgcaattctttctggggatatattggtacaacatgacttaaaacttttttttttctattaaaacttaaaggggaacaaaacttgaaaaagccctgttcttcagaaggtgagtgggttgagggaggcagtaatatgaagtgactgctgtgtattttaactaccagattttttatatttgccactgttaaatagttggaaaggggaaattctgattaagcgaaagtggtatcatcctaggtaagcttatttcagaacaagtctaatatttcagattctttcttttcgactttatactctgagttattacttactgtaagtggtgtatatgaaacctccatgcattttccagtatggatctgctaatatgcacagtaaatccatgtctttgtttgtttttctattaaaaagcaatcaagaaagataatgtgaaaaagaaaggaatttagaggtagggaaaagatgaatgtcagacatttgaagaactatagtaaaatgataaacactaaatatacttgagaaaactttcttaatatgccaatgaggtaggcctgatctttgaaatagtgaataggaatacaatgcatttcctcagtgatcactgattagaatgagttggtgggatccttgggaagccaaacggagcggagttctggatcatgtcccatccagtccagtgaatccacgacccgcagacctgtccccccgcaacagcttataccatggaatgaggacaaggtgatactctgagctgtggactgaactggcagacacaacctgtacagattgaaatttcaccttgtaaggaggaagtgaatgaaataaaggatccccctaaggattttctactgtgtcctgtggtgtttgacttcacagatgctatttgtgacattattcatatagcataaaacagtggggttggatcccatgaataacattataaaggttctggggttttttttcatccaattactagaatgttcagaatagactcatatttactaatttaataaatgtatgtacttaatgcctttacttttctaggtcattttaactataaaatc

SEQ ID NO: 175206 - DNA, 549 bp, Homo sapiens
  Payload ID: 14407
  Gene Symbol: RCN1
  Gene Name: reticulocalbin 1, EF-hand calcium binding domain
  ENST ID: ENST00000528630
  CDS Start-End: 1-87
gaaatattggagaactggaacatgtttgtcggaagccaagctaccaattacggggaagatctcacaaaaaatcatgatgagctttgatagacactcaccagaatatggcagactgtcataggcattctgttattgtcttggattgttgctacaattgtctaatttacagcagttgtgatcccacaaaaagcaagtttatacctcagattggggtataaaaattgtttttcgctcagtatttactggaaaatggacatcactagtctttcagtaagatttctctcaaaacacgtgaaaaccttgtgatcactgattagaatgagttggtgggatccttgggaagccaaacggagcggagttctggatcatgtcccatccagtccagtgaatccacgacccgcagacctgtccccccgcaacagcttataccatggaatgaggacaaggtgatactctgagctgtggactgaactggcagacacaacctgtacagattgaaatttcaccttgtaaggaggaagtgaatgaaataaaggatccccctaagga

SEQ ID NO: 175207 - DNA, 494 bp, Homo sapiens
  Payload ID: 14407
  Gene Symbol: RCN1
  Gene Name: reticulocalbin 1, EF-hand calcium binding domain
  ENST ID: ENST00000532721
  CDS Start-End: 436-494
ttgctggagggccccgggaccccagcttggagatcgccgccgccgcgccccggccggggtggtttctcgcggggaggcgagaacgtggcagcggccgcgggagccaggacggcgagggcccgccccctcccccaggttgcatcagaagggaggggagagtgcacaaaagaagagtttgtccacagtggcctgaagattgttgatcgaatcgacaatgatggggatggctttgtcactactgaggagctgaaaacctggatcaaacgggtgcagaaaagatacatctttgataatgtcgccaaagtctggaaggattatgatagggacaaggatgataaaatttcctgggaagaatacaaacaagccacctatggttactacctaggaaaccccgcagagtttcatgattcttcagatcatcacacctttaaaaagatgctgccacgtgatgagagaagattcaaagctgcagacctcaatggtgacctgacagc

SEQ ID NO: 175208 - DNA, 1191 bp, Homo sapiens
  Payload ID: 14407
  Gene Symbol: RCN1
  Gene Name: reticulocalbin 1, EF-hand calcium binding domain
  Uniprot ID: Q15293
  ENST ID: ENST00000532942
  CDS Start-End: 156-998
agaggaggtcctcggctcgccctgggcgcggagcgaggactctggtcagaggtaattatgtcaccgcgttttctcgccgtgacagccgaataaacacgatctccaataaacatctctaatgagggaggaggcccgaggatggctgggtttgatttatgactggaggagaaggtccacttcccactgcgaagcaggcgacctgctcgccgcccagctccagggagaggaacccgcggaggagaggatcccggcccaggaagattgttgatcgaatcgacaatgatggggatggctttgtcactactgaggagctgaaaacctggatcaaacgggtgcagaaaagatacatctttgataatgtcgccaaagtctggaaggattatgatagggacaaggatgataaaatttcctgggaagaatacaaacaagccacctatggttactacctaggaaaccccgcagagtttcatgattcttcagatcatcacacctttaaaaagatgctgccacgtgatgagagaagattcaaagctgcagacctcaatggtgacctgacagctactcgggaggagttcactgcctttctgcatcctgaagagtttgaacatatgaaggaaattgtggttttggaaaccctggaggacatcgacaagaacggggatgggtttgtggatcaggatgagtatattgcggatatgttttcccatgaggagaatggccctgagccagactgggttttatcagaacgggagcagtttaacgaattccgggatctgaacaaggacgggaagttagacaaagatgagattcgccactggatcctccctcaagattatgatcatgcacaggctgaggccaggcatctggtatatgaatcagacaaaaacaaggatgagaagctaactaaagaggaaatattggagaactggaacatgtttgtcggaagccaagctaccaattacggggaagatctcacaaaaaatcatgatgagctttgatagacactcaccagaatatggcagactgtcataggcattctgttattgtcttggattgttgctacaattgtctaatttacagcagttgtgatcccacaaaaagcaagtttatacctcagattggggtataaaaattgtttttcgctcagtatttactggaaaatggacatcactagtctttcagtaagatttc

SEQ ID NO: 175209 - DNA, 737 bp, Homo sapiens
  Payload ID: 14407
  Gene Symbol: RCN1
  Gene Name: reticulocalbin 1, EF-hand calcium binding domain
  ENST ID: ENST00000527337
  CDS Start-End: 1-172
ggaaaccctggaggacatcgacaagaacggggatgggtttgtggatcaggatgagtatattgacaaggaaacttcaggctcagtcactgaactaagtcaaaagccgggatttatcttttggcttctaaactcagttctttctactccaccacatggccttcatcatgaataaattactgcatcattatccccaagaagctgcctaccagctgtttgacggatatgttttcccatgaggagaatggccctgagccagactgggttttatcagaacgggagcagtttaacgaattccgggatctgaacaaggacgggaagttagacaaagatgagattcgccactggatcctccctcaagattatgatcatgcacaggctgaggccaggcatctggtatatgaatcagacaaaaacaaggatgagaagctaactaaagaggaaatattggagaactggaacatgtttgtcggaagccaagctaccaattacggggaagatctcacaaaaaatcatgatgagctttgatagacactcaccagaatatggcagactgtcataggcattctgttattgtcttggattgttgctacaattgtctaatttacagcagttgtgatcccacaaaaagcaagtttatacctcagattggggtataaaaattgtttttcgctcagtatttactggaaaatggacatcactagtctttcagtaagatttctctcaaaacacgtgaaaac

SEQ ID NO: 175210 - DNA, 527 bp, Homo sapiens
  Payload ID: 14407
  Gene Symbol: RCN1
  Gene Name: reticulocalbin 1, EF-hand calcium binding domain
  ENST ID: ENST00000530348
  CDS Start-End: 352-527
atctgtgtgtggtgcgtgtgtctccgcaccacgactccctctcctgggtctgctcagtccacggaggcagctccccttcagctgttgccagaaaaccggggaggaaagaagattgttgatcgaatcgacaatgatggggatggctttgtcactactgaggagctgaaaacctggatcaaacgggtgcagaaaagatacatctttgataatgtcgccaaagtctggaaggattatgatagggacaaggatgataaaatttcctgggaagaatacaaacaagccacctatggttactacctaggaaaccccgcagagtttcatgattcttcagatcatcacacctttaaaaagatgctgccacgtgatgagagaagattcaaagctgcagacctcaatggtgacctgacagctactcgggaggagttcactgcctttctgcatcctgaagagtttgaacatatgaaggaaattgtggttttggaaaccctggaggacatcgacaagaacggggatgggtttgtggatca

SEQ ID NO: 175211 - DNA, 1750 bp, Homo sapiens
  Payload ID: 14408
  Gene Symbol: RCN2
  Gene Name: reticulocalbin 2, EF-hand calcium binding domain
  Uniprot ID: Q14257
  ENST ID: ENST00000320963
  CDS Start-End: 105-1112
cgtcgcaccgcctctctgtagccgcccgcggagcatcgcagccggcccgggcccccgccagcctccctcctcgcgtccctcggtgtcctccgcgggccggcgcgatgcggctgggcccgaggaccgcggcgttggggctgctgctgctgtgcgccgccgcggccggcgccggcaaggccgaggagctgcactacccgctgggcgagcgccgcagcgactacgaccgcgaggcgctgctgggcgtccaggaagatgtggatgaatatgttaaactcggccacgaagagcagcaaaaaagactgcaggcgatcataaagaaaatcgacttggactcagatggctttctcactgaaagtgaactcagttcatggattcagatgtcttttaagcattatgctatgcaagaagcaaaacaacagtttgttgaatatgataaaaacagtgatgatactgtgacttgggatgaatataacattcagatgtatgatcgtgtgattgactttgatgagaacactgctctggatgatgcagaagaggagtcctttaggaaggaatttgccatttgtaaaaaacagtctttctgtttttggcttcttcgatttaatcttcacttaaaggacaagaagcgatttgaaaaagctaaccaggattcaggtcccggtttgagtcttgaagaatttattgcttttgagcatcctgaagaagttgattatatgacggaatttgtcattcaagaagctttagaagaacatgacaaaaatggtgatggatttgttagtttggaagaatttcttggtgattacaggtgggatccaactgcaaatgaagatccagaatggatacttgttgagaaagacagattcgtgaatgattatgacaaagataacgatggcaggcttgatccccaagagctgttaccttgggtagtacctaataatcagggcattgcacaagaggaggcgcttcatctaattgatgaaatggatttgaatggtgacaaaaagctctctgaagaagagattctggaaaacccggacttgtttctcaccagtgaagccacagattatggcagacagctccatgatgactatttctatcatgatgagctttaatctctgagcctgtctcagtagagtactggctccttttataatttgttaccagctttacttttgtgataaaatattgatgttgtattttacactcttaagtcttaaccacagtcagaattatcttaatgtagattataattttggtcttttaggaaaaaaaaacaaaaatctgatatttatttcaaaatgtattgaagcaacaaaatattaatattgtgccatatgacaacaaagtctttcctaaatactccatctgtttagtactgtattgtggaatatttgagttctatttccatacttgaaaacatggaggattttagagatgcctgaacaatattatttaagtagtatgtgaccgagctataaatttttgtttttgttctaagtagatttaatttgggaactgacaggacaatgtttttaggtttagcattttgtttaaaaacctttaaagaaacctttagaaggacttagacctcacatattaatgttgagaagttctgcttaattttaaaatggtttctataaagggttttattgtatgaaatagaactttatatttttgcatatgtatagatagtaattatatttaatgtataactatagcattatggtgagtggaatttgacattgtccaa

SEQ ID NO: 175212 - DNA, 1366 bp, Homo sapiens
  Payload ID: 14408
  Gene Symbol: RCN2
  Gene Name: reticulocalbin 2, EF-hand calcium binding domain
  ENST ID: ENST00000394883
  CDS Start-End: 88-738
gtagccgcccgcggagcatcgcagccggcccgggcccccgccagcctccctcctcgcgtccctcggtgtcctccgcgggccggcgcgatgcggctgggcccgaggaccgcggcgttggggctgctgctgctgtgcgccgccgcggccggcgccggcaaggccgaggagctgcactacccgctgggcgagcgccgcagcgactacgaccgcgaggcgctgctgggcgtccagcttcacttaaaggacaagaagcgatttgaaaaagctaaccaggattcaggtcccggtttgagtcttgaagaatttattgcttttgagcatcctgaagaagttgattatatgacggaatttgtcattcaagaagctttagaagaacatgacaaaaatggtgatggatttgttagtttggaagaatttcttggtgattacaggtgggatccaactgcaaatgaagatccagaatggatacttgttgagaaagacagattcgtgaatgattatgacaaagataacgatggcaggcttgatccccaagagctgttaccttgggtagtacctaataatcagggcattgcacaagaggaggcgcttcatctaattgatgaaatggatttgaatggtgacaaaaagctctctgaagaagagattctggaaaacccggacttgtttctcaccagtgaagccacagattatggcagacagctccatgatgactatttctatcatgatgagctttaatctctgagcctgtctcagtagagtactggctccttttataatttgttaccagctttacttttgtgataaaatattgatgttgtattttacactcttaagtcttaaccacagtcagaattatcttaatgtagattataattttggtcttttaggaaaaaaaaacaaaaatctgatatttatttcaaaatgtattgaagcaacaaaatattaatattgtgccatatgacaacaaagtctttcctaaatactccatctgtttagtactgtattgtggaatatttgagttctatttccatacttgaaaacatggaggattttagagatgcctgaacaatattatttaagtagtatgtgaccgagctataaatttttgtttttgttctaagtagatttaatttgggaactgacaggacaatgtttttaggtttagcattttgtttaaaaacctttaaagaaacctttagaaggacttagacctcacatattaatgttgagaagttctgcttaattttaaaatggtttctataaagggttttattgtatgaaatagaactttatatttttgcatatgtatagatagtaattatatttaatgtataactatagcattatggtgagtggaatttga

SEQ ID NO: 175213 - DNA, 6347 bp, Homo sapiens
  Payload ID: 14408
  Gene Symbol: RCN2
  Gene Name: reticulocalbin 2, EF-hand calcium binding domain
  Uniprot ID: Q14257
  ENST ID: ENST00000394885
  CDS Start-End: 224-1177
atataggcctcctcctggcgcgcctccgcaccgcattggtggaccggcccccagcccgtccatgggcgttgtggccgccaccgcaggttccgcctcccgttccctccgccctcaacgtacgtcgcaccgcctctctgtagccgcccgcggagcatcgcagccggcccgggcccccgccagcctccctcctcgcgtccctcggtgtcctccgcgggccggcgcgatgcggctgggcccgaggaccgcggcgttggggctgctgctgctgtgcgccgccgcggccggcgccggcaaggccgaggagctgcactacccgctgggcgagcgccgcagcgactacgaccgcgaggcgctgctgggcgtccaggaagatgtggatgaatatgttaaactcggccacgaagagcagcaaaaaagactgcaggcgatcataaagaaaatcgacttggactcagatggctttctcactgaaagtgaactcagttcatggattcagatgtcttttaagcattatgctatgcaagaagcaaaacaacagtttgttgaatatgataaaaacagtgatgatactgtgacttgggatgaatataacattcagatgtatgatcgtgtgattgactttgatgagaacactgctctggatgatgcagaagaggagtcctttaggaagcttcacttaaaggacaagaagcgatttgaaaaagctaaccaggattcaggtcccggtttgagtcttgaagaatttattgcttttgagcatcctgaagaagttgattatatgacggaatttgtcattcaagaagctttagaagaacatgacaaaaatggtgatggatttgttagtttggaagaatttcttggtgattacaggtgggatccaactgcaaatgaagatccagaatggatacttgttgagaaagacagattcgtgaatgattatgacaaagataacgatggcaggcttgatccccaagagctgttaccttgggtagtacctaataatcagggcattgcacaagaggaggcgcttcatctaattgatgaaatggatttgaatggtgacaaaaagctctctgaagaagagattctggaaaacccggacttgtttctcaccagtgaagccacagattatggcagacagctccatgatgactatttctatcatgatgagctttaatctctgagcctgtctcagtagagtactggctccttttataatttgttaccagctttacttttgtgataaaatattgatgttgtattttacactcttaagtcttaaccacagtcagaattatcttaatgtagattataattttggtcttttaggaaaaaaaaacaaaaatctgatatttatttcaaaatgtattgaagcaacaaaatattaatattgtgccatatgacaacaaagtctttcctaaatactccatctgtttagtactgtattgtggaatatttgagttctatttccatacttgaaaacatggaggattttagagatgcctgaacaatattatttaagtagtatgtgaccgagctataaatttttgtttttgttctaagtagatttaatttgggaactgacaggacaatgtttttaggtttagcattttgtttaaaaacctttaaagaaacctttagaaggacttagacctcacatattaatgttgagaagttctgcttaattttaaaatggtttctataaagggttttattgtatgaaatagaactttatatttttgcatatgtatagatagtaattatatttaatgtataactatagcattatggtgagtggaatttgacattgtccaaacctttttcatttttgagtgattaaaaatgaaatgtcctttgtatatgtttgtttgcttttctttaactttcagataaatattgaatttagcataggttttgtggtattgtacattatcttgcctcatccattcctttatgtggatagttcccaaaactgtcaaattattcttgctgcattttcttattttttttttaaataagagaatcatgttataatataattgaatgtgcacctgacacattttaataattggtgttgtagcaaatgtggttttgctctttggggctataaataatcttgagtaacgcaggttggaattaccaatagagctggtcagttatcaacagtagagctcagtatcaattttactgaaattaaaatcatacttgataagcatgataatcaattttaacctaattcagcaggtcaacttatttaactttggtggaggtgggatagggaaaagtgaagggaggaattaatttttttctagttctgatgtacagagattgtttttcattcttttttttttttttttttttgtgacagagtcttgctctgtggcccaggctggagtgcaggggcactatctcggctcactgcaagctctgcctcctgggttcacgccattctcctgcctcagcctcccgagtagctgggactacaggcgcctgccaccacacccggctaatttttttgtatttttagtagagaccgggtttcaccgtgttagccaggatggtttcgatctcctgacctcatgatcagcccacctcggcctcccaaggtgctggaattacaggcgtgagccaacgcgcacggcctctagtttttcattctttaaatcacttttatttgtgggtgaagaggtcagctatgcattctcttaatcactttccagcctaaagttgtctcatatacagcacactgggggctcaacaagtacctatgactatttgagaagacatgaaactcttctctgatagaatcgactgcacctatatacctctctactgccgcatctttgctgatgtgaggtgtgcttgcaaattgtaagcttccacaccttaatgactgcttgcttgggtatctacatggttttcattttaacctacactatatgtctggctatagcagttttagaattacagatttaccactatcactcatctgtcatttgtcagactcactgaagctggcatatttgaaatcaccagtttgactagttaactatttgtttttctctctagcttctccaaaatctatgccagaatagatcatcagatatggattatatttcaatcctttgcagaaatgcaatgtctgtactactttccttcctagcataaagaaaactacacttcccagccctcttgtaggtaggcgatggctagttctgaccagttaaacatgggtggaagtagtgtgtgtcactatcagactatctcatgacaaacccttttcctctgccacagcactgtgcaggaggcctcagctgaaatggtgcagccacaagatgaaagtggctttgatcttgagtctgtgtaggtcagctggatccacagtgggctttgtatgatcaaaaaataagcttttaattatgttaagccactgagatttggttgtgcttttttgtttttaaccacagcagagcccatcctgctgtgactgagtgaagatttcacatttaacaataggcttttaataagcatgcagagaaaaagaatcatctgcttgaacagagatgctatatctactgctgagtcaaaatagaaaattttaaggctttttttagatttgaattttaaataagacttttaaaataaagcttttattttggttttaatataattaggataatttgaatttatccttgagcatgagagtaaaaatagtttgagactttctgaatcattggctgattctgcctgaaggacttaatgacttccattatttgagttcaggtacaacttcaaaggggaaaattgaatgggatgtgcacatgttggctcatatgtagttctgattgggccaatttgcaggacagaaaatgatgtctagattatgatataaatttaaaggaagccaggacgttcagaggaaaagctagcatatcatgtttgccttacttagttctttcctttgcagttttaaaaataggctttttttttttttagtgtagttttatgttcacagcaaaattgagcaaaaagtagtatagagagtttcaatatgtcccctgccccacatacgtacagcctcccccactatcctatcctatatgtcatgagatagtacctaccagagtggtacatttgttaaaatcgatgaaactgttaacatatcattgtcacccaaagtgcatagtttacattagggttcactcttggtgctgcacatgctctgggtttggacaaatgtataattacatattcccaccattgtagtgtggtagaatatttcccttgccctaaagtctttctgctccacctattcatccctcccttccctgtaaccccaagcaatactgatctttttactgttcataattttttagattgtagtaaaatacacataacaaaattcatcttaacagtttttaattgtacagttcggtggtatggtattaaatacagtcaaaatgtgaaactattaccaccttccatctccatgaacttcatttgtaaaacggaaatttatacccattaaacaataaagccccctttccccttcccttcagcacctggcaaacaccattctagtttttttgtttgagatggagtcttgctcttgttgcccaggctggagtgcaatggcatgatttcggctcactgcaacctctgtctcttggggtcaagcgattctcctgcctcagcctcccgactaggtgggattacaggcgggcaccaccatgccccctaattttttgtatttagtagaaatggggtttcaccatgttggtcaagctggtctcgaactcctgatctcaggtgatccacctgcctcagcctcccaaagtgctggaattacaggcgtgagccaccgtgcccagcctcccattctagttttctttttctttcttttttgagacggagtctcactcttgtcatccaggctggagtgcagtggtgcgatctcggctcactgcaacctccacctcccaggttcaagcgattctcctgcctcagcctcccaagtagctgggattatagatgcccgctaccacgcccggctaatttttgtacttttagtagagacggggtttcgccatgttggcatggctggtctcgaactcttgacctcaggtgatccacctgcctcggcctcccaaagtgctgagattacgggcatgagccaccgcgcccagccccattctagtttgtgtctattaaaatagactcatatagtatttgtctttttgtgagtggcttcacttagcataacgtccccaaagttcacccatattgttaccagaatttctttcgtcaggctgaacaatactttattgtttgcatataccacattttgcttatccattcaccctttgatggacacaggttgcttccaccttttattgtgaataatgctgccatgaatatgggtgtacaaatatttctttgagatcctgcttttagttcttttggatatatattatacatagaagtgggattgctggatcatatagtaattctatatatatatatatatatatatatatatatatatatattttttttttttttttttttttttttttttttgagacggagtctcgctctgtcgcccaggctggagtgcagtggcgcgatctcggctcactgcaggctccgcctcccgggttcacaccattctcctgcctcagcctcccgagtagctgggactataggcgcctgccaccgcacccggctaattttttgtatttttagtagagacggggtttcaccgtgttagccaggatggtcttgatctgctgacctcgtgatccgcccgccttggcctcccaaagtgctgggattacaggcgtgagccaccgcgcccgactagtaattctatttttaatattttgaggaactgccatagtgtttcccacagcagctgtgccattttgcatttccaccaatagtgcacaagagttccagtttctttacatccttaccaacacttgctattttctgtttttttttttttcttttttttttttaatagtagccatcctgttgggtgagacgtggtatctcgttgtggctttgatttgcatttccctaatggtctgtctctacagttttgcctgttccagaatatcattcctttgcaatttaaatgtgaggataaatgtatgctattgtttctcaaacgtttttgtgttacaatacctccttttgagtgagaaatgtcaactcaaacttacactttttcacttaggaagatgatttaggaaagccacttagagtaaaagtttttaaacaactgtaaaaactaatttgcttcattgcaacatttgagttctgtcgaataaatatttggccag

SEQ ID NO: 175214 - DNA, 691 bp, Homo sapiens
  Payload ID: 14408
  Gene Symbol: RCN2
  Gene Name: reticulocalbin 2, EF-hand calcium binding domain
  ENST ID: ENST00000557805
  CDS Start-End: 1-466
ggggctgctgctgctgtgcgccgccgcggccggcgccggcaaggccgaggagctgcactacccgctgggcgagcgccgcagcgactacgaccgcgaggcgctgctgggcgtccaggaagatgtggatgaatatgttaaactcggccacgaagagcagcaaaaaagactgcaggcgatcataaagaaaatcgacttggactcagatggctttctcactgaaagtgaactcagttcatggattcagatgtcttttaagcattatgctatgcaagaagcaaaacaacagtttgttgaatatgataaaaacagtgatgatactgtgacttgggatgaatataacattcagatgtatgatcgtgtgattgactttgatgagaacactgctctggatgatgcagaagaggagtcctttaggaagcatcaatgtggaggtttggggctccatcctcagagccagtctgcttagcttcacatttagctccagcacttcacggttgtgtaactttggcttcacttaaaggacaagaagcgatttgaaaaagctaaccaggattcaggtcccggtttgagtcttgaagaatttattgcttttgagcatcctgaagaagttgattatatgacggaatttgtcattcaagaagctttagaagaacatgacaaaaatggtgatggatttgttagtttggaagaa

SEQ ID NO: 175215 - DNA, 1859 bp, Homo sapiens
  Payload ID: 14409
  Gene Symbol: RCN3
  Gene Name: reticulocalbin 3, EF-hand calcium binding domain
  Uniprot ID: Q96D15
  ENST ID: ENST00000270645
  CDS Start-End: 448-1434
tttttgtttatttttgttttgttttgttttgtttggtatagaagtgttggaacgtacacctctttcttaaaccatcctgacaaagggaaagggaaaaatacatttcccgtgaggcgttgtgactagaacagctggaggtggacggcagagtgccgcgacgactgccaggagttgtagttctccccggccgcgtcactgcggtgtcgcccacccttcttccccgggcaggccgcggtttcctttgtggacgtggcgaggagtgcccgcggcaccccgtgcactcattggccccgccccgtgagacgctcgtgcgagctcattgggcggggggcggggctctgcgctgccagaggcggggcctgactggagagcggccgaattgggcacatttgcgggaacgcagagcggagcgtggagagcggagcgaagctggataacaggggaccgatgatgtggcgaccatcagttctgctgcttctgttgctactgaggcacggggcccaggggaagccatccccagacgcaggccctcatggccaggggagggtgcaccaggcggcccccctgagcgacgctccccatgatgacgcccacgggaacttccagtacgaccatgaggctttcctgggacgggaagtggccaaggaattcgaccaactcaccccagaggaaagccaggcccgtctggggcggatcgtggaccgcatggaccgcgcgggggacggcgacggctgggtgtcgctggccgagcttcgcgcgtggatcgcgcacacgcagcagcggcacatacgggactcggtgagcgcggcctgggacacgtacgacacggaccgcgacgggcgtgtgggttgggaggagctgcgcaacgccacctatggccactacgcgcccggtgaagaatttcatgacgtggaggatgcagagacctacaaaaagatgctggctcgggacgagcggcgtttccgggtggccgaccaggatggggactcgatggccactcgagaggagctgacagccttcctgcaccccgaggagttccctcacatgcgggacatcgtgattgctgaaaccctggaggacctggacagaaacaaagatggctatgtccaggtggaggagtacatcgcggatctgtactcagccgagcctggggaggaggagccggcgtgggtgcagacggagaggcagcagttccgggacttccgggatctgaacaaggatgggcacctggatgggagtgaggtgggccactgggtgctgccccctgcccaggaccagcccctggtggaagccaaccacctgctgcacgagagcgacacggacaaggatgggcggctgagcaaagcggaaatcctgggtaattggaacatgtttgtgggcagtcaggccaccaactatggcgaggacctgacccggcaccacgatgagctgtgagcaccgcgcacctgccacagcctcagaggcccgcacaatgaccggaggaggggccgctgtggtctggccccctccctgtccaggccccgcaggaggcagatgcagtcccaggcatcctcctgcccctgggctctcagggaccccctgggtcggcttctgtccctgtcacacccccaaccccagggaggggctgtcatagtcccagaggataagcaatacctatttctgactgagtctcccagcccagacccagggacccttggccccaagctcagctctaagaaccgccccaacccctccagctccaaatctgagcctccaccacatagactgaaactcccctggccccagccctctcctgcctggcctggcctgggacacctcctctctgccaggaggcaataaaagccagcgccgggaccttg

SEQ ID NO: 175216 - DNA, 549 bp, Homo sapiens
  Payload ID: 14409
  Gene Symbol: RCN3
  Gene Name: reticulocalbin 3, EF-hand calcium binding domain
  ENST ID: ENST00000597801
  CDS Start-End: 99-549
cctctaagcatcccgccctcttttcccccatcgcccgccctttttgagcccgaaagcttgcagccaacttccaactccctgtcctgtcctagggaccgatgatgtggcgaccatcagttctgctgcttctgttgctactgaggcacggggcccaggggaagccatccccagacgcaggccctcatggccaggggagggtgcaccaggcggcccccctgagcgacgctccccatgatgacgcccacgggaacttccagtacgaccatgaggctttcctgggacgggaagtggccaaggaattcgaccaactcaccccagaggaaagccaggcccgtctggggcggatcgtggaccgcatggaccgcgcgggggacggcgacggctgggtgtcgctggccgagcttcgcgcgtggatcgcgcacacgcagcagcggcacatacgggactcggtgaagaatttcatgacgtggaggatgcagagacctacaaaaagatgctggctcgggacgagcggcgtttccgggtggccgaccaggatggggactcgat

SEQ ID NO: 175217 - DNA, 607 bp, Homo sapiens
  Payload ID: 14409
  Gene Symbol: RCN3
  Gene Name: reticulocalbin 3, EF-hand calcium binding domain
  ENST ID: ENST00000598833
  CDS Start-End: 1-510
ttccagtacgaccatgaggctttcctgggacgggaagtggccaaggaattcgaccaactcaccccagaggaaagccaggcccgtctggggcggatcgtggaccgcatggaccgcgcgggggacggcgacggctgggtgtcgctggccgagcttcgcgcgtggatcgcgcacacgcagcagcggcacatacgggactcggtgagcgcggcctgggacacgtacgacacggaccgcgacgggcgtgtgggttgggaggagctgcgcaacgccacctatggccactacgcgcccggtgaagaatttcatgacgtggaggatgcagagacctacaaaaagatgctggctcgggacgagcggcgtttccgggtggccgaccaggatggggactcgatggccactcgagaggagctgacagccttcctgcaccccgaggagttccctcacatgcgggacatcgtgattgctcttttcttttccaggatttatctcctcaccttccttttgctgtagttcttcaagctaggaagactggatttccctctggtgttttagctgccagtcatggtatgaactagaactcacccccaagtaaaagctgtacaaataa

SEQ ID NO: 175218 - DNA, 595 bp, Homo sapiens
  Payload ID: 14409
  Gene Symbol: RCN3
  Gene Name: reticulocalbin 3, EF-hand calcium binding domain
  ENST ID: ENST00000593483
  CDS Start-End: 1-175
gacggagaggcagcagttccgggacttccgggatctgaacaaggatgggcacctggatgggagtgaggatgggcggctgagcaaagcggaaatcctgggtaattggaacatgtttgtgggcagtcaggccaccaactatggcgaggacctgacccggcaccacgatgagctgtgagcaccgcgcacctgccacagcctcagaggcccgcacaatgaccggaggaggggccgctgtggtctggccccctccctgtccaggccccgcaggaggcagatgcagtcccaggcatcctcctgcccctgggctctcagggaccccctgggtcggcttctgtccctgtcacacccccaaccccagggaggggctgtcatagtcccagaggataagcaatacctatttctgactgagtctcccagcccagacccagggacccttggccccaagctcagctctaagaaccgccccaacccctccagctccaaatctgagcctccaccacatagactgaaactcccctggccccagccctctcctgcctggcctggcctgggacacctcctctctgccaggaggcaataaaagccagcgccggga

SEQ ID NO: 175219 - DNA, 3435 bp, Homo sapiens
  Payload ID: 14410
  Gene Symbol: RTN1
  Gene Name: reticulon 1
  Uniprot ID: Q16799
  ENST ID: ENST00000267484
  CDS Start-End: 337-2667
aggaggacccggaccaagcaggccattttcacctgcgtaataacaggattgggaatagcgaagcagcggcggcagcagcgagtggagtaggaggaggagcgcaggcagcggccgcggcggggccggaggaagaggaggggggagaaggaggagctgaagcgggaagagcggcaggcagcggctcggcggagttgcagcagaggcggcggcgacgctgagacaccgcagcttccctgagcgccgagtccctccggggacagcagcagggagcgcccgcgcagccaccgagcctctgcccagccaagccgccgtcgccgcgccgggggaccgccagccatggccgcgccgggggatccgcaggacgagctgctgccgctggccggccccgggtcccagtggctcaggcaccggggggagggggagaacgaagcggtgacgccgaaaggggccacgccggcgccgcaggctggggagcccagcccggggttgggcgccagggcccgggaagcggcgtcgcgggaagccggctcgggccccgcccggcagtcgcccgttgccatggaaactgcatccacaggtgtggcaggtgtttccagtgccatggaccacaccttctcaacaacatcaaaagatggggaaggatcgtgttacacatctctcatttctgacatctgctatccacctcaggaggattctacatattttactggaattcttcagaaggaaaatggccacgtcaccatttcagagagccctgaggagctgggtacacccggcccctccttaccagatgtgcctgggatagagtctcgtggcttatttagttctgattctggaatagagatgactcctgcagagtccacggaagtgaacaagatcttagcagaccctctggaccagatgaaagcagaggcctataaatacattgacataaccagacccgaggaggtgaagcaccaagaacaacatcaccccgagctggaagataaagacttggactttaagaataaagacactgacatctcaattaaacctgaaggagtccgtgaacctgacaaaccagctcctgtggagggaaaaatcatcaaggaccatttattggaagaatccacatttgctccatacatagatgatctctctgaagaacagcgcagggctcctcagatcaccacccctgtcaaaatcacactgacggaaatagaaccttctgttgaaaccactacccaagagaagacccctgagaagcaagatatatgtctaaagccaagtcctgacacagtccccactgtcactgtctcggagcctgaagacgacagcccaggatctatcacccctccatcttctggaacagaaccatctgctgcagaatcccaggggaaaggcagcatctccgaggatgagctgatcaccgccatcaaagaagcaaagggattatcgtatgaaaccgccgagaacccacggccggtgggccagctggccgacaggcccgaggtcaaggccaggtccggaccgccaaccatccccagccccctggaccacgaggccagcagcgcggagtcgggggactcagagatcgagctggtgtccgaggaccccatggccgcggaggacgcgctgccctcaggctatgtgagctttggccacgtgggcggcccgccgccctcgcccgcctcgccatccatccagtacagcatcctgagggaggagcgcgaggccgagctggacagcgagctcatcatcgagtcgtgcgacgcctcctcggcctcggaggagagccccaagcgggagcaggactcacccccgatgaagcccagcgccctggatgccatccgggaggagactggcgtccgggccgaggagcgtgcgccaagccggcggggcctggccgagccgggttccttcctcgactacccctcaactgagccccagcctggccccgagctgccccctggagacggagccctggagcctgagacgcccatgttgccacggaagcctgaagaagactcgagttccaaccaaagtcctgcggccacaaagggccctgggcctctaggtcctggcgccccgcccccactgctgtttctcaataagcaaaaagctattgacctgttgtattggcgggacatcaagcagacgggcatcgtgtttgggagtttcctgctgctgctcttctccctgacccagttcagcgtggtgagcgtcgtggcctacctggccctggccgcactctcagccaccatcagtttccgcatctacaagtctgttttacaagcagtgcagaaaaccgacgaaggccaccctttcaaggcctacttggagcttgagatcaccctttctcaggagcagattcagaagtacacggactgcctgcagttctacgtgaacagcacacttaaggaactgaggaggctcttccttgtccaggacctggtggattccttaaaatttgcagtcctgatgtggctcctgacctacgttggcgctctcttcaatggcctgaccctgctgctcatggctgtggtttcaatgtttactctacctgtagtgtatgttaagcaccaggcacagattgaccaatatctgggacttgtgaggactcacataaatgctgttgtggcaaagattcaggctaaaatcccaggcgctaagaggcatgctgagtaaactgatttcccaccggggactggacacaaacaggaatgtctggagtggtaacagctctcttcttactcattactgcaaattgattgtctttcccccctccctccagtaccataatcttagagacaaaccttaaaacagctgtttttaggctgttccttgtactcttaggatatttgagtcacttgtgtcaaccactaaagtatagagaaaagtgtattagatgtggtttttaattttgtgttgctaaaaaaagtgcatgatggtgagagcccaagttatctttccctcttcggtgttcttcttctcttctctgcaatgcttctgtagcttctaatgttccccgtggctaggcctttcctgccgagtgctctgatgcaatagtggaaatcgcttatatgtccttgggttgctggttggattaatctttaataacaatatatagaattgtagactgatgttttagcatttttccaacacacacaacgtaaaaataaaagcagtcgaccgcacttatggtaatcagttttgtataacttaaaataattaaataaatgaataaatccaaaacaaacatgcagtacttttgttgtatgggattggtgggctgatttacatgtatggttactaaaaagtaccagcatgttaactttattacaatttgtattactttctctgtagttcctaatggattcaattacggactctggatatttgcacttatgtacttgatactgaatgcataaataaatgttactaaatgtagaatgt

SEQ ID NO: 175220 - DNA, 1703 bp, Homo sapiens
  Payload ID: 14410
  Gene Symbol: RTN1
  Gene Name: reticulon 1
  Uniprot ID: Q16799
  ENST ID: ENST00000342503
  CDS Start-End: 309-935
agaaccgctttacccgtctccagggtagcacccttgggcagcccagccaacgctgtcgcgtggagcggcgcccgcatccccatgcgcgcaggcggctccggggccgcgccgcgctgattcgctgccggccgcgcagactgcggcgccagcgacgctcccgcccctcaccgcgcgccgcctggtgcagcctcagtctctccgcagccgcgcggccactgcgagcccagccgcagcagccgggcaccaacgcttgagtgcacgctcggcgcccccgaggagagccacggcgagcccccaaagcccgcacgatgcaggccactgccgattccaccaagatggactgtgtgtggagcaactggaaaagtcaggctattgacctgttgtattggcgggacatcaagcagacgggcatcgtgtttgggagtttcctgctgctgctcttctccctgacccagttcagcgtggtgagcgtcgtggcctacctggccctggccgcactctcagccaccatcagtttccgcatctacaagtctgttttacaagcagtgcagaaaaccgacgaaggccaccctttcaaggcctacttggagcttgagatcaccctttctcaggagcagattcagaagtacacggactgcctgcagttctacgtgaacagcacacttaaggaactgaggaggctcttccttgtccaggacctggtggattccttaaaatttgcagtcctgatgtggctcctgacctacgttggcgctctcttcaatggcctgaccctgctgctcatggctgtggtttcaatgtttactctacctgtagtgtatgttaagcaccaggcacagattgaccaatatctgggacttgtgaggactcacataaatgctgttgtggcaaagattcaggctaaaatcccaggcgctaagaggcatgctgagtaaactgatttcccaccggggactggacacaaacaggaatgtctggagtggtaacagctctcttcttactcattactgcaaattgattgtctttcccccctccctccagtaccataatcttagagacaaaccttaaaacagctgtttttaggctgttccttgtactcttaggatatttgagtcacttgtgtcaaccactaaagtatagagaaaagtgtattagatgtggtttttaattttgtgttgctaaaaaaagtgcatgatggtgagagcccaagttatctttccctcttcggtgttcttcttctcttctctgcaatgcttctgtagcttctaatgttccccgtggctaggcctttcctgccgagtgctctgatgcaatagtggaaatcgcttatatgtccttgggttgctggttggattaatctttaataacaatatatagaattgtagactgatgttttagcatttttccaacacacacaacgtaaaaataaaagcagtcgaccgcacttatggtaatcagttttgtataacttaaaataattaaataaatgaataaatccaaaacaaacatgcagtacttttgttgtatgggattggtgggctgatttacatgtatggttactaaaaagtaccagcatgttaactttattacaatttgtattactttctctgtagttcctaatggattcaattacggactctggatatttgcacttatgtacttgatactgaatgcataaataaatgttactaaatgtagaatgt

SEQ ID NO: 175221 - DNA, 1609 bp, Homo sapiens
  Payload ID: 14410
  Gene Symbol: RTN1
  Gene Name: reticulon 1
  ENST ID: ENST00000395090
  CDS Start-End: 260-841
cgcgcggccactgcgagcccagccgcagcagccgggcaccaacgcttgagtgcacgctcggcgcccccgaggagagccacggcgagcccccaaagcccgcacgatgcaggccactgccgattccaccaagatggactgtgtgtggagcaactggaaaagtcaggtttcttcaaggaaagtccatgaagtgcctgccattcacagacttcttgagcaggtggcctcctggttggagatttaggaggcttccctagagggcatgccatttctaccagctattgacctgttgtattggcgggacatcaagcagacgggcatcgtgtttgggagtttcctgctgctgctcttctccctgacccagttcagcgtggtgagcgtcgtggcctacctggccctggccgcactctcagccaccatcagtttccgcatctacaagtctgttttacaagcagtgcagaaaaccgacgaaggccaccctttcaaggcctacttggagcttgagatcaccctttctcaggagcagattcagaagtacacggactgcctgcagttctacgtgaacagcacacttaaggaactgaggaggctcttccttgtccaggacctggtggattccttaaaatttgcagtcctgatgtggctcctgacctacgttggcgctctcttcaatggcctgaccctgctgctcatggctgtggtttcaatgtttactctacctgtagtgtatgttaagcaccaggcacagattgaccaatatctgggacttgtgaggactcacataaatgctgttgtggcaaagattcaggctaaaatcccaggcgctaagaggcatgctgagtaaactgatttcccaccggggactggacacaaacaggaatgtctggagtggtaacagctctcttcttactcattactgcaaattgattgtctttcccccctccctccagtaccataatcttagagacaaaccttaaaacagctgtttttaggctgttccttgtactcttaggatatttgagtcacttgtgtcaaccactaaagtatagagaaaagtgtattagatgtggtttttaattttgtgttgctaaaaaaagtgcatgatggtgagagcccaagttatctttccctcttcggtgttcttcttctcttctctgcaatgcttctgtagcttctaatgttccccgtggctaggcctttcctgccgagtgctctgatgcaatagtggaaatcgcttatatgtccttgggttgctggttggattaatctttaataacaatatatagaattgtagactgatgttttagcatttttccaacacacacaacgtaaaaataaaagcagtcgaccgcacttatggtaatcagttttgtataacttaaaataattaaataaatgaataaatccaaaacaaacatgcagtacttttgttgtatgggattggtgggctgatttacatgtatggttactaaaaagtaccagcatgttaactttattacaatttgtattactttctctgtagttcctaatggattcaattacggactctggatatttgcacttatgtacttgatactgaatgcataaataaatgttactaaatgtagaatgt

SEQ ID NO: 175222 - DNA, 2647 bp, Homo sapiens
  Payload ID: 14410
  Gene Symbol: RTN1
  Gene Name: reticulon 1
  ENST ID: ENST00000611068
  CDS Start-End: 122-2230
ctgagacaccgcagcttccctgagcgccgagtccctccggggacagcagcagggagcgcccgcgcagccaccgagcctctgcccagccaagccgccgtcgccgcgccggtcgcccgttgccatggaaactgcatccacaggtgtggcaggtgtttccagtgccatggaccacaccttctcaacaacatcaaaagatggggaaggatcgtgttacacatctctcatttctgacatctgctatccacctcaggaggattctacatattttactggaattcttcagaaggaaaatggccacgtcaccatttcagagagccctgaggagctgggtacacccggcccctccttaccagatgtgcctgggatagagtctcgtggcttatttagttctgattctggaatagagatgactcctgcagagtccacggaagtgaacaagatcttagcagaccctctggaccagatgaaagcagaggcctataaatacattgacataaccagacccgaggaggtgaagcaccaagaacaacatcaccccgagctggaagataaagacttggactttaagaataaagacactgacatctcaattaaacctgaaggagtccgtgaacctgacaaaccagctcctgtggagggaaaaatcatcaaggaccatttattggaagaatccacatttgctccatacatagatgatctctctgaagaacagcgcagggctcctcagatcaccacccctgtcaaaatcacactgacggaaatagaaccttctgttgaaaccactacccaagagaagacccctgagaagcaagatatatgtctaaagccaagtcctgacacagtccccactgtcactgtctcggagcctgaagacgacagcccaggatctatcacccctccatcttctggaacagaaccatctgctgcagaatcccaggggaaaggcagcatctccgaggatgagctgatcaccgccatcaaagaagcaaagggattatcgtatgaaaccgccgagaacccacggccggtgggccagctggccgacaggcccgaggtcaaggccaggtccggaccgccaaccatccccagccccctggaccacgaggccagcagcgcggagtcgggggactcagagatcgagctggtgtccgaggaccccatggccgcggaggacgcgctgccctcaggctatgtgagctttggccacgtgggcggcccgccgccctcgcccgcctcgccatccatccagtacagcatcctgagggaggagcgcgaggccgagctggacagcgagctcatcatcgagtcgtgcgacgcctcctcggcctcggaggagagccccaagcgggagcaggactcacccccgatgaagcccagcgccctggatgccatccgggaggagactggcgtccgggccgaggagcgtgcgccaagccggcggggcctggccgagccgggttccttcctcgactacccctcaactgagccccagcctggccccgagctgccccctggagacggagccctggagcctgagacgcccatgttgccacggaagcctgaagaagactcgagttccaaccaaagtcctgcggccacaaagggccctgggcctctaggtcctggcgccccgcccccactgctgtttctcaataagcaaaaagctattgacctgttgtattggcgggacatcaagcagacgggcatcgtgtttgggagtttcctgctgctgctcttctccctgacccagttcagcgtggtgagcgtcgtggcctacctggccctggccgcactctcagccaccatcagtttccgcatctacaagtctgttttacaagcagtgcagaaaaccgacgaaggccaccctttcaaggcctacttggagcttgagatcaccctttctcaggagcagattcagaagtacacggactgcctgcagttctacgtgaacagcacacttaaggaactgaggaggctcttccttgtccaggacctggtggattccttaaaatttgcagtcctgatgtggctcctgacctacgttggcgctctcttcaatggcctgaccctgctgctcatggctgtggtttcaatgtttactctacctgtagtgtatgttaagcaccaggcacagattgaccaatatctgggacttgtgaggactcacataaatgctgttgtggcaaagattcaggctaaaatcccaggcgctaagaggcatgctgagtaaactgatttcccaccggggactggacacaaacaggaatgtctggagtggtaacagctctcttcttactcattactgcaaattgattgtctttcccccctccctccagtaccataatcttagagacaaaccttaaaacagctgtttttaggctgttccttgtactcttaggatatttgagtcacttgtgtcaaccactaaagtatagagaaaagtgtattagatgtggtttttaattttgtgttgctaaaaaaagtgcatgatggtgagagcccaagttatctttccctcttcggtgttcttcttctcttctctgcaatgcttctgtagcttctaatgttccccgtggctaggcctttcctgccgagtgctctgatgcaatagtggaaatcgcttatatgtccttgggttgctggttgg

SEQ ID NO: 175223 - DNA, 2293 bp, Homo sapiens
  Payload ID: 14411
  Gene Symbol: RTN2
  Gene Name: reticulon 2
  Uniprot ID: O75298
  ENST ID: ENST00000245923
  CDS Start-End: 237-1874
cccggccgcgcgctgcagtgccttccccacctcggccccgcccgcccccgccgagccgagcaccagggcggcggcggcggcggcggcggcggcggcggctggagcagcccgggaggaggaggcggcgagaatggcagcggcgtcgtgggcgcggcggagatgagcgcccgcgaccccgggcccagggcggcacagccggagtgggcgggggtcccgatgcaggcccgaggggggccatggggcaggtcctgccggtcttcgcccactgcaaagaagctccgtctacagcctcctcaactcctgattccacagaaggagggaacgacgactctgattttcgagagctgcacacagcccgggaattctcagaggaggacgaggaggagaccacgtcgcaggactggggcaccccccgggagctgaccttctcctacatcgcctttgatggtgtagtgggctccgggggccgcagggattcaactgcccgccgcccccgcccccagggccgctcagtctcggaaccacgagaccagcaccctcagcccagcctgggcgacagcttggagagcatccccagcctgagccaatccccggagcctggacgacggggtgatcctgacaccgcgcctccatccgagcgccctctggaagacctgaggcttcggttggaccatctgggctgggtggcccggggaacgggatccggggaggactcttccaccagcagctccaccccgctggaagacgaagaaccccaagaacccaacagattggagacaggagaagctggggaagaactggacctacgactccgacttgctcagccctcatcgcccgaggtcttgactccccagctcagtccgggctctgggacaccccaggccggtactccgtccccatcccgatcgcgagattcgaactctgggcccgaagagccattgctggaagaggaagaaaagcagtgggggccactggagcgagagccagtaaggggacagtgcctcgatagcacggaccaattagaattcacggtggagccacgccttctaggaacagctatggaatggttaaagacatcattgcttttggctgtttacaagacggttccaattttggaattgtccccacctctgtggacagccattggctgggtccaaaggggccccaccccccctactcctgtcctccgggttctactgaagtgggcaaaatccccgagaagcagcggtgtccccagcctctcactcggagccgatatggggagtaaagtggcggacctgctgtactggaaggacacgaggacgtcaggagtggtcttcacaggcctgatggtctccctcctctgcctcctgcactttagcatcgtgtccgtggccgcgcacttggctctgttgctgctctgcggcaccatctctctcagggtttaccgcaaagtgctgcaggccgtgcaccggggggatggagccaaccctttccaggcctacctggatgtggacctcaccctgactcgggagcagacggaacgtttgtcccaccagatcacctcccgcgtggtctcggcggccacgcagctgcggcacttcttcctggtagaagacctcgtggattccctcaagctggccctcctcttctacatcttgaccttcgtgggtgccatcttcaatggtttgactcttctcattctgggagtgattggtctattcaccatccccctgctgtaccggcagcaccaggctcagatcgaccaatatgtggggttggtgaccaatcagttgagccacatcaaagctaagatccgagctaaaatcccagggaccggagccctggcctctgcagcagccgcagtctccggatccaaagccaaagccgaatgagaacggtgtctctgcccgcaggacgcctgcccccagcccccgcagccctctggccccctccatctcttgtccgttcccacccacccccctcctcggcccgagccttttcccggtgggtgtcaggatcactcccactagggactctgcgctaattacctgagcgaccaggactacatttcccaagaggctctgctccaggagtccaggaaagacgaggcaccttggccgcggggcctgctgggacttgtagttgcctagacagggcaccaccctgcacttccggacccgccgctggaggcgccgtgaggcgttggtgtctcctggatgctactagccccaacgccggggctttgcatggggcccaggggaggcctgagcttggatttacactgtaataaagactcctgtggaaaacccga

SEQ ID NO: 175224 - DNA, 2063 bp, Homo sapiens
  Payload ID: 14411
  Gene Symbol: RTN2
  Gene Name: reticulon 2
  Uniprot ID: O75298
  ENST ID: ENST00000344680
  CDS Start-End: 231-1649
cgcgcgctgcagtgccttccccacctcggccccgcccgcccccgccgagccgagcaccagggcggcggcggcggcggcggcggcggcggcggctggagcagcccgggaggaggaggcggcgagaatggcagcggcgtcgtgggcgcggcggagatgagcgcccgcgaccccgggcccagggcggcacagccggagtgggcgggggtcccgatgcaggcccgaggggggccatggggcaggtcctgccggtcttcgcccactgcaaagaagctccgtctacagcctcctcaactcctgattccacagaaggagggaacgacgactctgattttcgagagctgcacacagcccgggaattctcagaggaggacgaggaggagaccacgtcgcaggactggggcaccccccgggagctgaccttctcctacatcgcctttgatggtgtagtgggctccgggggccgcagggattcaactgcccgccgcccccgcccccagggccgctcagtctcggaaccacgagaccagcaccctcagcccagcctgggcgacagcttggagagcatccccagcctgagccaatccccggagcctggacgacggggtgatcctgacaccgcgcctccatccgagcgccctctggaagacctgaggcttcggttggaccatctgggctgggtggcccggggaacgggatccggggaggactcttccaccagcagctccaccccgctggaagacgaagaaccccaagaacccaacagattggagacaggagaagctggggaagaactggacctacgactccgacttgctcagccctcatcgcccgaggtcttgactccccagctcagtccgggctctgggacaccccaggccggtactccgtccccatcccgatcgcgagattcgaactctgggcccgaagagccattgctggaagaggaagaaaagcagtgggggccactggagcgagagccagtaaggggacagtgcctcgatagcacggaccaattagaattcacggtggagccacgccttctagtggcggacctgctgtactggaaggacacgaggacgtcaggagtggtcttcacaggcctgatggtctccctcctctgcctcctgcactttagcatcgtgtccgtggccgcgcacttggctctgttgctgctctgcggcaccatctctctcagggtttaccgcaaagtgctgcaggccgtgcaccggggggatggagccaaccctttccaggcctacctggatgtggacctcaccctgactcgggagcagacggaacgtttgtcccaccagatcacctcccgcgtggtctcggcggccacgcagctgcggcacttcttcctggtagaagacctcgtggattccctcaagctggccctcctcttctacatcttgaccttcgtgggtgccatcttcaatggtttgactcttctcattctgggagtgattggtctattcaccatccccctgctgtaccggcagcaccaggctcagatcgaccaatatgtggggttggtgaccaatcagttgagccacatcaaagctaagatccgagctaaaatcccagggaccggagccctggcctctgcagcagccgcagtctccggatccaaagccaaagccgaatgagaacggtgtctctgcccgcaggacgcctgcccccagcccccgcagccctctggccccctccatctcttgtccgttcccacccacccccctcctcggcccgagccttttcccggtgggtgtcaggatcactcccactagggactctgcgctaattacctgagcgaccaggactacatttcccaagaggctctgctccaggagtccaggaaagacgaggcaccttggccgcggggcctgctgggacttgtagttgcctagacagggcaccaccctgcacttccggacccgccgctggaggcgccgtgaggcgttggtgtctcctggatgctactagccccaacgccggggctttgcatggggcccaggggaggcctgagcttggatttacactgtaataaagactcctgtggaaaa

SEQ ID NO: 175225 - DNA, 1127 bp, Homo sapiens
  Payload ID: 14411
  Gene Symbol: RTN2
  Gene Name: reticulon 2
  Uniprot ID: O75298
  ENST ID: ENST00000430715
  CDS Start-End: 96-713
gccccaccccccctactcctgtcctccgggttctactgaagtgggcaaaatccccgagaagcagcggtgtccccagcctctcactcggagccgatatggggagtaaagtggcggacctgctgtactggaaggacacgaggacgtcaggagtggtcttcacaggcctgatggtctccctcctctgcctcctgcactttagcatcgtgtccgtggccgcgcacttggctctgttgctgctctgcggcaccatctctctcagggtttaccgcaaagtgctgcaggccgtgcaccggggggatggagccaaccctttccaggcctacctggatgtggacctcaccctgactcgggagcagacggaacgtttgtcccaccagatcacctcccgcgtggtctcggcggccacgcagctgcggcacttcttcctggtagaagacctcgtggattccctcaagctggccctcctcttctacatcttgaccttcgtgggtgccatcttcaatggtttgactcttctcattctgggagtgattggtctattcaccatccccctgctgtaccggcagcaccaggctcagatcgaccaatatgtggggttggtgaccaatcagttgagccacatcaaagctaagatccgagctaaaatcccagggaccggagccctggcctctgcagcagccgcagtctccggatccaaagccaaagccgaatgagaacggtgtctctgcccgcaggacgcctgcccccagcccccgcagccctctggccccctccatctcttgtccgttcccacccacccccctcctcggcccgagccttttcccggtgggtgtcaggatcactcccactagggactctgcgctaattacctgagcgaccaggactacatttcccaagaggctctgctccaggagtccaggaaagacgaggcaccttggccgcggggcctgctgggacttgtagttgcctagacagggcaccaccctgcacttccggacccgccgctggaggcgccgtgaggcgttggtgtctcctggatgctactagccccaacgccggggctttgcatggggcccaggggaggcctgagcttggatttacactgtaataaagactcctgtggaaaa

SEQ ID NO: 175226 - DNA, 2357 bp, Homo sapiens
  Payload ID: 14411
  Gene Symbol: RTN2
  Gene Name: reticulon 2
  ENST ID: ENST00000590526
  CDS Start-End: 1128-1943
cgcgcgctgcagtgccttccccacctcggccccgcccgcccccgccgagccgagcaccagggcggcggcggcggcggcggcggcggcggcggctggagcagcccgggaggaggaggcggcgagaatggcagcggcgtcgtgggcgcggcggagatgagcgcccgcgaccccgggcccagggcggcacagccggagtgggcgggggtcccgatgcaggcccgaggggggccatggggcaggtcctgccggtcttcgcccactgcaattccaggactgggacacttctgtgattcggacagtctaagcttctaagagtcttcgattctttccctctcgcagaagaagctccgtctacagcctcctcaactcctgattccacagaaggagggaacgacgactctgattttcgagagctgcacacagcccgggaattctcagaggaggacgaggaggagaccacgtcgcaggactggggcaccccccgggagctgaccttctcctacatcgcctttgatggtgtagtgggctccgggggccgcagggattcaactgcccgccgcccccgcccccagggccgctcagtctcggaaccacgagaccagcaccctcagcccagcctgggcgacagcttggagagcatccccagcctgagccaatccccggagcctggacgacggggtgatcctgacaccgcgcctccatccgagcgccctctggaagacctgaggcttcggttggaccatctgggctgggtggcccggggaacgggatccggggaggactcttccaccagcagctccaccccgctggaagacgaagaaccccaagaacccaacagattggagacaggagaagctggggaagaactggacctacgactccgacttgctcagccctcatcgcccgaggtcttgactccccagctcagtccgggctctgggacaccccaggccggtactccgtccccatcccgatcgcgagattcgaactctgggcccgaagagccattgctggaagaggaagaaaagcagtgggggccactggagcgagagccagtaaggggacagtgcctcgatagcacggaccaattagaattcacggtggagccacgccttctaggaacagctatggaatggttaaagacatcattgcttttggctgtttacaagacggttccaattttggaattgtccccacctctgtggacagccattggctgggtccaaaggggccccaccccccctactcctgtcctccgggttctactgaagtgggcaaaatccccgagaagcagcggtgtccccagcctctcactcggagccgatatggggagtaaagtggcggacctgctgtactggaaggacacgaggacgtcaggagtggtcttcacaggcctgatggtctccctcctctgcctcctgcactttagcatcgtgtccgtggccgcgcacttggctctgttgctgctctgcggcaccatctctctcagggtttaccgcaaagtgctgcaggccgtgcaccggggggatggagccaaccctttccaggcctacctggatgtggacctcaccctgactcgggagcagacggaacgtttgtcccaccagatcacctcccgcgtggtctcggcggccacgcagctgcggcacttcttcctggtagaagacctcgtggattccctcaagctggccctcctcttctacatcttgaccttcgtgggtgccatcttcaatggtttgactcttctcattctgggagtgattggtctattcaccatccccctgctgtaccggcagcaccaggctcagatcgaccaatatgtggggttggtgaccaatcagttgagccacatcaaagctaagatccgagctaaaatcccagggaccggagccctggcctctgcagcagccgcagtctccggatccaaagccaaagccgaatgagaacggtgtctctgcccgcaggacgcctgcccccagcccccgcagccctctggccccctccatctcttgtccgttcccacccacccccctcctcggcccgagccttttcccggtgggtgtcaggatcactcccactagggactctgcgctaattacctgagcgaccaggactacatttcccaagaggctctgctccaggagtccaggaaagacgaggcaccttggccgcggggcctgctgggacttgtagttgcctagacagggcaccaccctgcacttccggacccgccgctggaggcgccgtgaggcgttggtgtctcctggatgctactagccccaacgccggggctttgcatggggcccaggggaggcctgagcttggatttacactgtaataaagactcctgtggaaaa

SEQ ID NO: 175227 - DNA, 2111 bp, Homo sapiens
  Payload ID: 14411
  Gene Symbol: RTN2
  Gene Name: reticulon 2
  ENST ID: ENST00000591286
  CDS Start-End: 231-1061
cgcgcgctgcagtgccttccccacctcggccccgcccgcccccgccgagccgagcaccagggcggcggcggcggcggcggcggcggcggcggctggagcagcccgggaggaggaggcggcgagaatggcagcggcgtcgtgggcgcggcggagatgagcgcccgcgaccccgggcccagggcggcacagccggagtgggcgggggtcccgatgcaggcccgaggggggccatggggcaggtcctgccggtcttcgcccactgcaaagaagctccgtctacagcctcctcaactcctgattccacagaaggagggaacgacgactctgattttcgagagctgcacacagcccgggaattctcagaggaggacgaggaggagaccacgtcgcaggactggggcaccccccgggagctgaccttctcctacatcgcctttgatggtgtagtgggctccgggggccgcagggattcaactgcccgccgcccccgcccccagggccgctcagtctcggaaccacgagaccagcaccctcagcccagcctgggcgacagcttggagagcatccccagcctgagccaatccccggagcctggacgacggggtgatcctgacaccgcgcctccatccgagcgccctctggaagacctgaggcttcggttggaccatctgggctgggtggcccggggaacgggatccggggaggactcttccaccagcagctccaccccgctggaagacgaagaaccccaagaacccaacagattggagacaggagaagctggggaagaactggacctacgactccgacttgctcagccctcatcgcccgaggtcttgactccccagctcagtccgggctctgggacaccccaggccggtactccgtccccatcccgatcgcgagattcgaactctgggcccgaagagccattgctggaagaggaagaaaagcagtgggggccactggagcgagagccagtaaggggacagtgcctcgatagcacggaccaattagaattcacggtggagccacgccttctaggtaagcaacgtgtatgaagatgctgcattggcccacagaaggcaaaagtggcggacctgctgtactggaaggacacgaggacgtcaggagtggtcttcacaggcctgatggtctccctcctctgcctcctgcactttagcatcgtgtccgtggccgcgcacttggctctgttgctgctctgcggcaccatctctctcagggtttaccgcaaagtgctgcaggccgtgcaccggggggatggagccaaccctttccaggcctacctggatgtggacctcaccctgactcgggagcagacggaacgtttgtcccaccagatcacctcccgcgtggtctcggcggccacgcagctgcggcacttcttcctggtagaagacctcgtggattccctcaagctggccctcctcttctacatcttgaccttcgtgggtgccatcttcaatggtttgactcttctcattctgggagtgattggtctattcaccatccccctgctgtaccggcagcaccaggctcagatcgaccaatatgtggggttggtgaccaatcagttgagccacatcaaagctaagatccgagctaaaatcccagggaccggagccctggcctctgcagcagccgcagtctccggatccaaagccaaagccgaatgagaacggtgtctctgcccgcaggacgcctgcccccagcccccgcagccctctggccccctccatctcttgtccgttcccacccacccccctcctcggcccgagccttttcccggtgggtgtcaggatcactcccactagggactctgcgctaattacctgagcgaccaggactacatttcccaagaggctctgctccaggagtccaggaaagacgaggcaccttggccgcggggcctgctgggacttgtagttgcctagacagggcaccaccctgcacttccggacccgccgctggaggcgccgtgaggcgttggtgtctcctggatgctactagccccaacgccggggctttgcatggggcccaggggaggcctgagcttggatttacactgtaataaagactcctgtggaaaa

SEQ ID NO: 175228 - DNA, 2212 bp, Homo sapiens
  Payload ID: 14411
  Gene Symbol: RTN2
  Gene Name: reticulon 2
  ENST ID: ENST00000587597
  CDS Start-End: 231-1616
cgcgcgctgcagtgccttccccacctcggccccgcccgcccccgccgagccgagcaccagggcggcggcggcggcggcggcggcggcggcggctggagcagcccgggaggaggaggcggcgagaatggcagcggcgtcgtgggcgcggcggagatgagcgcccgcgaccccgggcccagggcggcacagccggagtgggcgggggtcccgatgcaggcccgaggggggccatggggcaggtcctgccggtcttcgcccactgcaaagaagctccgtctacagcctcctcaactcctgattccacagaaggagggaacgacgactctgattttcgagagctgcacacagcccgggaattctcagaggaggacgaggaggagaccacgtcgcaggactggggcaccccccgggagctgaccttctcctacatcgcctttgatggtgtagtgggctccgggggccgcagggattcaactgcccgccgcccccgcccccagggccgctcagtctcggaaccacgagaccagcaccctcagcccagcctgggcgacagcttggagagcatccccagcctgagccaatccccggagcctggacgacggggtgatcctgacaccgcgcctccatccgagcgccctctggaagacctgaggcttcggttggaccatctgggctgggtggcccggggaacgggatccggggaggactcttccaccagcagctccaccccgctggaagacgaagaaccccaagaacccaacagattggagacaggagaagctggggaagaactggacctacgactccgacttgctcagccctcatcgcccgaggtcttgactccccagctcagtccgggctctgggacaccccaggccggtactccgtccccatcccgatcgcgagattcgaactctgggcccgaagagccattgctggaagaggaagaaaagcagtgggggccactggagcgagagccagtaaggggacagtgcctcgatagcacggaccaattagaattcacggtggagccacgccttctaggaacagctatggaatggttaaagacatcattgcttttggctgtttacaagacggttccaattttggaattgtccccacctctgtggacagccattggctgggtccaaaggggccccaccccccctactcctgtcctccgggttctactgaagtgggcaaaatccccgagaagcagcggtgtccccagcctctcactcggagccgatatggggagtaaagtggcggacctgctgtactggaaggacacgaggacgtcaggagtggtcttcacaggcctgatggtctccctcctctgcctcctgcactttagcatcgtgtccgtggccgcgcacttggctctgttgctgctctgcggcaccatctctctcagggtttaccgcaaagtgctgcaggccgtgcaccggggggatggagccaaccctttccaggcctacctggatgtggacctcaccctgactcgggagcagacggaacgtttgtcccaccagatcacctcccgcgtggtctcggcggccacgcagctgcggcacttcttcctggtagaagacctcgtggattccctcaaggagtgattggtctattcaccatccccctgctgtaccggcagcaccaggctcagatcgaccaatatgtggggttggtgaccaatcagttgagccacatcaaagctaagatccgagctaaaatcccagggaccggagccctggcctctgcagcagccgcagtctccggatccaaagccaaagccgaatgagaacggtgtctctgcccgcaggacgcctgcccccagcccccgcagccctctggccccctccatctcttgtccgttcccacccacccccctcctcggcccgagccttttcccggtgggtgtcaggatcactcccactagggactctgcgctaattacctgagcgaccaggactacatttcccaagaggctctgctccaggagtccaggaaagacgaggcaccttggccgcggggcctgctgggacttgtagttgcctagacagggcaccaccctgcacttccggacccgccgctggaggcgccgtgaggcgttggtgtctcctggatgctactagccccaacgccggggctttgcatggggcccaggggaggcctgagcttggatttacactgtaataaagactcctgtggaaaa

SEQ ID NO: 175229 - DNA, 2524 bp, Homo sapiens
  Payload ID: 14412
  Gene Symbol: RTN3
  Gene Name: reticulon 3
  Uniprot ID: O95197
  ENST ID: ENST00000341307
  CDS Start-End: 192-917
gtgcgcatgcgcgctcgcgctcccgccctctagctgcgctcggctgagtcagtcagtctgtcggagtctgtcctcggagcaggcggagtaaagggacttgagcgagccagttgccggattattctatttcccctccctctctcccgccccgtatctcttttcacccttctcccaccctcgctcgcgtagccatggcggagccgtcggcggccactcagtcccattccatctcctcgtcgtccttcggagccgagccgtccgcgcccggcggcggcgggagcccaggagcctgccccgccctggggacgaagagctgcagctcctcctgtgcggtgcacgatctgattttctggagagatgtgaagaagactgggtttgtctttggcaccacgctgatcatgctgctttccctggcagctttcagtgtcatcagtgtggtttcttacctcatcctggctcttctctctgtcaccatcagcttcaggatctacaagtccgtcatccaagctgtacagaagtcagaagaaggccatccattcaaagcctacctggacgtagacattactctgtcctcagaagctttccataattacatgaatgctgccatggtgcacatcaacagggccctgaaactcattattcgtctctttctggtagaagatctggttgactccttgaagctggctgtcttcatgtggctgatgacctatgttggtgctgtttttaacggaatcacccttctaattcttgctgaactgctcattttcagtgtcccgattgtctatgagaagtacaaggatccaagcaaaactccctggaatcgccaaaaaaaaggcagaataagtacatggaaaccagaaatgcaacagttactaaaacaccatttaatagttataacgtcgttacttgtactatgaaggaaaatactcagtgtcagcttgagcctgcattccaagctttttttttaatttggtgttttctcccatcctttccctttaaccctcagtatcaagcacaaaaattgatggactgataaaagaactatcttagaactcagaagaagaaagaatcaaattcataggataagtcaataccttaatggtggtagagcctttacctgtagcttgaaaggggaaagattggaggtaagagagaaaatgaaagaacacctctgggtccttctgtccagttttcagcactagtcttactcagctatccattatagttttgcccttaagaagtcatgattaacttatgaaaaaattatttggggacaggagtgtgataccttccttggtttttttttgcagccctcaaatcctatcttcctgccccacaatgtgagcagctacccctgatactccttttctttaatgatttaactatcaacttgataaataacttataggtgatagtgataattcctgattccaagaatgccatctgataaaaaagaatagaaatggaaagtgggactgagagggagtcagcaggcatgctgcggtggcggtcactccctctgccactatccccagggaaggaaaggctccgccatttgggaaagtggtttctacgtcactggacaccggttctgagcattagtttgagaactcgttcccgaatgtgctttcctccctctcccctgcccacctcaagtttaataaataaggttgtacttttcttactataaaataaatgtctgtaactgctgtgcactgctgtaaacttgttagagaaaaaaataacctgcatgtgggctcctcagttattgagtttttgtgatcctatctcagtctgggggggaacattctcaagaggtgaaatacagaaagcctttttttcttgatcttttcccgagattcaaatctccgattcccatttgggggcaagtttttttcttcaccttcaatatgagaattcagcgaacttgaaagaaaaatcatctgtgagttccttcaggttctcactcatagtcatgatccttcagagggaatatgcactggcgagtttaaagtaagggctatgatatttgatggtcccaaagtacggcagctgcaaaaagtagtggaaggaaattgtctacgtgtcttggaaaaattagttaggaatttggatgggtaaaaggtacccttgccttactccatcttattttcttagccccctttgagtgttttaactggtttcatgtcctagtaggaagtgcattctccatcctcatcctctgccctcccaggaagtcagtgattgtctttttgggcttcccctccaaaggaccttctgcagtggaagtgccacatccagttcttttcttttgttgctgctgtgtttagataattgaagagatctttgtgccacacaggatttttttttttttttaagaaaaacctatagatgaaaaattactaatgaaactgtgtgtacgtgtctgtgcgtgcaacataaaaatacagtagcacctaaggagcttgaatcttggttcctgtaaaatttcaaattgatgtggtattaataaaaaaaaaaaaaa

SEQ ID NO: 175230 - DNA, 4886 bp, Homo sapiens
  Payload ID: 14412
  Gene Symbol: RTN3
  Gene Name: reticulon 3
  Uniprot ID: O95197
  ENST ID: ENST00000339997
  CDS Start-End: 155-3196
gctcggctgagtcagtcagtctgtcggagtctgtcctcggagcaggcggagtaaagggacttgagcgagccagttgccggattattctatttcccctccctctctcccgccccgtatctcttttcacccttctcccaccctcgctcgcgtagccatggcggagccgtcggcggccactcagtcccattccatctcctcgtcgtccttcggagccgagccgtccgcgcccggcggcggcgggagcccaggagcctgccccgccctggggacgaagagctgcagctcctcctgtgcggagggattgagctctctttgctctgatgagccatcttcagaaattatgacttcttcctttctttcatcttctgaaatacataacactggccttacaatactacatggagaaaaaagccatgtgttagggagccagcctattttagccaaagaaggaaaagaccacttggatcttctagatatgaaaaagatggaaaagcctcaggggaccagcaacaacgtatcagactcttcagtttctcttgcagcaggagttcattgtgaccgtccttctattccagccagtttcccagagcatcctgcttttctctcaaagaaaattggtcaagtggaagagcaaatagataaagagaccaagaacccaaatggggtatcaagtagggaggctaaaactgcattggatgctgatgacagattcactttgctgacagcccagaaaccacctactgagtactctaaggtagaaggcatttatacatattctttgtctccatccaaagtttcaggagatgatgttattgaaaaggattcccctgaatcaccatttgaagtaattattgacaaagcagcatttgacaaagaatttaaagactcatataaggagagcacagatgattttggtagctggtctgtgcacactgataaagaatcatccgaagacatttcagagactaatgacaagctttttccactgagaaataaagaggcaggacgttacccaatgtctgcattgctcagtaggcagttttcacacacaaatgcagcactggaagaggtgtccagatgcgtgaatgatatgcataactttactaacgaaatactgacttgggatctggttccccaagtgaaacaacagaccgataaatcttctgactgcatcacaaaaactacaggacttgacatgagtgaatataattcagaaattccagttgtaaatcttaaaactagcactcatcagaaaactcctgtatgttctattgatgggagcactcccatcactaaatcaacaggtgattgggcagaagcatctctccagcaagaaaatgctattactggaaaacctgtacctgactctttgaattccacaaaagaattcagtatcaaaggtgtgcaaggcaatatgcagaaacaggatgacacacttgcagaattacctggatctccacctgagaaatgtgactctttgggttctggagtggccacagtgaaagtggttttacctgatgaccacctgaaagatgaaatggactggcagagctctgcattgggagaaatcacagaagctgatagttctggtgagtctgatgacacagtaatagaggacatcacagcagatacatcatttgaaaataacaaaattcaggctgaaaaacctgtttccattccaagtgctgttgtaaaaacaggtgaaagagaaatcaaagagattcccagttgtgagagagaagaaaaaacatctaaaaactttgaagaattggtcagtgactctgagctgcatcaagatcagcctgatattcttggaaggagtccagctagtgaggcagcatgttcaaaagtacccgatacgaatgtctccttagaagatgtgagtgaagttgctcctgaaaagcctattactactgagaaccccaaacttccttcaacagtgtctccaaatgtttttaatgagacagaattctcattaaatgtgacaacatctgcctatttggagtcattacatgggaaaaatgttaaacatatagatgattcctccccagaggacctgatagcagcctttacagaaaccagagataaaggaatagtagatagtgaaagaaatgcttttaaagcaatatcagagaagatgacagactttaaaacaactcctcctgtagaagtcttacatgaaaatgagtccggtggttctgaaattaaagacattggaagcaaatacagtgaacaaagcaaagaaacaaatggaagtgagcctctaggtgttttccctacccaaggtactccagtagcatctcttgacttagaacaagaacagctcacaattaaggctcttaaagaattaggtgaaagacaggttgagaagtcaacttctgcacagcgtgacgcagaattgccttctgaagaagtactgaagcaaactttcacatttgctccagaatcttggccacagagatcatatgacatcctagaacgtaatgtcaagaatggatctgatcttgggatttcccagaagcccatcactatcagagaaactactagggtagatgctgtttccagccttagcaagactgaattggtaaaaaagcatgtcctagcaagacttctgacagacttctcagtgcacgatctgattttctggagagatgtgaagaagactgggtttgtctttggcaccacgctgatcatgctgctttccctggcagctttcagtgtcatcagtgtggtttcttacctcatcctggctcttctctctgtcaccatcagcttcaggatctacaagtccgtcatccaagctgtacagaagtcagaagaaggccatccattcaaagcctacctggacgtagacattactctgtcctcagaagctttccataattacatgaatgctgccatggtgcacatcaacagggccctgaaactcattattcgtctctttctggtagaagatctggttgactccttgaagctggctgtcttcatgtggctgatgacctatgttggtgctgtttttaacggaatcacccttctaattcttgctgaactgctcattttcagtgtcccgattgtctatgagaagtacaagacccagattgatcactatgttggcatcgcccgagatcagaccaagtcaattgttgaaaagatccaagcaaaactccctggaatcgccaaaaaaaaggcagaataagtacatggaaaccagaaatgcaacagttactaaaacaccatttaatagttataacgtcgttacttgtactatgaaggaaaatactcagtgtcagcttgagcctgcattccaagctttttttttaatttggtgttttctcccatcctttccctttaaccctcagtatcaagcacaaaaattgatggactgataaaagaactatcttagaactcagaagaagaaagaatcaaattcataggataagtcaataccttaatggtggtagagcctttacctgtagcttgaaaggggaaagattggaggtaagagagaaaatgaaagaacacctctgggtccttctgtccagttttcagcactagtcttactcagctatccattatagttttgcccttaagaagtcatgattaacttatgaaaaaattatttggggacaggagtgtgataccttccttggtttttttttgcagccctcaaatcctatcttcctgccccacaatgtgagcagctacccctgatactccttttctttaatgatttaactatcaacttgataaataacttataggtgatagtgataattcctgattccaagaatgccatctgataaaaaagaatagaaatggaaagtgggactgagagggagtcagcaggcatgctgcggtggcggtcactccctctgccactatccccagggaaggaaaggctccgccatttgggaaagtggtttctacgtcactggacaccggttctgagcattagtttgagaactcgttcccgaatgtgctttcctccctctcccctgcccacctcaagtttaataaataaggttgtacttttcttactataaaataaatgtctgtaactgctgtgcactgctgtaaacttgttagagaaaaaaataacctgcatgtgggctcctcagttattgagtttttgtgatcctatctcagtctgggggggaacattctcaagaggtgaaatacagaaagcctttttttcttgatcttttcccgagattcaaatctccgattcccatttgggggcaagtttttttcttcaccttcaatatgagaattcagcgaacttgaaagaaaaatcatctgtgagttccttcaggttctcactcatagtcatgatccttcagagggaatatgcactggcgagtttaaagtaagggctatgatatttgatggtcccaaagtacggcagctgcaaaaagtagtggaaggaaattgtctacgtgtcttggaaaaattagttaggaatttggatgggtaaaaggtacccttgccttactccatcttattttcttagccccctttgagtgttttaactggtttcatgtcctagtaggaagtgcattctccatcctcatcctctgccctcccaggaagtcagtgattgtctttttgggcttcccctccaaaggaccttctgcagtggaagtgccacatccagttcttttcttttgttgctgctgtgtttagataattgaagagatctttgtgccacacaggatttttttttttttttaagaaaaacctatagatgaaaaattactaatgaaactgtgtgtacgtgtctgtgcgtgcaacataaaaatacagtagcacctaaggagcttgaatcttggttcctgtaaaatttcaaattgatgtggtattaataaaaaaaaaaaaaacacaaacaa

SEQ ID NO: 175231 - DNA, 1407 bp, Homo sapiens
  Payload ID: 14412
  Gene Symbol: RTN3
  Gene Name: reticulon 3
  Uniprot ID: O95197
  ENST ID: ENST00000354497
  CDS Start-End: 65-709
ttcccctccctctctcccgccccgtatctcttttcacccttctcccaccctcgctcgcgtagccatggcggagccgtcggcggccactcagtcccattccatctcctcgtcgtccttcggagccgagccgtccgcgcccggcggcggcgggagcccaggagcctgccccgccctggggacgaagagctgcagctcctcctgtgcggtgcacgatctgattttctggagagatgtgaagaagactgggtttgtctttggcaccacgctgatcatgctgctttccctggcagctttcagtgtcatcagtgtggtttcttacctcatcctggctcttctctctgtcaccatcagcttcaggatctacaagtccgtcatccaagctgtacagaagtcagaagaaggccatccattcaaacccagattgatcactatgttggcatcgcccgagatcagaccaagtcaattgttgaaaagatccaagcaaaactccctggaatcgccaaaaaaaaggcagaataagtacatggaaaccagaaatgcaacagttactaaaacaccatttaatagttataacgtcgttacttgtactatgaaggaaaatactcagtgtcagcttgagcctgcattccaagctttttttttaatttggtgttttctcccatcctttccctttaaccctcagtatcaagcacaaaaattgatggactgataaaagaactatcttagaactcagaagaagaaagaatcaaattcataggataagtcaataccttaatggtggtagagcctttacctgtagcttgaaaggggaaagattggaggtaagagagaaaatgaaagaacacctctgggtccttctgtccagttttcagcactagtcttactcagctatccattatagttttgcccttaagaagtcatgattaacttatgaaaaaattatttggggacaggagtgtgataccttccttggtttttttttgcagccctcaaatcctatcttcctgccccacaatgtgagcagctacccctgatactccttttctttaatgatttaactatcaacttgataaataacttataggtgatagtgataattcctgattccaagaatgccatctgataaaaaagaatagaaatggaaagtgggactgagagggagtcagcaggcatgctgcggtggcggtcactccctctgccactatccccagggaaggaaaggctccgccatttgggaaagtggtttctacgtcactggacaccggttctgagcattagtttgagaactcgttcccgaatgtgctttcctccctctcccctgcccacctcaagtttaataaataaggttgtacttttcttactataaaataaatgtctgtaactgctgtgcactgctgtaaacttgtt

SEQ ID NO: 175232 - DNA, 2645 bp, Homo sapiens
  Payload ID: 14412
  Gene Symbol: RTN3
  Gene Name: reticulon 3
  Uniprot ID: O95197
  ENST ID: ENST00000356000
  CDS Start-End: 188-955
gcatgcgcgctcgcgctcccgccctctagctgcgctcggctgagtcagtcagtctgtcggagtctgtcctcggagcaggcggagtaaagggacttgagcgagccagttgccggattattctatttcccctccctctctcccgccccgtatctcttttcacccttctcccaccctcgctcgcgtagccatggcggagccgtcggcggccactcagtcccattccatctcctcgtcgtccttcggagccgagccgtccgcgcccggcggcggcgggagcccaggagcctgccccgccctggggacgaagagctgcagctcctcctgtgcggattcctttgtttcttcctcttcctctcagcctgtatctctattttcgacctcacaagtgcacgatctgattttctggagagatgtgaagaagactgggtttgtctttggcaccacgctgatcatgctgctttccctggcagctttcagtgtcatcagtgtggtttcttacctcatcctggctcttctctctgtcaccatcagcttcaggatctacaagtccgtcatccaagctgtacagaagtcagaagaaggccatccattcaaagcctacctggacgtagacattactctgtcctcagaagctttccataattacatgaatgctgccatggtgcacatcaacagggccctgaaactcattattcgtctctttctggtagaagatctggttgactccttgaagctggctgtcttcatgtggctgatgacctatgttggtgctgtttttaacggaatcacccttctaattcttgctgaactgctcattttcagtgtcccgattgtctatgagaagtacaagacccagattgatcactatgttggcatcgcccgagatcagaccaagtcaattgttgaaaagatccaagcaaaactccctggaatcgccaaaaaaaaggcagaataagtacatggaaaccagaaatgcaacagttactaaaacaccatttaatagttataacgtcgttacttgtactatgaaggaaaatactcagtgtcagcttgagcctgcattccaagctttttttttaatttggtgttttctcccatcctttccctttaaccctcagtatcaagcacaaaaattgatggactgataaaagaactatcttagaactcagaagaagaaagaatcaaattcataggataagtcaataccttaatggtggtagagcctttacctgtagcttgaaaggggaaagattggaggtaagagagaaaatgaaagaacacctctgggtccttctgtccagttttcagcactagtcttactcagctatccattatagttttgcccttaagaagtcatgattaacttatgaaaaaattatttggggacaggagtgtgataccttccttggtttttttttgcagccctcaaatcctatcttcctgccccacaatgtgagcagctacccctgatactccttttctttaatgatttaactatcaacttgataaataacttataggtgatagtgataattcctgattccaagaatgccatctgataaaaaagaatagaaatggaaagtgggactgagagggagtcagcaggcatgctgcggtggcggtcactccctctgccactatccccagggaaggaaaggctccgccatttgggaaagtggtttctacgtcactggacaccggttctgagcattagtttgagaactcgttcccgaatgtgctttcctccctctcccctgcccacctcaagtttaataaataaggttgtacttttcttactataaaataaatgtctgtaactgctgtgcactgctgtaaacttgttagagaaaaaaataacctgcatgtgggctcctcagttattgagtttttgtgatcctatctcagtctgggggggaacattctcaagaggtgaaatacagaaagcctttttttcttgatcttttcccgagattcaaatctccgattcccatttgggggcaagtttttttcttcaccttcaatatgagaattcagcgaacttgaaagaaaaatcatctgtgagttccttcaggttctcactcatagtcatgatccttcagagggaatatgcactggcgagtttaaagtaagggctatgatatttgatggtcccaaagtacggcagctgcaaaaagtagtggaaggaaattgtctacgtgtcttggaaaaattagttaggaatttggatgggtaaaaggtacccttgccttactccatcttattttcttagccccctttgagtgttttaactggtttcatgtcctagtaggaagtgcattctccatcctcatcctctgccctcccaggaagtcagtgattgtctttttgggcttcccctccaaaggaccttctgcagtggaagtgccacatccagttcttttcttttgttgctgctgtgtttagataattgaagagatctttgtgccacacaggatttttttttttttttaagaaaaacctatagatgaaaaattactaatgaaactgtgtgtacgtgtctgtgcgtgcaacataaaaatacagtagcacctaaggagcttgaatcttggttcctgtaaaatttcaaattgatgtggtattaataaaaaaaaaaaaaacacaaacaa

SEQ ID NO: 175233 - DNA, 4937 bp, Homo sapiens
  Payload ID: 14412
  Gene Symbol: RTN3
  Gene Name: reticulon 3
  Uniprot ID: O95197
  ENST ID: ENST00000377819
  CDS Start-End: 155-3253
gctcggctgagtcagtcagtctgtcggagtctgtcctcggagcaggcggagtaaagggacttgagcgagccagttgccggattattctatttcccctccctctctcccgccccgtatctcttttcacccttctcccaccctcgctcgcgtagccatggcggagccgtcggcggccactcagtcccattccatctcctcgtcgtccttcggagccgagccgtccgcgcccggcggcggcgggagcccaggagcctgccccgccctggggacgaagagctgcagctcctcctgtgcggattcctttgtttcttcctcttcctctcagcctgtatctctattttcgacctcacaagagggattgagctctctttgctctgatgagccatcttcagaaattatgacttcttcctttctttcatcttctgaaatacataacactggccttacaatactacatggagaaaaaagccatgtgttagggagccagcctattttagccaaagaaggaaaagaccacttggatcttctagatatgaaaaagatggaaaagcctcaggggaccagcaacaacgtatcagactcttcagtttctcttgcagcaggagttcattgtgaccgtccttctattccagccagtttcccagagcatcctgcttttctctcaaagaaaattggtcaagtggaagagcaaatagataaagagaccaagaacccaaatggggtatcaagtagggaggctaaaactgcattggatgctgatgacagattcactttgctgacagcccagaaaccacctactgagtactctaaggtagaaggcatttatacatattctttgtctccatccaaagtttcaggagatgatgttattgaaaaggattcccctgaatcaccatttgaagtaattattgacaaagcagcatttgacaaagaatttaaagactcatataaggagagcacagatgattttggtagctggtctgtgcacactgataaagaatcatccgaagacatttcagagactaatgacaagctttttccactgagaaataaagaggcaggacgttacccaatgtctgcattgctcagtaggcagttttcacacacaaatgcagcactggaagaggtgtccagatgcgtgaatgatatgcataactttactaacgaaatactgacttgggatctggttccccaagtgaaacaacagaccgataaatcttctgactgcatcacaaaaactacaggacttgacatgagtgaatataattcagaaattccagttgtaaatcttaaaactagcactcatcagaaaactcctgtatgttctattgatgggagcactcccatcactaaatcaacaggtgattgggcagaagcatctctccagcaagaaaatgctattactggaaaacctgtacctgactctttgaattccacaaaagaattcagtatcaaaggtgtgcaaggcaatatgcagaaacaggatgacacacttgcagaattacctggatctccacctgagaaatgtgactctttgggttctggagtggccacagtgaaagtggttttacctgatgaccacctgaaagatgaaatggactggcagagctctgcattgggagaaatcacagaagctgatagttctggtgagtctgatgacacagtaatagaggacatcacagcagatacatcatttgaaaataacaaaattcaggctgaaaaacctgtttccattccaagtgctgttgtaaaaacaggtgaaagagaaatcaaagagattcccagttgtgagagagaagaaaaaacatctaaaaactttgaagaattggtcagtgactctgagctgcatcaagatcagcctgatattcttggaaggagtccagctagtgaggcagcatgttcaaaagtacccgatacgaatgtctccttagaagatgtgagtgaagttgctcctgaaaagcctattactactgagaaccccaaacttccttcaacagtgtctccaaatgtttttaatgagacagaattctcattaaatgtgacaacatctgcctatttggagtcattacatgggaaaaatgttaaacatatagatgattcctccccagaggacctgatagcagcctttacagaaaccagagataaaggaatagtagatagtgaaagaaatgcttttaaagcaatatcagagaagatgacagactttaaaacaactcctcctgtagaagtcttacatgaaaatgagtccggtggttctgaaattaaagacattggaagcaaatacagtgaacaaagcaaagaaacaaatggaagtgagcctctaggtgttttccctacccaaggtactccagtagcatctcttgacttagaacaagaacagctcacaattaaggctcttaaagaattaggtgaaagacaggttgagaagtcaacttctgcacagcgtgacgcagaattgccttctgaagaagtactgaagcaaactttcacatttgctccagaatcttggccacagagatcatatgacatcctagaacgtaatgtcaagaatggatctgatcttgggatttcccagaagcccatcactatcagagaaactactagggtagatgctgtttccagccttagcaagactgaattggtaaaaaagcatgtcctagcaagacttctgacagacttctcagtgcacgatctgattttctggagagatgtgaagaagactgggtttgtctttggcaccacgctgatcatgctgctttccctggcagctttcagtgtcatcagtgtggtttcttacctcatcctggctcttctctctgtcaccatcagcttcaggatctacaagtccgtcatccaagctgtacagaagtcagaagaaggccatccattcaaagcctacctggacgtagacattactctgtcctcagaagctttccataattacatgaatgctgccatggtgcacatcaacagggccctgaaactcattattcgtctctttctggtagaagatctggttgactccttgaagctggctgtcttcatgtggctgatgacctatgttggtgctgtttttaacggaatcacccttctaattcttgctgaactgctcattttcagtgtcccgattgtctatgagaagtacaagacccagattgatcactatgttggcatcgcccgagatcagaccaagtcaattgttgaaaagatccaagcaaaactccctggaatcgccaaaaaaaaggcagaataagtacatggaaaccagaaatgcaacagttactaaaacaccatttaatagttataacgtcgttacttgtactatgaaggaaaatactcagtgtcagcttgagcctgcattccaagctttttttttaatttggtgttttctcccatcctttccctttaaccctcagtatcaagcacaaaaattgatggactgataaaagaactatcttagaactcagaagaagaaagaatcaaattcataggataagtcaataccttaatggtggtagagcctttacctgtagcttgaaaggggaaagattggaggtaagagagaaaatgaaagaacacctctgggtccttctgtccagttttcagcactagtcttactcagctatccattatagttttgcccttaagaagtcatgattaacttatgaaaaaattatttggggacaggagtgtgataccttccttggtttttttttgcagccctcaaatcctatcttcctgccccacaatgtgagcagctacccctgatactccttttctttaatgatttaactatcaacttgataaataacttataggtgatagtgataattcctgattccaagaatgccatctgataaaaaagaatagaaatggaaagtgggactgagagggagtcagcaggcatgctgcggtggcggtcactccctctgccactatccccagggaaggaaaggctccgccatttgggaaagtggtttctacgtcactggacaccggttctgagcattagtttgagaactcgttcccgaatgtgctttcctccctctcccctgcccacctcaagtttaataaataaggttgtacttttcttactataaaataaatgtctgtaactgctgtgcactgctgtaaacttgttagagaaaaaaataacctgcatgtgggctcctcagttattgagtttttgtgatcctatctcagtctgggggggaacattctcaagaggtgaaatacagaaagcctttttttcttgatcttttcccgagattcaaatctccgattcccatttgggggcaagtttttttcttcaccttcaatatgagaattcagcgaacttgaaagaaaaatcatctgtgagttccttcaggttctcactcatagtcatgatccttcagagggaatatgcactggcgagtttaaagtaagggctatgatatttgatggtcccaaagtacggcagctgcaaaaagtagtggaaggaaattgtctacgtgtcttggaaaaattagttaggaatttggatgggtaaaaggtacccttgccttactccatcttattttcttagccccctttgagtgttttaactggtttcatgtcctagtaggaagtgcattctccatcctcatcctctgccctcccaggaagtcagtgattgtctttttgggcttcccctccaaaggaccttctgcagtggaagtgccacatccagttcttttcttttgttgctgctgtgtttagataattgaagagatctttgtgccacacaggatttttttttttttttaagaaaaacctatagatgaaaaattactaatgaaactgtgtgtacgtgtctgtgcgtgcaacataaaaatacagtagcacctaaggagcttgaatcttggttcctgtaaaatttcaaattgatgtggtattaataaaaaaaaaaaaaacac

SEQ ID NO: 175234 - DNA, 735 bp, Homo sapiens
  Payload ID: 14412
  Gene Symbol: RTN3
  Gene Name: reticulon 3
  ENST ID: ENST00000542238
  CDS Start-End: 180-735
gctcgcgctcccgccctctagctgcgctcggctgagtcagtcagtctgtcggagtctgtcctcggagcaggcggagtaaagggacttgagcgagccagttgccggattattctatttcccctccctctctcccgccccgtatctcttttcacccttctcccaccctcgctcgcgtagccatggcggagccgtcggcggccactcagtcccattccatctcctcgtcgtccttcggagccgagccgtccgcgcccggcggcggcgggagcccaggagcctgccccgccctggggacgaagagctgcagctcctcctgtgcggagtccagtctaggatcacactttgtgcctcatcctgtctccttactctcctttaatctgagaattaagattaaaagaatgcacgatctgattttctggagagatgtgaagaagactgggtttgtctttggcaccacgctgatcatgctgctttccctggcagctttcagtgtcatcagtgtggtttcttacctcatcctggctcttctctctgtcaccatcagcttcaggatctacaagtccgtcatccaagctgtacagaagtcagaagaaggccatccattcaaagcctacctggacgtagacattactctgtcctcagaagctttccataattacatgaatgctgccatggtgcacatcaacagggccctgaaactcattattcgtctctttctggtagaagatctggttg

SEQ ID NO: 175235 - DNA, 2532 bp, Homo sapiens
  Payload ID: 14412
  Gene Symbol: RTN3
  Gene Name: reticulon 3
  Uniprot ID: O95197
  ENST ID: ENST00000537981
  CDS Start-End: 138-848
agtctgtcggagtctgtcctcggagcaggcggagtaaagggacttgagcgagccagttgccggattattctatttcccctccctctctcccgccccgtatctcttttcacccttctcccaccctcgctcgcgtagccatggcggagccgtcggcggccactcagtcccattccatctcctcgtcgtccttcggagccgagccgtccgcgcccggcggcggcgggagcccaggagcctgccccgccctggggacgaagagctgcagctcctcctgtgcggtgcacgatctgattttctggagagatgtgaagaagactgggtttgtctttggcaccacgctgatcatgctgctttccctggcagctttcagtgtcatcagtgtggtttcttacctcatcctggctcttctctctgtcaccatcagcttcaggatctacaagtccgtcatccaagctgtacagaagtcagaagaaggccatccattcaaagcctacctggacgtagacattactctgtcctcagaagctttccataattacatgaatgctgccatggtgcacatcaacagggccctgaaactcattattcgtctctttctggtagaagatctggttgactccttgaagctggctgtcttcatgtggctgatgacctatgttggtgctgtttttaacggaatcacccttctaattcttgctgaactgctcattttcagtgtcccgattgtctatgagaagtacaagacccagattgatcactatgttggcatcgcccgagatcagaccaagtcaattgttgaaaagatccaagcaaaactccctggaatcgccaaaaaaaaggcagaataagtacatggaaaccagaaatgcaacagttactaaaacaccatttaatagttataacgtcgttacttgtactatgaaggaaaatactcagtgtcagcttgagcctgcattccaagctttttttttaatttggtgttttctcccatcctttccctttaaccctcagtatcaagcacaaaaattgatggactgataaaagaactatcttagaactcagaagaagaaagaatcaaattcataggataagtcaataccttaatggtggtagagcctttacctgtagcttgaaaggggaaagattggaggtaagagagaaaatgaaagaacacctctgggtccttctgtccagttttcagcactagtcttactcagctatccattatagttttgcccttaagaagtcatgattaacttatgaaaaaattatttggggacaggagtgtgataccttccttggtttttttttgcagccctcaaatcctatcttcctgccccacaatgtgagcagctacccctgatactccttttctttaatgatttaactatcaacttgataaataacttataggtgatagtgataattcctgattccaagaatgccatctgataaaaaagaatagaaatggaaagtgggactgagagggagtcagcaggcatgctgcggtggcggtcactccctctgccactatccccagggaaggaaaggctccgccatttgggaaagtggtttctacgtcactggacaccggttctgagcattagtttgagaactcgttcccgaatgtgctttcctccctctcccctgcccacctcaagtttaataaataaggttgtacttttcttactataaaataaatgtctgtaactgctgtgcactgctgtaaacttgttagagaaaaaaataacctgcatgtgggctcctcagttattgagtttttgtgatcctatctcagtctgggggggaacattctcaagaggtgaaatacagaaagcctttttttcttgatcttttcccgagattcaaatctccgattcccatttgggggcaagtttttttcttcaccttcaatatgagaattcagcgaacttgaaagaaaaatcatctgtgagttccttcaggttctcactcatagtcatgatccttcagagggaatatgcactggcgagtttaaagtaagggctatgatatttgatggtcccaaagtacggcagctgcaaaaagtagtggaaggaaattgtctacgtgtcttggaaaaattagttaggaatttggatgggtaaaaggtacccttgccttactccatcttattttcttagccccctttgagtgttttaactggtttcatgtcctagtaggaagtgcattctccatcctcatcctctgccctcccaggaagtcagtgattgtctttttgggcttcccctccaaaggaccttctgcagtggaagtgccacatccagttcttttcttttgttgctgctgtgtttagataattgaagagatctttgtgccacacaggatttttttttttttttaagaaaaacctatagatgaaaaattactaatgaaactgtgtgtacgtgtctgtgcgtgcaacataaaaatacagtagcacctaaggagcttgaatcttggttcctgtaaaatttcaaattgatgtggtattaataaaaaaaaaaaaaacac

SEQ ID NO: 175236 - DNA, 992 bp, Homo sapiens
  Payload ID: 14412
  Gene Symbol: RTN3
  Gene Name: reticulon 3
  ENST ID: ENST00000536011
  CDS Start-End: 138-509
agtctgtcggagtctgtcctcggagcaggcggagtaaagggacttgagcgagccagttgccggattattctatttcccctccctctctcccgccccgtatctcttttcacccttctcccaccctcgctcgcgtagccatggcggagccgtcggcggccactcagtcccattccatctcctcgtcgtccttcggagccgagccgtccgcgcccggcggcggcgggagcccaggagcctgccccgccctggggacgaagagctgcagctcctcctgtgcggtgcacgatctgattttctggagagatgtgaagaagactgggtttgtctttggcaccacgctgatcatgctgctttccctggcagctttcagtgtcatcagtgtggtttcttacctcatcctggctcttctctctgtcaccatcagcttcaggatctacaagtccgtcatccaagctgtacagaagtcagaagaaggccatccattcaactggctgtcttcatgtggctgatgacctatgttggtgctgtttttaacggaatcacccttctaattcttgctgaactgctcattttcagtgtcccgattgtctatgagaagtacaaggatccaagcaaaactccctggaatcgccaaaaaaaaggcagaataagtacatggaaaccagaaatgcaacagttactaaaacaccatttaatagttataacgtcgttacttgtactatgaaggaaaatactcagtgtcagcttgagcctgcattccaagctttttttttaatttggtgttttctcccatcctttccctttaaccctcagtatcaagcacaaaaattgatggactgataaaagaactatcttagaactcagaagaagaaagaatcaaattcataggataagtcaataccttaatggtggtagagcctttacctgtagcttgaaaggggaaagattggaggtaagagagaaaatgaaagaacacctctgggtccttctgt

SEQ ID NO: 175237 - DNA, 545 bp, Homo sapiens
  Payload ID: 14412
  Gene Symbol: RTN3
  Gene Name: reticulon 3
  ENST ID: ENST00000545432
  CDS Start-End: 138-545
agtctgtcggagtctgtcctcggagcaggcggagtaaagggacttgagcgagccagttgccggattattctatttcccctccctctctcccgccccgtatctcttttcacccttctcccaccctcgctcgcgtagccatggcggagccgtcggcggccactcagtcccattccatctcctcgtcgtccttcggagccgagccgtccgcgcccggcggcggcgggagcccaggagcctgccccgccctggggacgaagagctgcagctcctcctgtgcggattcctttgtttcttcctcttcctctcagcctgtatctctattttcgacctcacaagccagtttcccagagcatcctgcttttctctcaaagaaaattggtcaagtggaagagcaaatagataaagagaccaagaacccaaatggggtatcaagtagggaggctaaaactgcattggatgctgatgacagattcactttgctgacagcccagaaaccacctactgagtactctaaggtagaaggcatttatacatattctttgtct

SEQ ID NO: 175238 - DNA, 529 bp, Homo sapiens
  Payload ID: 14412
  Gene Symbol: RTN3
  Gene Name: reticulon 3
  ENST ID: ENST00000543552
  CDS Start-End: 138-529
agtctgtcggagtctgtcctcggagcaggcggagtaaagggacttgagcgagccagttgccggattattctatttcccctccctctctcccgccccgtatctcttttcacccttctcccaccctcgctcgcgtagccatggcggagccgtcggcggccactcagtcccattccatctcctcgtcgtccttcggagccgagccgtccgcgcccggcggcggcgggagcccaggagcctgccccgccctggggacgaagagctgcagctcctcctgtgcggcaggagttcattgtgaccgtccttctattccagccagtttcccagagcatcctgcttttctctcaaagaaaattggtcaagtggaagagcaaatagataaagagaccaagaacccaaatggggtatcaagtagggaggctaaaactgcattggatgctgatgacagattcactttgctgacagcccagaaaccacctactgagtactctaaggtagaaggcatttatacatattctttgtctccatccaa

SEQ ID NO: 175239 - DNA, 3124 bp, Homo sapiens
  Payload ID: 14412
  Gene Symbol: RTN3
  Gene Name: reticulon 3
  Uniprot ID: O95197
  ENST ID: ENST00000540798
  CDS Start-End: 142-2904
agtcagtctgtcggagtctgtcctcggagcaggcggagtaaagggacttgagcgagccagttgccggattattctatttcccctccctctctcccgccccgtatctcttttcacccttctcccaccctcgctcgcgtagccatggcggagccgtcggcggccactcagtcccattccatctcctcgtcgtccttcggagccgagccgtccgcgcccggcggcggcgggagcccaggagcctgccccgccctggggacgaagagctgcagctcctcctgtgcggccagtttcccagagcatcctgcttttctctcaaagaaaattggtcaagtggaagagcaaatagataaagagaccaagaacccaaatggggtatcaagtagggaggctaaaactgcattggatgctgatgacagattcactttgctgacagcccagaaaccacctactgagtactctaaggtagaaggcatttatacatattctttgtctccatccaaagtttcaggagatgatgttattgaaaaggattcccctgaatcaccatttgaagtaattattgacaaagcagcatttgacaaagaatttaaagactcatataaggagagcacagatgattttggtagctggtctgtgcacactgataaagaatcatccgaagacatttcagagactaatgacaagctttttccactgagaaataaagaggcaggacgttacccaatgtctgcattgctcagtaggcagttttcacacacaaatgcagcactggaagaggtgtccagatgcgtgaatgatatgcataactttactaacgaaatactgacttgggatctggttccccaagtgaaacaacagaccgataaatcttctgactgcatcacaaaaactacaggacttgacatgagtgaatataattcagaaattccagttgtaaatcttaaaactagcactcatcagaaaactcctgtatgttctattgatgggagcactcccatcactaaatcaacaggtgattgggcagaagcatctctccagcaagaaaatgctattactggaaaacctgtacctgactctttgaattccacaaaagaattcagtatcaaaggtgtgcaaggcaatatgcagaaacaggatgacacacttgcagaattacctggatctccacctgagaaatgtgactctttgggttctggagtggccacagtgaaagtggttttacctgatgaccacctgaaagatgaaatggactggcagagctctgcattgggagaaatcacagaagctgatagttctggtgagtctgatgacacagtaatagaggacatcacagcagatacatcatttgaaaataacaaaattcaggctgaaaaacctgtttccattccaagtgctgttgtaaaaacaggtgaaagagaaatcaaagagattcccagttgtgagagagaagaaaaaacatctaaaaactttgaagaattggtcagtgactctgagctgcatcaagatcagcctgatattcttggaaggagtccagctagtgaggcagcatgttcaaaagtacccgatacgaatgtctccttagaagatgtgagtgaagttgctcctgaaaagcctattactactgagaaccccaaacttccttcaacagtgtctccaaatgtttttaatgagacagaattctcattaaatgtgacaacatctgcctatttggagtcattacatgggaaaaatgttaaacatatagatgattcctccccagaggacctgatagcagcctttacagaaaccagagataaaggaatagtagatagtgaaagaaatgcttttaaagcaatatcagagaagatgacagactttaaaacaactcctcctgtagaagtcttacatgaaaatgagtccggtggttctgaaattaaagacattggaagcaaatacagtgaacaaagcaaagaaacaaatggaagtgagcctctaggtgttttccctacccaaggtactccagtagcatctcttgacttagaacaagaacagctcacaattaaggctcttaaagaattaggtgaaagacaggttgagaagtcaacttctgcacagcgtgacgcagaattgccttctgaagaagtactgaagcaaactttcacatttgctccagaatcttggccacagagatcatatgacatcctagaacgtaatgtcaagaatggatctgatcttgggatttcccagaagcccatcactatcagagaaactactagggtagatgctgtttccagccttagcaagactgaattggtaaaaaagcatgtcctagcaagacttctgacagacttctcagtgcacgatctgattttctggagagatgtgaagaagactgggtttgtctttggcaccacgctgatcatgctgctttccctggcagctttcagtgtcatcagtgtggtttcttacctcatcctggctcttctctctgtcaccatcagcttcaggatctacaagtccgtcatccaagctgtacagaagtcagaagaaggccatccattcaaagcctacctggacgtagacattactctgtcctcagaagctttccataattacatgaatgctgccatggtgcacatcaacagggccctgaaactcattattcgtctctttctggtagaagatctggttgactccttgaagctggctgtcttcatgtggctgatgacctatgttggtgctgtttttaacggaatcacccttctaattcttgctgaactgctcattttcagtgtcccgattgtctatgagaagtacaagacccagattgatcactatgttggcatcgcccgagatcagaccaagtcaattgttgaaaagatccaagcaaaactccctggaatcgccaaaaaaaaggcagaataagtacatggaaaccagaaatgcaacagttactaaaacaccatttaatagttataacgtcgttacttgtactatgaaggaaaatactcagtgtcagcttgagcctgcattccaagctttttttttaatttggtgttttctcccatcctttccctttaaccctcagtatcaagcacaaaaattgatggactgataaaagaactatcttagaactcagaagaag

SEQ ID NO: 175240 - DNA, 2333 bp, Homo sapiens
  Payload ID: 14413
  Gene Symbol: RTN4
  Gene Name: reticulon 4
  Uniprot ID: Q9NQC3
  ENST ID: ENST00000317610
  CDS Start-End: 245-1366
gctggcctcactcctagctcatctgggcggcggcggcaagtggggacagggcgggtggcgcatcaccggcgcggaggcaggaggagcagtctcattgttccgggagccgtcaccacagtaggtccctcggctcagtcggcccagcccctctcagtcctccccaacccccacaaccgcccgcggctctgagacgcggccccggcggcggcggcagcagctgcagcatcatctccaccctccagccatggaagacctggaccagtctcctctggtctcgtcctcggacagcccaccccggccgcagcccgcgttcaagtaccagttcgtgagggagcccgaggacgaggaggaagaagaggaggaggaagaggaggacgaggacgaagacctggaggagctggaggtgctggagaggaagcccgccgccgggctgtccgcggccccagtgcccaccgcccctgccgccggcgcgcccctgatggacttcggaaatgacttcgtgccgccggcgccccggggacccctgccggccgctccccccgtcgccccggagcggcagccgtcttgggacccgagcccggtgtcgtcgaccgtgcccgcgccatccccgctgtctgctgccgcagtctcgccctccaagctccctgaggacgacgagcctccggcccggcctccccctcctcccccggccagcgtgagcccccaggcagagcccgtgtggaccccgccagccccggctcccgccgcgcccccctccaccccggccgcgcccaagcgcaggggctcctcgggctcagtggttgttgacctcctgtactggagagacattaagaagactggagtggtgtttggtgccagcctattcctgctgctttcattgacagtattcagcattgtgagcgtaacagcctacattgccttggccctgctctctgtgaccatcagctttaggatatacaagggtgtgatccaagctatccagaaatcagatgaaggccacccattcagggcatatctggaatctgaagttgctatatctgaggagttggttcagaagtacagtaattctgctcttggtcatgtgaactgcacgataaaggaactcaggcgcctcttcttagttgatgatttagttgattctctgaagtttgcagtgttgatgtgggtatttacctatgttggtgccttgtttaatggtctgacactactgattttggctctcatttcactcttcagtgttcctgttatttatgaacggcatcaggcacagatagatcattatctaggacttgcaaataagaatgttaaagatgctatggctaaaatccaagcaaaaatccctggattgaagcgcaaagctgaatgaaaacgcccaaaataattagtaggagttcatctttaaaggggatattcatttgattatacgggggagggtcagggaagaacgaaccttgacgttgcagtgcagtttcacagatcgttgttagatctttatttttagccatgcactgttgtgaggaaaaattacctgtcttgactgccatgtgttcatcatcttaagtattgtaagctgctatgtatggatttaaaccgtaatcatatctttttcctatctatctgaggcactggtggaataaaaaacctgtatattttactttgttgcagatagtcttgccgcatcttggcaagttgcagagatggtggagctagaaaaaaaaaaaaaaaagcccttttcagtttgtgcactgtgtatggtccgtgtagattgatgcagattttctgaaatgaaatgtttgtttagacgagatcataccggtaaagcaggaatgacaaagcttgcttttctggtatgttctaggtgtattgtgacttttactgttatattaattgccaatataagtaaatatagattatatatgtatagtgtttcacaaagcttagacctttaccttccagccaccccacagtgcttgatatttcagagtcagtcattggttatacatgtgtagttccaaagcacataagctagaagaagaaatatttctaggagcactaccatctgttttcaacatgaaatgccacacacatagaactccaacatcaatttcattgcacagactgactgtagttaattttgtcacagaatctatggactgaatctaatgcttccaaaaatgttgtttgtttgcaaatatcaaacattgttatgcaagaaattattaattacaaaatgaagatttataccattgtggtttaagctgtactgaactaaatctgtggaatgcattgtgaactgtaaaagcaaagtatcaataaagcttatagacttaaaa

SEQ ID NO: 175241 - DNA, 4790 bp, Homo sapiens
  Payload ID: 14413
  Gene Symbol: RTN4
  Gene Name: reticulon 4
  Uniprot ID: Q9NQC3
  ENST ID: ENST00000337526
  CDS Start-End: 245-3823
gctggcctcactcctagctcatctgggcggcggcggcaagtggggacagggcgggtggcgcatcaccggcgcggaggcaggaggagcagtctcattgttccgggagccgtcaccacagtaggtccctcggctcagtcggcccagcccctctcagtcctccccaacccccacaaccgcccgcggctctgagacgcggccccggcggcggcggcagcagctgcagcatcatctccaccctccagccatggaagacctggaccagtctcctctggtctcgtcctcggacagcccaccccggccgcagcccgcgttcaagtaccagttcgtgagggagcccgaggacgaggaggaagaagaggaggaggaagaggaggacgaggacgaagacctggaggagctggaggtgctggagaggaagcccgccgccgggctgtccgcggccccagtgcccaccgcccctgccgccggcgcgcccctgatggacttcggaaatgacttcgtgccgccggcgccccggggacccctgccggccgctccccccgtcgccccggagcggcagccgtcttgggacccgagcccggtgtcgtcgaccgtgcccgcgccatccccgctgtctgctgccgcagtctcgccctccaagctccctgaggacgacgagcctccggcccggcctccccctcctcccccggccagcgtgagcccccaggcagagcccgtgtggaccccgccagccccggctcccgccgcgcccccctccaccccggccgcgcccaagcgcaggggctcctcgggctcagtggatgagaccctttttgctcttcctgctgcatctgagcctgtgatacgctcctctgcagaaaatatggacttgaaggagcagccaggtaacactatttcggctggtcaagaggatttcccatctgtcctgcttgaaactgctgcttctcttccttctctgtctcctctctcagccgcttctttcaaagaacatgaataccttggtaatttgtcaacagtattacccactgaaggaacacttcaagaaaatgtcagtgaagcttctaaagaggtctcagagaaggcaaaaactctactcatagatagagatttaacagagttttcagaattagaatactcagaaatgggatcatcgttcagtgtctctccaaaagcagaatctgccgtaatagtagcaaatcctagggaagaaataatcgtgaaaaataaagatgaagaagagaagttagttagtaataacatccttcataatcaacaagagttacctacagctcttactaaattggttaaagaggatgaagttgtgtcttcagaaaaagcaaaagacagttttaatgaaaagagagttgcagtggaagctcctatgagggaggaatatgcagacttcaaaccatttgagcgagtatgggaagtgaaagatagtaaggaagatagtgatatgttggctgctggaggtaaaatcgagagcaacttggaaagtaaagtggataaaaaatgttttgcagatagccttgagcaaactaatcacgaaaaagatagtgagagtagtaatgatgatacttctttccccagtacgccagaaggtataaaggatcgttcaggagcatatatcacatgtgctccctttaacccagcagcaactgagagcattgcaacaaacatttttcctttgttaggagatcctacttcagaaaataagaccgatgaaaaaaaaatagaagaaaagaaggcccaaatagtaacagagaagaatactagcaccaaaacatcaaacccttttcttgtagcagcacaggattctgagacagattatgtcacaacagataatttaacaaaggtgactgaggaagtcgtggcaaacatgcctgaaggcctgactccagatttagtacaggaagcatgtgaaagtgaattgaatgaagttactggtacaaagattgcttatgaaacaaaaatggacttggttcaaacatcagaagttatgcaagagtcactctatcctgcagcacagctttgcccatcatttgaagagtcagaagctactccttcaccagttttgcctgacattgttatggaagcaccattgaattctgcagttcctagtgctggtgcttccgtgatacagcccagctcatcaccattagaagcttcttcagttaattatgaaagcataaaacatgagcctgaaaaccccccaccatatgaagaggccatgagtgtatcactaaaaaaagtatcaggaataaaggaagaaattaaagagcctgaaaatattaatgcagctcttcaagaaacagaagctccttatatatctattgcatgtgatttaattaaagaaacaaagctttctgctgaaccagctccggatttctctgattattcagaaatggcaaaagttgaacagccagtgcctgatcattctgagctagttgaagattcctcacctgattctgaaccagttgacttatttagtgatgattcaatacctgacgttccacaaaaacaagatgaaactgtgatgcttgtgaaagaaagtctcactgagacttcatttgagtcaatgatagaatatgaaaataaggaaaaactcagtgctttgccacctgagggaggaaagccatatttggaatcttttaagctcagtttagataacacaaaagataccctgttacctgatgaagtttcaacattgagcaaaaaggagaaaattcctttgcagatggaggagctcagtactgcagtttattcaaatgatgacttatttatttctaaggaagcacagataagagaaactgaaacgttttcagattcatctccaattgaaattatagatgagttccctacattgatcagttctaaaactgattcattttctaaattagccagggaatatactgacctagaagtatcccacaaaagtgaaattgctaatgccccggatggagctgggtcattgccttgcacagaattgccccatgacctttctttgaagaacatacaacccaaagttgaagagaaaatcagtttctcagatgacttttctaaaaatgggtctgctacatcaaaggtgctcttattgcctccagatgtttctgctttggccactcaagcagagatagagagcatagttaaacccaaagttcttgtgaaagaagctgagaaaaaacttccttccgatacagaaaaagaggacagatcaccatctgctatattttcagcagagctgagtaaaacttcagttgttgacctcctgtactggagagacattaagaagactggagtggtgtttggtgccagcctattcctgctgctttcattgacagtattcagcattgtgagcgtaacagcctacattgccttggccctgctctctgtgaccatcagctttaggatatacaagggtgtgatccaagctatccagaaatcagatgaaggccacccattcagggcatatctggaatctgaagttgctatatctgaggagttggttcagaagtacagtaattctgctcttggtcatgtgaactgcacgataaaggaactcaggcgcctcttcttagttgatgatttagttgattctctgaagtttgcagtgttgatgtgggtatttacctatgttggtgccttgtttaatggtctgacactactgattttggctctcatttcactcttcagtgttcctgttatttatgaacggcatcaggcacagatagatcattatctaggacttgcaaataagaatgttaaagatgctatggctaaaatccaagcaaaaatccctggattgaagcgcaaagctgaatgaaaacgcccaaaataattagtaggagttcatctttaaaggggatattcatttgattatacgggggagggtcagggaagaacgaaccttgacgttgcagtgcagtttcacagatcgttgttagatctttatttttagccatgcactgttgtgaggaaaaattacctgtcttgactgccatgtgttcatcatcttaagtattgtaagctgctatgtatggatttaaaccgtaatcatatctttttcctatctatctgaggcactggtggaataaaaaacctgtatattttactttgttgcagatagtcttgccgcatcttggcaagttgcagagatggtggagctagaaaaaaaaaaaaaaaagcccttttcagtttgtgcactgtgtatggtccgtgtagattgatgcagattttctgaaatgaaatgtttgtttagacgagatcataccggtaaagcaggaatgacaaagcttgcttttctggtatgttctaggtgtattgtgacttttactgttatattaattgccaatataagtaaatatagattatatatgtatagtgtttcacaaagcttagacctttaccttccagccaccccacagtgcttgatatttcagagtcagtcattggttatacatgtgtagttccaaagcacataagctagaagaagaaatatttctaggagcactaccatctgttttcaacatgaaatgccacacacatagaactccaacatcaatttcattgcacagactgactgtagttaattttgtcacagaatctatggactgaatctaatgcttccaaaaatgttgtttgtttgcaaatatcaaacattgttatgcaagaaattattaattacaaaatgaagatttataccattgtggtttaagctgtactgaactaaatctgtggaatgcattgtgaactgtaaaagcaaagtatcaataaagcttatagacttaaaa

SEQ ID NO: 175242 - DNA, 4110 bp, Homo sapiens
  Payload ID: 14413
  Gene Symbol: RTN4
  Gene Name: reticulon 4
  Uniprot ID: Q9NQC3
  ENST ID: ENST00000357376
  CDS Start-End: 183-3143
ctcctcctgtgctcgtggggagctggccgagtggaaaacgtccacattgacccaaccgcagtgaagggagagcgcctccagtggtgtggtgcgtggagaaatgggaaggagagagttctgatgagaccctttttgctcttcctgctgcatctgagcctgtgatacgctcctctgcagaaaatatggacttgaaggagcagccaggtaacactatttcggctggtcaagaggatttcccatctgtcctgcttgaaactgctgcttctcttccttctctgtctcctctctcagccgcttctttcaaagaacatgaataccttggtaatttgtcaacagtattacccactgaaggaacacttcaagaaaatgtcagtgaagcttctaaagaggtctcagagaaggcaaaaactctactcatagatagagatttaacagagttttcagaattagaatactcagaaatgggatcatcgttcagtgtctctccaaaagcagaatctgccgtaatagtagcaaatcctagggaagaaataatcgtgaaaaataaagatgaagaagagaagttagttagtaataacatccttcataatcaacaagagttacctacagctcttactaaattggttaaagaggatgaagttgtgtcttcagaaaaagcaaaagacagttttaatgaaaagagagttgcagtggaagctcctatgagggaggaatatgcagacttcaaaccatttgagcgagtatgggaagtgaaagatagtaaggaagatagtgatatgttggctgctggaggtaaaatcgagagcaacttggaaagtaaagtggataaaaaatgttttgcagatagccttgagcaaactaatcacgaaaaagatagtgagagtagtaatgatgatacttctttccccagtacgccagaaggtataaaggatcgttcaggagcatatatcacatgtgctccctttaacccagcagcaactgagagcattgcaacaaacatttttcctttgttaggagatcctacttcagaaaataagaccgatgaaaaaaaaatagaagaaaagaaggcccaaatagtaacagagaagaatactagcaccaaaacatcaaacccttttcttgtagcagcacaggattctgagacagattatgtcacaacagataatttaacaaaggtgactgaggaagtcgtggcaaacatgcctgaaggcctgactccagatttagtacaggaagcatgtgaaagtgaattgaatgaagttactggtacaaagattgcttatgaaacaaaaatggacttggttcaaacatcagaagttatgcaagagtcactctatcctgcagcacagctttgcccatcatttgaagagtcagaagctactccttcaccagttttgcctgacattgttatggaagcaccattgaattctgcagttcctagtgctggtgcttccgtgatacagcccagctcatcaccattagaagcttcttcagttaattatgaaagcataaaacatgagcctgaaaaccccccaccatatgaagaggccatgagtgtatcactaaaaaaagtatcaggaataaaggaagaaattaaagagcctgaaaatattaatgcagctcttcaagaaacagaagctccttatatatctattgcatgtgatttaattaaagaaacaaagctttctgctgaaccagctccggatttctctgattattcagaaatggcaaaagttgaacagccagtgcctgatcattctgagctagttgaagattcctcacctgattctgaaccagttgacttatttagtgatgattcaatacctgacgttccacaaaaacaagatgaaactgtgatgcttgtgaaagaaagtctcactgagacttcatttgagtcaatgatagaatatgaaaataaggaaaaactcagtgctttgccacctgagggaggaaagccatatttggaatcttttaagctcagtttagataacacaaaagataccctgttacctgatgaagtttcaacattgagcaaaaaggagaaaattcctttgcagatggaggagctcagtactgcagtttattcaaatgatgacttatttatttctaaggaagcacagataagagaaactgaaacgttttcagattcatctccaattgaaattatagatgagttccctacattgatcagttctaaaactgattcattttctaaattagccagggaatatactgacctagaagtatcccacaaaagtgaaattgctaatgccccggatggagctgggtcattgccttgcacagaattgccccatgacctttctttgaagaacatacaacccaaagttgaagagaaaatcagtttctcagatgacttttctaaaaatgggtctgctacatcaaaggtgctcttattgcctccagatgtttctgctttggccactcaagcagagatagagagcatagttaaacccaaagttcttgtgaaagaagctgagaaaaaacttccttccgatacagaaaaagaggacagatcaccatctgctatattttcagcagagctgagtaaaacttcagttgttgacctcctgtactggagagacattaagaagactggagtggtgtttggtgccagcctattcctgctgctttcattgacagtattcagcattgtgagcgtaacagcctacattgccttggccctgctctctgtgaccatcagctttaggatatacaagggtgtgatccaagctatccagaaatcagatgaaggccacccattcagggcatatctggaatctgaagttgctatatctgaggagttggttcagaagtacagtaattctgctcttggtcatgtgaactgcacgataaaggaactcaggcgcctcttcttagttgatgatttagttgattctctgaagtttgcagtgttgatgtgggtatttacctatgttggtgccttgtttaatggtctgacactactgattttggctctcatttcactcttcagtgttcctgttatttatgaacggcatcaggcacagatagatcattatctaggacttgcaaataagaatgttaaagatgctatggctaaaatccaagcaaaaatccctggattgaagcgcaaagctgaatgaaaacgcccaaaataattagtaggagttcatctttaaaggggatattcatttgattatacgggggagggtcagggaagaacgaaccttgacgttgcagtgcagtttcacagatcgttgttagatctttatttttagccatgcactgttgtgaggaaaaattacctgtcttgactgccatgtgttcatcatcttaagtattgtaagctgctatgtatggatttaaaccgtaatcatatctttttcctatctatctgaggcactggtggaataaaaaacctgtatattttactttgttgcagatagtcttgccgcatcttggcaagttgcagagatggtggagctagaaaaaaaaaaaaaaaagcccttttcagtttgtgcactgtgtatggtccgtgtagattgatgcagattttctgaaatgaaatgtttgtttagacgagatcataccggtaaagcaggaatgacaaagcttgcttttctggtatgttctaggtgtattgtgacttttactgttatattaattgccaatataagtaaatatagattatatatgtatagtgtttcacaaagcttagacctttaccttccagccaccccacagtgcttgatatttcagagtcagtcattggttatacatgtgtagttccaaagcacataagctagaagaagaaatatttctaggagcactaccatctgttttcaacatgaaatgccacacacatagaactccaacatcaatttcattgcacagactgactgtagttaattttgtcacagaatctatggactgaatctaatgcttccaaaaatgttgtttgtttgcaaatatcaaacattgttatgcaagaaattattaattacaaaatgaagatttataccattgtggtttaagctgtactgaactaaatctgtggaatgcattgtgaactgtaaaagcaaagtatcaataaagcttatagacttaaaa

SEQ ID NO: 175243 - DNA, 2390 bp, Homo sapiens
  Payload ID: 14413
  Gene Symbol: RTN4
  Gene Name: reticulon 4
  Uniprot ID: Q9NQC3
  ENST ID: ENST00000357732
  CDS Start-End: 245-1423
gctggcctcactcctagctcatctgggcggcggcggcaagtggggacagggcgggtggcgcatcaccggcgcggaggcaggaggagcagtctcattgttccgggagccgtcaccacagtaggtccctcggctcagtcggcccagcccctctcagtcctccccaacccccacaaccgcccgcggctctgagacgcggccccggcggcggcggcagcagctgcagcatcatctccaccctccagccatggaagacctggaccagtctcctctggtctcgtcctcggacagcccaccccggccgcagcccgcgttcaagtaccagttcgtgagggagcccgaggacgaggaggaagaagaggaggaggaagaggaggacgaggacgaagacctggaggagctggaggtgctggagaggaagcccgccgccgggctgtccgcggccccagtgcccaccgcccctgccgccggcgcgcccctgatggacttcggaaatgacttcgtgccgccggcgccccggggacccctgccggccgctccccccgtcgccccggagcggcagccgtcttgggacccgagcccggtgtcgtcgaccgtgcccgcgccatccccgctgtctgctgccgcagtctcgccctccaagctccctgaggacgacgagcctccggcccggcctccccctcctcccccggccagcgtgagcccccaggcagagcccgtgtggaccccgccagccccggctcccgccgcgcccccctccaccccggccgcgcccaagcgcaggggctcctcgggctcagtggatgagaccctttttgctcttcctgctgcatctgagcctgtgatacgctcctctgcagttgttgacctcctgtactggagagacattaagaagactggagtggtgtttggtgccagcctattcctgctgctttcattgacagtattcagcattgtgagcgtaacagcctacattgccttggccctgctctctgtgaccatcagctttaggatatacaagggtgtgatccaagctatccagaaatcagatgaaggccacccattcagggcatatctggaatctgaagttgctatatctgaggagttggttcagaagtacagtaattctgctcttggtcatgtgaactgcacgataaaggaactcaggcgcctcttcttagttgatgatttagttgattctctgaagtttgcagtgttgatgtgggtatttacctatgttggtgccttgtttaatggtctgacactactgattttggctctcatttcactcttcagtgttcctgttatttatgaacggcatcaggcacagatagatcattatctaggacttgcaaataagaatgttaaagatgctatggctaaaatccaagcaaaaatccctggattgaagcgcaaagctgaatgaaaacgcccaaaataattagtaggagttcatctttaaaggggatattcatttgattatacgggggagggtcagggaagaacgaaccttgacgttgcagtgcagtttcacagatcgttgttagatctttatttttagccatgcactgttgtgaggaaaaattacctgtcttgactgccatgtgttcatcatcttaagtattgtaagctgctatgtatggatttaaaccgtaatcatatctttttcctatctatctgaggcactggtggaataaaaaacctgtatattttactttgttgcagatagtcttgccgcatcttggcaagttgcagagatggtggagctagaaaaaaaaaaaaaaaagcccttttcagtttgtgcactgtgtatggtccgtgtagattgatgcagattttctgaaatgaaatgtttgtttagacgagatcataccggtaaagcaggaatgacaaagcttgcttttctggtatgttctaggtgtattgtgacttttactgttatattaattgccaatataagtaaatatagattatatatgtatagtgtttcacaaagcttagacctttaccttccagccaccccacagtgcttgatatttcagagtcagtcattggttatacatgtgtagttccaaagcacataagctagaagaagaaatatttctaggagcactaccatctgttttcaacatgaaatgccacacacatagaactccaacatcaatttcattgcacagactgactgtagttaattttgtcacagaatctatggactgaatctaatgcttccaaaaatgttgtttgtttgcaaatatcaaacattgttatgcaagaaattattaattacaaaatgaagatttataccattgtggtttaagctgtactgaactaaatctgtggaatgcattgtgaactgtaaaagcaaagtatcaataaagcttatagacttaaaa

SEQ ID NO: 175244 - DNA, 1898 bp, Homo sapiens
  Payload ID: 14413
  Gene Symbol: RTN4
  Gene Name: reticulon 4
  Uniprot ID: Q9NQC3
  ENST ID: ENST00000394609
  CDS Start-End: 330-929
tcttttggtagcctgccctctccctgcaaatgcagctccatttggtatgagcaacaaggcaaatgcctaaaacaatcaacagatagaaggaaagcattaatgctggagtattagtagcctagttacagattgcactgcgtcagactgttccacacccagaagacgtcaggtgacttcagtcctgctgcagttgtgcagcagaggagactgcagacttcggttgaggaaacgggtatttcatgtctcagggagtaggtttgtgcagttacagcttttctgttggtatgcataattaataattggagctgcaaagcagatcgtgacaagagatggacggtcagaagaaaaattggaaggacaaggttgttgacctcctgtactggagagacattaagaagactggagtggtgtttggtgccagcctattcctgctgctttcattgacagtattcagcattgtgagcgtaacagcctacattgccttggccctgctctctgtgaccatcagctttaggatatacaagggtgtgatccaagctatccagaaatcagatgaaggccacccattcagggcatatctggaatctgaagttgctatatctgaggagttggttcagaagtacagtaattctgctcttggtcatgtgaactgcacgataaaggaactcaggcgcctcttcttagttgatgatttagttgattctctgaagtttgcagtgttgatgtgggtatttacctatgttggtgccttgtttaatggtctgacactactgattttggctctcatttcactcttcagtgttcctgttatttatgaacggcatcaggcacagatagatcattatctaggacttgcaaataagaatgttaaagatgctatggctaaaatccaagcaaaaatccctggattgaagcgcaaagctgaatgaaaacgcccaaaataattagtaggagttcatctttaaaggggatattcatttgattatacgggggagggtcagggaagaacgaaccttgacgttgcagtgcagtttcacagatcgttgttagatctttatttttagccatgcactgttgtgaggaaaaattacctgtcttgactgccatgtgttcatcatcttaagtattgtaagctgctatgtatggatttaaaccgtaatcatatctttttcctatctatctgaggcactggtggaataaaaaacctgtatattttactttgttgcagatagtcttgccgcatcttggcaagttgcagagatggtggagctagaaaaaaaaaaaaaaaagcccttttcagtttgtgcactgtgtatggtccgtgtagattgatgcagattttctgaaatgaaatgtttgtttagacgagatcataccggtaaagcaggaatgacaaagcttgcttttctggtatgttctaggtgtattgtgacttttactgttatattaattgccaatataagtaaatatagattatatatgtatagtgtttcacaaagcttagacctttaccttccagccaccccacagtgcttgatatttcagagtcagtcattggttatacatgtgtagttccaaagcacataagctagaagaagaaatatttctaggagcactaccatctgttttcaacatgaaatgccacacacatagaactccaacatcaatttcattgcacagactgactgtagttaattttgtcacagaatctatggactgaatctaatgcttccaaaaatgttgtttgtttgcaaatatcaaacattgttatgcaagaaattattaattacaaaatgaagatttataccattgtggtttaagctgtactgaactaaatctgtggaatgcattgtgaactgtaaaagcaaagtatcaataaagcttatagacttaaaata

SEQ ID NO: 175245 - DNA, 4161 bp, Homo sapiens
  Payload ID: 14413
  Gene Symbol: RTN4
  Gene Name: reticulon 4
  Uniprot ID: Q9NQC3
  ENST ID: ENST00000394611
  CDS Start-End: 234-3194
agtccctgccctcccctggggagggtgagtcacgccaaactgggcggagagtccgctggcctcactcctagctcatctgggcggcggcggcaagtggggacagggcgggtggcgcatcaccggcgcggaggcaggaggagcagtctcattgttccgggagccgtcaccacaatgagaccctttttgctcttcctgctgcatctgagcctgtgatacgctcctctgcagaaaatatggacttgaaggagcagccaggtaacactatttcggctggtcaagaggatttcccatctgtcctgcttgaaactgctgcttctcttccttctctgtctcctctctcagccgcttctttcaaagaacatgaataccttggtaatttgtcaacagtattacccactgaaggaacacttcaagaaaatgtcagtgaagcttctaaagaggtctcagagaaggcaaaaactctactcatagatagagatttaacagagttttcagaattagaatactcagaaatgggatcatcgttcagtgtctctccaaaagcagaatctgccgtaatagtagcaaatcctagggaagaaataatcgtgaaaaataaagatgaagaagagaagttagttagtaataacatccttcataatcaacaagagttacctacagctcttactaaattggttaaagaggatgaagttgtgtcttcagaaaaagcaaaagacagttttaatgaaaagagagttgcagtggaagctcctatgagggaggaatatgcagacttcaaaccatttgagcgagtatgggaagtgaaagatagtaaggaagatagtgatatgttggctgctggaggtaaaatcgagagcaacttggaaagtaaagtggataaaaaatgttttgcagatagccttgagcaaactaatcacgaaaaagatagtgagagtagtaatgatgatacttctttccccagtacgccagaaggtataaaggatcgttcaggagcatatatcacatgtgctccctttaacccagcagcaactgagagcattgcaacaaacatttttcctttgttaggagatcctacttcagaaaataagaccgatgaaaaaaaaatagaagaaaagaaggcccaaatagtaacagagaagaatactagcaccaaaacatcaaacccttttcttgtagcagcacaggattctgagacagattatgtcacaacagataatttaacaaaggtgactgaggaagtcgtggcaaacatgcctgaaggcctgactccagatttagtacaggaagcatgtgaaagtgaattgaatgaagttactggtacaaagattgcttatgaaacaaaaatggacttggttcaaacatcagaagttatgcaagagtcactctatcctgcagcacagctttgcccatcatttgaagagtcagaagctactccttcaccagttttgcctgacattgttatggaagcaccattgaattctgcagttcctagtgctggtgcttccgtgatacagcccagctcatcaccattagaagcttcttcagttaattatgaaagcataaaacatgagcctgaaaaccccccaccatatgaagaggccatgagtgtatcactaaaaaaagtatcaggaataaaggaagaaattaaagagcctgaaaatattaatgcagctcttcaagaaacagaagctccttatatatctattgcatgtgatttaattaaagaaacaaagctttctgctgaaccagctccggatttctctgattattcagaaatggcaaaagttgaacagccagtgcctgatcattctgagctagttgaagattcctcacctgattctgaaccagttgacttatttagtgatgattcaatacctgacgttccacaaaaacaagatgaaactgtgatgcttgtgaaagaaagtctcactgagacttcatttgagtcaatgatagaatatgaaaataaggaaaaactcagtgctttgccacctgagggaggaaagccatatttggaatcttttaagctcagtttagataacacaaaagataccctgttacctgatgaagtttcaacattgagcaaaaaggagaaaattcctttgcagatggaggagctcagtactgcagtttattcaaatgatgacttatttatttctaaggaagcacagataagagaaactgaaacgttttcagattcatctccaattgaaattatagatgagttccctacattgatcagttctaaaactgattcattttctaaattagccagggaatatactgacctagaagtatcccacaaaagtgaaattgctaatgccccggatggagctgggtcattgccttgcacagaattgccccatgacctttctttgaagaacatacaacccaaagttgaagagaaaatcagtttctcagatgacttttctaaaaatgggtctgctacatcaaaggtgctcttattgcctccagatgtttctgctttggccactcaagcagagatagagagcatagttaaacccaaagttcttgtgaaagaagctgagaaaaaacttccttccgatacagaaaaagaggacagatcaccatctgctatattttcagcagagctgagtaaaacttcagttgttgacctcctgtactggagagacattaagaagactggagtggtgtttggtgccagcctattcctgctgctttcattgacagtattcagcattgtgagcgtaacagcctacattgccttggccctgctctctgtgaccatcagctttaggatatacaagggtgtgatccaagctatccagaaatcagatgaaggccacccattcagggcatatctggaatctgaagttgctatatctgaggagttggttcagaagtacagtaattctgctcttggtcatgtgaactgcacgataaaggaactcaggcgcctcttcttagttgatgatttagttgattctctgaagtttgcagtgttgatgtgggtatttacctatgttggtgccttgtttaatggtctgacactactgattttggctctcatttcactcttcagtgttcctgttatttatgaacggcatcaggcacagatagatcattatctaggacttgcaaataagaatgttaaagatgctatggctaaaatccaagcaaaaatccctggattgaagcgcaaagctgaatgaaaacgcccaaaataattagtaggagttcatctttaaaggggatattcatttgattatacgggggagggtcagggaagaacgaaccttgacgttgcagtgcagtttcacagatcgttgttagatctttatttttagccatgcactgttgtgaggaaaaattacctgtcttgactgccatgtgttcatcatcttaagtattgtaagctgctatgtatggatttaaaccgtaatcatatctttttcctatctatctgaggcactggtggaataaaaaacctgtatattttactttgttgcagatagtcttgccgcatcttggcaagttgcagagatggtggagctagaaaaaaaaaaaaaaaagcccttttcagtttgtgcactgtgtatggtccgtgtagattgatgcagattttctgaaatgaaatgtttgtttagacgagatcataccggtaaagcaggaatgacaaagcttgcttttctggtatgttctaggtgtattgtgacttttactgttatattaattgccaatataagtaaatatagattatatatgtatagtgtttcacaaagcttagacctttaccttccagccaccccacagtgcttgatatttcagagtcagtcattggttatacatgtgtagttccaaagcacataagctagaagaagaaatatttctaggagcactaccatctgttttcaacatgaaatgccacacacatagaactccaacatcaatttcattgcacagactgactgtagttaattttgtcacagaatctatggactgaatctaatgcttccaaaaatgttgtttgtttgcaaatatcaaacattgttatgcaagaaattattaattacaaaatgaagatttataccattgtggtttaagctgtactgaactaaatctgtggaatgcattgtgaactgtaaaagcaaagtatcaataaagcttatagacttaaaa

SEQ ID NO: 175246 - DNA, 4061 bp, Homo sapiens
  Payload ID: 14413
  Gene Symbol: RTN4
  Gene Name: reticulon 4
  Uniprot ID: Q9NQC3
  ENST ID: ENST00000405240
  CDS Start-End: 134-3094
aatattgcctgttctacagagttccctaattccatattgatgatacctattgggaaactttagtttttttaatgagaccctttttgctcttcctgctgcatctgagcctgtgatacgctcctctgcagaaaatatggacttgaaggagcagccaggtaacactatttcggctggtcaagaggatttcccatctgtcctgcttgaaactgctgcttctcttccttctctgtctcctctctcagccgcttctttcaaagaacatgaataccttggtaatttgtcaacagtattacccactgaaggaacacttcaagaaaatgtcagtgaagcttctaaagaggtctcagagaaggcaaaaactctactcatagatagagatttaacagagttttcagaattagaatactcagaaatgggatcatcgttcagtgtctctccaaaagcagaatctgccgtaatagtagcaaatcctagggaagaaataatcgtgaaaaataaagatgaagaagagaagttagttagtaataacatccttcataatcaacaagagttacctacagctcttactaaattggttaaagaggatgaagttgtgtcttcagaaaaagcaaaagacagttttaatgaaaagagagttgcagtggaagctcctatgagggaggaatatgcagacttcaaaccatttgagcgagtatgggaagtgaaagatagtaaggaagatagtgatatgttggctgctggaggtaaaatcgagagcaacttggaaagtaaagtggataaaaaatgttttgcagatagccttgagcaaactaatcacgaaaaagatagtgagagtagtaatgatgatacttctttccccagtacgccagaaggtataaaggatcgttcaggagcatatatcacatgtgctccctttaacccagcagcaactgagagcattgcaacaaacatttttcctttgttaggagatcctacttcagaaaataagaccgatgaaaaaaaaatagaagaaaagaaggcccaaatagtaacagagaagaatactagcaccaaaacatcaaacccttttcttgtagcagcacaggattctgagacagattatgtcacaacagataatttaacaaaggtgactgaggaagtcgtggcaaacatgcctgaaggcctgactccagatttagtacaggaagcatgtgaaagtgaattgaatgaagttactggtacaaagattgcttatgaaacaaaaatggacttggttcaaacatcagaagttatgcaagagtcactctatcctgcagcacagctttgcccatcatttgaagagtcagaagctactccttcaccagttttgcctgacattgttatggaagcaccattgaattctgcagttcctagtgctggtgcttccgtgatacagcccagctcatcaccattagaagcttcttcagttaattatgaaagcataaaacatgagcctgaaaaccccccaccatatgaagaggccatgagtgtatcactaaaaaaagtatcaggaataaaggaagaaattaaagagcctgaaaatattaatgcagctcttcaagaaacagaagctccttatatatctattgcatgtgatttaattaaagaaacaaagctttctgctgaaccagctccggatttctctgattattcagaaatggcaaaagttgaacagccagtgcctgatcattctgagctagttgaagattcctcacctgattctgaaccagttgacttatttagtgatgattcaatacctgacgttccacaaaaacaagatgaaactgtgatgcttgtgaaagaaagtctcactgagacttcatttgagtcaatgatagaatatgaaaataaggaaaaactcagtgctttgccacctgagggaggaaagccatatttggaatcttttaagctcagtttagataacacaaaagataccctgttacctgatgaagtttcaacattgagcaaaaaggagaaaattcctttgcagatggaggagctcagtactgcagtttattcaaatgatgacttatttatttctaaggaagcacagataagagaaactgaaacgttttcagattcatctccaattgaaattatagatgagttccctacattgatcagttctaaaactgattcattttctaaattagccagggaatatactgacctagaagtatcccacaaaagtgaaattgctaatgccccggatggagctgggtcattgccttgcacagaattgccccatgacctttctttgaagaacatacaacccaaagttgaagagaaaatcagtttctcagatgacttttctaaaaatgggtctgctacatcaaaggtgctcttattgcctccagatgtttctgctttggccactcaagcagagatagagagcatagttaaacccaaagttcttgtgaaagaagctgagaaaaaacttccttccgatacagaaaaagaggacagatcaccatctgctatattttcagcagagctgagtaaaacttcagttgttgacctcctgtactggagagacattaagaagactggagtggtgtttggtgccagcctattcctgctgctttcattgacagtattcagcattgtgagcgtaacagcctacattgccttggccctgctctctgtgaccatcagctttaggatatacaagggtgtgatccaagctatccagaaatcagatgaaggccacccattcagggcatatctggaatctgaagttgctatatctgaggagttggttcagaagtacagtaattctgctcttggtcatgtgaactgcacgataaaggaactcaggcgcctcttcttagttgatgatttagttgattctctgaagtttgcagtgttgatgtgggtatttacctatgttggtgccttgtttaatggtctgacactactgattttggctctcatttcactcttcagtgttcctgttatttatgaacggcatcaggcacagatagatcattatctaggacttgcaaataagaatgttaaagatgctatggctaaaatccaagcaaaaatccctggattgaagcgcaaagctgaatgaaaacgcccaaaataattagtaggagttcatctttaaaggggatattcatttgattatacgggggagggtcagggaagaacgaaccttgacgttgcagtgcagtttcacagatcgttgttagatctttatttttagccatgcactgttgtgaggaaaaattacctgtcttgactgccatgtgttcatcatcttaagtattgtaagctgctatgtatggatttaaaccgtaatcatatctttttcctatctatctgaggcactggtggaataaaaaacctgtatattttactttgttgcagatagtcttgccgcatcttggcaagttgcagagatggtggagctagaaaaaaaaaaaaaaaagcccttttcagtttgtgcactgtgtatggtccgtgtagattgatgcagattttctgaaatgaaatgtttgtttagacgagatcataccggtaaagcaggaatgacaaagcttgcttttctggtatgttctaggtgtattgtgacttttactgttatattaattgccaatataagtaaatatagattatatatgtatagtgtttcacaaagcttagacctttaccttccagccaccccacagtgcttgatatttcagagtcagtcattggttatacatgtgtagttccaaagcacataagctagaagaagaaatatttctaggagcactaccatctgttttcaacatgaaatgccacacacatagaactccaacatcaatttcattgcacagactgactgtagttaattttgtcacagaatctatggactgaatctaatgcttccaaaaatgttgtttgtttgcaaatatcaaacattgttatgcaagaaattattaattacaaaatgaagatttataccattgtggtttaagctgtactgaactaaatctgtggaatgcattgtgaactgtaaaagcaaagtatcaataaagcttatagacttaaaa

SEQ ID NO: 175247 - DNA, 1456 bp, Homo sapiens
  Payload ID: 14413
  Gene Symbol: RTN4
  Gene Name: reticulon 4
  ENST ID: ENST00000402434
  CDS Start-End: 77-1114
cacaaccgcccgcggctctgagacgcggccccggcggcggcggcagcagctgcagcatcatctccaccctccagccatggagcccgaggacgaggaggaagaagaggaggaggaagaggaggacgaggacgaagacctggaggagctggaggtgctggagaggaagcccgccgccgggctgtccgcggccccagtgcccaccgcccctgccgccggcgcgcccctgatggacttcggaaatgacttcgtgccgccggcgccccggggacccctgccggccgctccccccgtcgccccggagcggcagccgtcttgggacccgagcccggtgtcgtcgaccgtgcccgcgccatccccgctgtctgctgccgcagtctcgccctccaagctccctgaggacgacgagcctccggcccggcctccccctcctcccccggccagcgtgagcccccaggcagagcccgtgtggaccccgccagccccggctcccgccgcgcccccctccaccccggccgcgcccaagcgcaggggctcctcgggctcagtggttgttgacctcctgtactggagagacattaagaagactggagtggtgtttggtgccagcctattcctgctgctttcattgacagtattcagcattgtgagcgtaacagcctacattgccttggccctgctctctgtgaccatcagctttaggatatacaagggtgtgatccaagctatccagaaatcagatgaaggccacccattcagggcatatctggaatctgaagttgctatatctgaggagttggttcagaagtacagtaattctgctcttggtcatgtgaactgcacgataaaggaactcaggcgcctcttcttagttgatgatttagttgattctctgaagtttgcagtgttgatgtgggtatttacctatgttggtgccttgtttaatggtctgacactactgattttggctctcatttcactcttcagtgttcctgttatttatgaacggcatcaggcacagatagatcattatctaggacttgcaaataagaatgttaaagatgctatggctaaaatccaagcaaaaatccctggattgaagcgcaaagctgaatgaaaacgcccaaaataattagtaggagttcatctttaaaggggatattcatttgattatacgggggagggtcagggaagaacgaaccttgacgttgcagtgcagtttcacagatcgttgttagatctttatttttagccatgcactgttgtgaggaaaaattacctgtcttgactgccatgtgttcatcatcttaagtattgtaagctgctatgtatggatttaaaccgtaatcatatctttttcctatctatctgaggcactggtggaataaaaaacctgtatattttactttgttgcagatagtcttgccgcatcttggcaagttgcagagatggtggagct

SEQ ID NO: 175248 - DNA, 4102 bp, Homo sapiens
  Payload ID: 14413
  Gene Symbol: RTN4
  Gene Name: reticulon 4
  Uniprot ID: Q9NQC3
  ENST ID: ENST00000404909
  CDS Start-End: 175-3135
atacggacgccagctgcgggcaaggccaagaccccaccccaactcacggttacccaaagtgggggtggagctcccagctctcagccccgcccattgaacgcaatcccagccgatgagaccctttttgctcttcctgctgcatctgagcctgtgatacgctcctctgcagaaaatatggacttgaaggagcagccaggtaacactatttcggctggtcaagaggatttcccatctgtcctgcttgaaactgctgcttctcttccttctctgtctcctctctcagccgcttctttcaaagaacatgaataccttggtaatttgtcaacagtattacccactgaaggaacacttcaagaaaatgtcagtgaagcttctaaagaggtctcagagaaggcaaaaactctactcatagatagagatttaacagagttttcagaattagaatactcagaaatgggatcatcgttcagtgtctctccaaaagcagaatctgccgtaatagtagcaaatcctagggaagaaataatcgtgaaaaataaagatgaagaagagaagttagttagtaataacatccttcataatcaacaagagttacctacagctcttactaaattggttaaagaggatgaagttgtgtcttcagaaaaagcaaaagacagttttaatgaaaagagagttgcagtggaagctcctatgagggaggaatatgcagacttcaaaccatttgagcgagtatgggaagtgaaagatagtaaggaagatagtgatatgttggctgctggaggtaaaatcgagagcaacttggaaagtaaagtggataaaaaatgttttgcagatagccttgagcaaactaatcacgaaaaagatagtgagagtagtaatgatgatacttctttccccagtacgccagaaggtataaaggatcgttcaggagcatatatcacatgtgctccctttaacccagcagcaactgagagcattgcaacaaacatttttcctttgttaggagatcctacttcagaaaataagaccgatgaaaaaaaaatagaagaaaagaaggcccaaatagtaacagagaagaatactagcaccaaaacatcaaacccttttcttgtagcagcacaggattctgagacagattatgtcacaacagataatttaacaaaggtgactgaggaagtcgtggcaaacatgcctgaaggcctgactccagatttagtacaggaagcatgtgaaagtgaattgaatgaagttactggtacaaagattgcttatgaaacaaaaatggacttggttcaaacatcagaagttatgcaagagtcactctatcctgcagcacagctttgcccatcatttgaagagtcagaagctactccttcaccagttttgcctgacattgttatggaagcaccattgaattctgcagttcctagtgctggtgcttccgtgatacagcccagctcatcaccattagaagcttcttcagttaattatgaaagcataaaacatgagcctgaaaaccccccaccatatgaagaggccatgagtgtatcactaaaaaaagtatcaggaataaaggaagaaattaaagagcctgaaaatattaatgcagctcttcaagaaacagaagctccttatatatctattgcatgtgatttaattaaagaaacaaagctttctgctgaaccagctccggatttctctgattattcagaaatggcaaaagttgaacagccagtgcctgatcattctgagctagttgaagattcctcacctgattctgaaccagttgacttatttagtgatgattcaatacctgacgttccacaaaaacaagatgaaactgtgatgcttgtgaaagaaagtctcactgagacttcatttgagtcaatgatagaatatgaaaataaggaaaaactcagtgctttgccacctgagggaggaaagccatatttggaatcttttaagctcagtttagataacacaaaagataccctgttacctgatgaagtttcaacattgagcaaaaaggagaaaattcctttgcagatggaggagctcagtactgcagtttattcaaatgatgacttatttatttctaaggaagcacagataagagaaactgaaacgttttcagattcatctccaattgaaattatagatgagttccctacattgatcagttctaaaactgattcattttctaaattagccagggaatatactgacctagaagtatcccacaaaagtgaaattgctaatgccccggatggagctgggtcattgccttgcacagaattgccccatgacctttctttgaagaacatacaacccaaagttgaagagaaaatcagtttctcagatgacttttctaaaaatgggtctgctacatcaaaggtgctcttattgcctccagatgtttctgctttggccactcaagcagagatagagagcatagttaaacccaaagttcttgtgaaagaagctgagaaaaaacttccttccgatacagaaaaagaggacagatcaccatctgctatattttcagcagagctgagtaaaacttcagttgttgacctcctgtactggagagacattaagaagactggagtggtgtttggtgccagcctattcctgctgctttcattgacagtattcagcattgtgagcgtaacagcctacattgccttggccctgctctctgtgaccatcagctttaggatatacaagggtgtgatccaagctatccagaaatcagatgaaggccacccattcagggcatatctggaatctgaagttgctatatctgaggagttggttcagaagtacagtaattctgctcttggtcatgtgaactgcacgataaaggaactcaggcgcctcttcttagttgatgatttagttgattctctgaagtttgcagtgttgatgtgggtatttacctatgttggtgccttgtttaatggtctgacactactgattttggctctcatttcactcttcagtgttcctgttatttatgaacggcatcaggcacagatagatcattatctaggacttgcaaataagaatgttaaagatgctatggctaaaatccaagcaaaaatccctggattgaagcgcaaagctgaatgaaaacgcccaaaataattagtaggagttcatctttaaaggggatattcatttgattatacgggggagggtcagggaagaacgaaccttgacgttgcagtgcagtttcacagatcgttgttagatctttatttttagccatgcactgttgtgaggaaaaattacctgtcttgactgccatgtgttcatcatcttaagtattgtaagctgctatgtatggatttaaaccgtaatcatatctttttcctatctatctgaggcactggtggaataaaaaacctgtatattttactttgttgcagatagtcttgccgcatcttggcaagttgcagagatggtggagctagaaaaaaaaaaaaaaaagcccttttcagtttgtgcactgtgtatggtccgtgtagattgatgcagattttctgaaatgaaatgtttgtttagacgagatcataccggtaaagcaggaatgacaaagcttgcttttctggtatgttctaggtgtattgtgacttttactgttatattaattgccaatataagtaaatatagattatatatgtatagtgtttcacaaagcttagacctttaccttccagccaccccacagtgcttgatatttcagagtcagtcattggttatacatgtgtagttccaaagcacataagctagaagaagaaatatttctaggagcactaccatctgttttcaacatgaaatgccacacacatagaactccaacatcaatttcattgcacagactgactgtagttaattttgtcacagaatctatggactgaatctaatgcttccaaaaatgttgtttgtttgcaaatatcaaacattgttatgcaagaaattattaattacaaaatgaagatttataccattgtggtttaagctgtactgaactaaatctgtggaatgcattgtgaactgtaaaagcaaagtatcaataaagcttatagacttaaaa

SEQ ID NO: 175249 - DNA, 656 bp, Homo sapiens
  Payload ID: 14413
  Gene Symbol: RTN4
  Gene Name: reticulon 4
  ENST ID: ENST00000438462
  CDS Start-End: 1-610
gctttgtctgcggacttcggggcgatggcgccccgtctggttggaagcgcggggagaagggtggggcggcccttggagcccggttgttgacctcctgtactggagagacattaagaagactggagtggtgtttggtgccagcctattcctgctgctttcattgacagtattcagcattgtgagcgtaacagcctacattgccttggccctgctctctgtgaccatcagctttaggatatacaagggtgtgatccaagctatccagaaatcagatgaaggccacccattcagggcatatctggaatctgaagttgctatatctgaggagttggttcagaagtacagtaattctgctcttggtcatgtgaactgcacgataaaggaactcaggcgcctcttcttagttgatgatttagttgattctctgaagtttgcagtgttgatgtgggtatttacctatgttggtgccttgtttaatggtctgacactactgattttggctctcatttcactcttcagtgttcctgttatttatgaacggcatcaggcacagatagatcattatctaggacttgcaaataagaatgttaaagatgctatggctaagtaagtatttaaaatctgcagtgtttttactaggataaggtgtgctggat

SEQ ID NO: 175250 - DNA, 589 bp, Homo sapiens
  Payload ID: 14413
  Gene Symbol: RTN4
  Gene Name: reticulon 4
  ENST ID: ENST00000427710
  CDS Start-End: 316-589
agggcctctgaggactgctgcagacacagctgaggcagcccggctccaggctcgctggaggggctgtgtctggggagatgcttctctataaaaagcttagagagagttgtcatcgaaaataacaagactattctggatatgagtaacactgaggaataagatactaagccattaaagaagggtataaaaattatgtctgacacaggatatggagagaaatatgatgaagatgaaatatgacaacagaatcaagatgagaccctttttgctcttcctgctgcatctgagcctgtgatacgctcctctgcagaaaatatggacttgaaggagcagccaggtaacactatttcggctggtcaagaggatttcccatctgtcctgcttgaaactgctgcttctcttccttctctgtctcctctctcagccgcttctttcaaagaacatgaataccttggtaatttgtcaacagtattacccactgaaggaacacttcaagaaaatgtcagtgaagcttctaaagaggtctcagagaaggcaaaaactctactcatagatagagatttaacagagttttcagaattagaatact

SEQ ID NO: 175251 - DNA, 955 bp, Homo sapiens
  Payload ID: 14413
  Gene Symbol: RTN4
  Gene Name: reticulon 4
  ENST ID: ENST00000486085
  CDS Start-End: 1-384
ctgctgctttcattgacagtattcagcattgtgagcgtaacagcctacattgccttggccctgctctctgtgaccatcagctttaggatatacaagggtgtgatccaagctatccagaaatcagatgaaggccacccattcagggcatatctggaatctgaagttgctatatctgaggagttggttcagaagtacagtaattctgctcttggtcatgtgaactgcacgataaaggaactcaggcgcctcttcttagttgatgatttagttgattctctgaaggcacagatagatcattatctaggacttgcaaataagaatgttaaagatgctatggctaaaatccaagcaaaaatccctggattgaagcgcaaagctgaatgaaaacgcccaaaataattagtaggagttcatctttaaaggggatattcatttgattatacgggggagggtcagggaagaacgaaccttgacgttgcagtgcagtttcacagatcgttgttagatctttatttttagccatgcactgttgtgaggaaaaattacctgtcttgactgccatgtgttcatcatcttaagtattgtaagctgctatgtatggatttaaaccgtaatcatatctttttcctatctatctgaggcactggtggaataaaaaacctgtatattttactttgttgcagatagtcttgccgcatcttggcaagttgcagagatggtggagctagaaaaaaaaaaaaaaaagcccttttcagtttgtgcactgtgtatggtccgtgtagattgatgcagattttctgaaatgaaatgtttgtttagacgagatcataccggtaaagcaggaatgacaaagcttgcttttctggtatgttctaggtgtattgtgacttttactgttatattaattgccaatataagtaaatatagattatatatgtatagtgtttcacaaagc

SEQ ID NO: 175252 - DNA, 1682 bp, Homo sapiens
  Payload ID: 14414
  Gene Symbol: RTN4IP1
  Gene Name: reticulon 4 interacting protein 1
  Uniprot ID: Q8WWV3
  ENST ID: ENST00000369063
  CDS Start-End: 467-1657
ccggcggctaaggagagcgggcaggcaaggagattccgggccagggtcgcggcggcagtcggcaagcgttcgattctctggcgttggatcgcgagcggtgtctgcttgtcccgccgagggctcccaggacagggcagggatctagggggtttgcgcacctgctttttaatgccccgcccccccttttttttttaaagtggagggggtgaaagtgagggaggagaatggacagaatactgactggaacgttaattcgagcatttcatatgcgaagagcggaataacagttccgtattcttctttcagtttctccattagattagcttcattttcgaatgctccgttttgcatgcttaattttgaaactagcccgtggtttggcagaatttgactgaattcaggggtgagagtttgatccagtccaagtgtatttgaatttgagcacgcagttcaaccagtgtttacaatggaatttctgaagacttgtgtacttagaagaaatgcatgcactgcggtttgcttctggagaagcaaagttgtccaaaagccttcagttagaaggattagtactacctctcctaggagcactgtcatgcctgcttgggtgatagataaatatgggaagaatgaagtgcttcgattcactcagaacatgatgatgcctatcatacactatccaaatgaagtcattgtcaaagttcacgctgccagtgtaaatcctatagacgttaatatgagaagtggttatggagctacagctttaaatatgaagcgtgatcctttacacgtgaaaatcaaaggagaagaatttcctctgactctgggtcgggatgtctctggcgtggtgatggaatgtgggcttgatgtgaaatacttcaagcctggagatgaggtctgggctgcagttcctccttggaaacaaggcactctttcagagtttgttgtagtcagtgggaatgaggtctctcacaaacccaaatcactcactcatactcaagctgcctctttgccatatgtggctctcacagcctggtctgctataaacaaagttggtggcctgaatgacaagaattgcacaggaaaacgtgttctaatcttaggcgcttcaggcggagttggtacttttgctatacaggtaatgaaagcatgggatgctcatgtgacagcagtttgctcccaagatgccagtgaacttgtaaggaagcttggtgcagacgatgtaattgattacaaatctggaagtgtggaagagcagttgaaatccttaaaaccatttgattttatccttgataatgttggcggatccactgaaacatgggctccagattttctcaagaaatggtcaggagccacctatgtgactttggtgactcctttcctcctgaacatggaccgattgggcatagcagatggcatgttgcagacaggagtcactgtaggttcaaaggcattaaagcatttctggaaaggagtccattatcgctgggcatttttcatggccagtggcccatgtttagatgacattgcagaactggtggatgcgggaaagatccggccagttattgaacaaacctttcctttttctaaagttccagaagccttcctgaaggtggaaagaggacacgcacgaggaaagactgtaattaatgttgtttaaataaaaatgcagtttagtgattgtt

SEQ ID NO: 175253 - DNA, 814 bp, Homo sapiens
  Payload ID: 14414
  Gene Symbol: RTN4IP1
  Gene Name: reticulon 4 interacting protein 1
  ENST ID: ENST00000539449
  CDS Start-End: 1-681
atggaatttctgaagacttgtgtacttagaagaaatgcatgcactgcggtttgcttctggagaagcaaagttgtccaaaagccttcagttagaaggattagtactacctctcctaggagcactgtcatgcctgcttgggtgatagataaatatgggaagaatgaagtgcttcgattcactcagaacatgatgatgcctatcatacactatccaaatgaagtcattgtcaaagttcacgctgccagtgtaaatcctatagacgttaatatgagaagtggttatggagctacagctttaaatatgaagcgtgatcctttacacgtgaaaatcaaaggagaagaatttcctctgactctgggtcgggatgtctctggcgtggtgatggaatgtgggcttgatgtgaaatacttcaagcctggagatgaggtctgggctgcagttcctccttggaaacaaggcactctttcagagtttgttgtagtcagtgggaatgaggtctctcacaaacccaaatcactcactcatactcaagctgcctctttgccatatgtggctctcacagcctggtctgctataaacaaagttggtggcctgaatgacaagaattgcacaggaaaacgcatttctggaaaggagtccattatcgctgggcatttttcatggccagtggcccatgtttagatgacattgcagaactggtggatgcgggaaagatccggccagttattgaacaaacctttcctttttctaaagttccagaagccttcctgaaggtggaaagaggacacgcacgaggaaagactgtaattaatgt

SEQ ID NO: 175254 - DNA, 2157 bp, Homo sapiens
  Payload ID: 14415
  Gene Symbol: RTN4R
  Gene Name: reticulon 4 receptor
  Uniprot ID: Q9BZR6
  ENST ID: ENST00000043402
  CDS Start-End: 440-1861
ccgggccagcctaggccgccacaccctcgggcccgcgtccccggccggctccggcccgggccgccatcccctccgccgcctgcaggggccgccgcctcttcaggaatgcgccgcctttgtctgggaccgcgcggcgccggtgcaccgggcgggctgagcgcctcctgcggcccggcctgcgcgccccggcccgccgcgccgcccacgccccaacccccgcgccgccgccgccctcgccctgtgcgccctgcgcgccctgcgcacccgcggcccgagcccagccagagccgggcggagcggagcgcgccgagcctcgtcccgcggccgggccggggccgggccgtagcggcggcgcctggatgcggacccggccgcggggagacgggcgcccgccccgaaacgactttcagtccccgacgcgccccgcccaacccctacgatgaagagggcgtccgctggagggagccggctgctggcatgggtgctgtggctgcaggcctggcaggtggcagccccatgcccaggtgcctgcgtatgctacaatgagcccaaggtgacgacaagctgcccccagcagggcctgcaggctgtgcccgtgggcatccctgctgccagccagcgcatcttcctgcacggcaaccgcatctcgcatgtgccagctgccagcttccgtgcctgccgcaacctcaccatcctgtggctgcactcgaatgtgctggcccgaattgatgcggctgccttcactggcctggccctcctggagcagctggacctcagcgataatgcacagctccggtctgtggaccctgccacattccacggcctgggccgcctacacacgctgcacctggaccgctgcggcctgcaggagctgggcccggggctgttccgcggcctggctgccctgcagtacctctacctgcaggacaacgcgctgcaggcactgcctgatgacaccttccgcgacctgggcaacctcacacacctcttcctgcacggcaaccgcatctccagcgtgcccgagcgcgccttccgtgggctgcacagcctcgaccgtctcctactgcaccagaaccgcgtggcccatgtgcacccgcatgccttccgtgaccttggccgcctcatgacactctatctgtttgccaacaatctatcagcgctgcccactgaggccctggcccccctgcgtgccctgcagtacctgaggctcaacgacaacccctgggtgtgtgactgccgggcacgcccactctgggcctggctgcagaagttccgcggctcctcctccgaggtgccctgcagcctcccgcaacgcctggctggccgtgacctcaaacgcctagctgccaatgacctgcagggctgcgctgtggccaccggcccttaccatcccatctggaccggcagggccaccgatgaggagccgctggggcttcccaagtgctgccagccagatgccgctgacaaggcctcagtactggagcctggaagaccagcttcggcaggcaatgcgctgaagggacgcgtgccgcccggtgacagcccgccgggcaacggctctggcccacggcacatcaatgactcaccctttgggactctgcctggctctgctgagcccccgctcactgcagtgcggcccgagggctccgagccaccagggttccccacctcgggccctcgccggaggccaggctgttcacgcaagaaccgcacccgcagccactgccgtctgggccaggcaggcagcgggggtggcgggactggtgactcagaaggctcaggtgccctacccagcctcacctgcagcctcacccccctgggcctggcgctggtgctgtggacagtgcttgggccctgctgacccccagcggacacaagagcgtgctcagcagccaggtgtgtgtacatacggggtctctctccacgccgccaagccagccgggcggccgacccgtggggcaggccaggccaggtcctccctgatggacgcctgccgcccgccacccccatctccaccccatcatgtttacagggttcggcggcagcgtttgttccagaacgccgcctcccacccagatcgcggtatatagagatatgcattttattttacttgtgtaaaaatatcggacgacgtggaataaagagctcttttcttaa

SEQ ID NO: 175255 - DNA, 1777 bp, Homo sapiens
  Payload ID: 14415
  Gene Symbol: RTN4R
  Gene Name: reticulon 4 receptor
  ENST ID: ENST00000416372
  CDS Start-End: 1-1481
ggtaccgagggtgggtgggggtgtcgggccgcctccaccccagcctcacggtctgggctcagaacctcccgtttctccgagggagccggctgctggcatgggtgctgtggctgcaggcctggcaggtggcagccccatgcccaggtgcctgcgtatgctacaatgagcccaaggtgacgacaagctgcccccagcagggcctgcaggctgtgcccgtgggcatccctgctgccagccagcgcatcttcctgcacggcaaccgcatctcgcatgtgccagctgccagcttccgtgcctgccgcaacctcaccatcctgtggctgcactcgaatgtgctggcccgaattgatgcggctgccttcactggcctggccctcctggagcagctggacctcagcgataatgcacagctccggtctgtggaccctgccacattccacggcctgggccgcctacacacgctgcacctggaccgctgcggcctgcaggagctgggcccggggctgttccgcggcctggctgccctgcagtacctctacctgcaggacaacgcgctgcaggcactgcctgatgacaccttccgcgacctgggcaacctcacacacctcttcctgcacggcaaccgcatctccagcgtgcccgagcgcgccttccgtgggctgcacagcctcgaccgtctcctactgcaccagaaccgcgtggcccatgtgcacccgcatgccttccgtgaccttggccgcctcatgacactctatctgtttgccaacaatctatcagcgctgcccactgaggccctggcccccctgcgtgccctgcagtacctgaggctcaacgacaacccctgggtgtgtgactgccgggcacgcccactctgggcctggctgcagaagttccgcggctcctcctccgaggtgccctgcagcctcccgcaacgcctggctggccgtgacctcaaacgcctagctgccaatgacctgcagggctgcgctgtggccaccggcccttaccatcccatctggaccggcagggccaccgatgaggagccgctggggcttcccaagtgctgccagccagatgccgctgacaaggcctcagtactggagcctggaagaccagcttcggcaggcaatgcgctgaagggacgcgtgccgcccggtgacagcccgccgggcaacggctctggcccacggcacatcaatgactcaccctttgggactctgcctggctctgctgagcccccgctcactgcagtgcggcccgagggctccgagccaccagggttccccacctcgggccctcgccggaggccaggctgttcacgcaagaaccgcacccgcagccactgccgtctgggccaggcaggcagcgggggtggcgggactggtgactcagaaggctcaggtgccctacccagcctcacctgcagcctcacccccctgggcctggcgctggtgctgtggacagtgcttgggccctgctgacccccagcggacacaagagcgtgctcagcagccaggtgtgtgtacatacggggtctctctccacgccgccaagccagccgggcggccgacccgtggggcaggccaggccaggtcctccctgatggacgcctgccgcccgccacccccatctccaccccatcatgtttacagggttcggcggcagcgtttgttccagaacgccgcctcccacccagatcgcggtatatagagatatgcattttattttacttgtgtaaaaatatcggacgacgtggaataaagagctcttttcttaa

SEQ ID NO: 175256 - DNA, 1973 bp, Homo sapiens
  Payload ID: 14415
  Gene Symbol: RTN4R
  Gene Name: reticulon 4 receptor
  ENST ID: ENST00000425986
  CDS Start-End: 1-1679
gtgtggaggagggagcaggctgcctgggtggttgtgggacgcgactcctcctaagccctggacacacttgccctccacccccgccctcgggcatccaggcgcccgtttttgagatagacgtgcccagagggaccccagccccattgcagtgtttcctaggccctgtgggtggaacccccactgggaccccccggggactcctgcaatgcgggctctgtgttcactggagtcctgaggaggtacctgcagtcaccagtgtccattccaggaggccttcaaggagccggctgctggcatgggtgctgtggctgcaggcctggcaggtggcagccccatgcccaggtgcctgcgtatgctacaatgagcccaaggtgacgacaagctgcccccagcagggcctgcaggctgtgcccgtgggcatccctgctgccagccagcgcatcttcctgcacggcaaccgcatctcgcatgtgccagctgccagcttccgtgcctgccgcaacctcaccatcctgtggctgcactcgaatgtgctggcccgaattgatgcggctgccttcactggcctggccctcctggagcagctggacctcagcgataatgcacagctccggtctgtggaccctgccacattccacggcctgggccgcctacacacgctgcacctggaccgctgcggcctgcaggagctgggcccggggctgttccgcggcctggctgccctgcagtacctctacctgcaggacaacgcgctgcaggcactgcctgatgacaccttccgcgacctgggcaacctcacacacctcttcctgcacggcaaccgcatctccagcgtgcccgagcgcgccttccgtgggctgcacagcctcgaccgtctcctactgcaccagaaccgcgtggcccatgtgcacccgcatgccttccgtgaccttggccgcctcatgacactctatctgtttgccaacaatctatcagcgctgcccactgaggccctggcccccctgcgtgccctgcagtacctgaggctcaacgacaacccctgggtgtgtgactgccgggcacgcccactctgggcctggctgcagaagttccgcggctcctcctccgaggtgccctgcagcctcccgcaacgcctggctggccgtgacctcaaacgcctagctgccaatgacctgcagggctgcgctgtggccaccggcccttaccatcccatctggaccggcagggccaccgatgaggagccgctggggcttcccaagtgctgccagccagatgccgctgacaaggcctcagtactggagcctggaagaccagcttcggcaggcaatgcgctgaagggacgcgtgccgcccggtgacagcccgccgggcaacggctctggcccacggcacatcaatgactcaccctttgggactctgcctggctctgctgagcccccgctcactgcagtgcggcccgagggctccgagccaccagggttccccacctcgggccctcgccggaggccaggctgttcacgcaagaaccgcacccgcagccactgccgtctgggccaggcaggcagcgggggtggcgggactggtgactcagaaggctcaggtgccctacccagcctcacctgcagcctcacccccctgggcctggcgctggtgctgtggacagtgcttgggccctgctgacccccagcggacacaagagcgtgctcagcagccaggtgtgtgtacatacggggtctctctccacgccgccaagccagccgggcggccgacccgtggggcaggccaggccaggtcctccctgatggacgcctgccgcccgccacccccatctccaccccatcatgtttacagggttcggcggcagcgtttgttccagaacgccgcctcccacccagatcgcggtatatagagatatgcattttattttacttgtgtaaaaatatcggacgacgtggaataaagagctcttttctt

SEQ ID NO: 175257 - DNA, 3625 bp, Homo sapiens
  Payload ID: 14416
  Gene Symbol: RTN4RL1
  Gene Name: reticulon 4 receptor-like 1
  Uniprot ID: Q86UN2
  ENST ID: ENST00000331238
  CDS Start-End: 481-1806
cccgctccgccgatcgctcggtcctgcaaacgcgcgccgggcgctttccccggagctcggcggtgcgtgcgagcgcccttttgctgcagccgcggcggcggtggtccgagggggcggagaggagggggctgcggccggccggccagggggcggcgtcccccctcaaaaccgcctgcgaagtgctccgggtggcagaagcaggccgccggctccgcggagcaagccgctcgccccggggctgagcaagcgcgcggggctgccgggcagcaccacggttgcttgcgggcgccggtgccctcggcgcggggctggagctcaccatgcccctgcggggccgggccaccgggcacgagcggatccccggcttgcccccgcctcgacgcgctcggattagctgcagctggcgcccagggatttgaatctggaccccgggagggagtgcgcctaggccgacctcggagcggcggccccgtggccaacatgcttcgcaaagggtgctgtgtggagttgctgctgctgttggtagctgcggagctgcccctgggtggtggctgcccacgggactgtgtgtgctacccggcgcccatgacggtcagctgccaggcgcacaactttgcagccatcccggagggcatccccgtggacagcgagcgcgtcttcctgcagaacaaccgcatcggcctcctccagcccggccacttcagccccgccatggtcaccctgtggatctactcgaacaacatcacctacatccaccccagcaccttcgagggcttcgtgcacctggaggagctggacctcggcgacaaccggcagctgcggacgctggcacccgagaccttccagggcctggtgaagcttcacgccctctacctctacaagtgtgggctcagcgccttgccggccggcgtctttggcggcctgcacagcctgcagtacctctacctgcaggacaaccacatcgagtacctccaggacgacatcttcgtggacctggtcaacctcagccacctgtttctccacggcaacaagctgtggagtctgggcccgggcaccttccggggcctggtgaacctggaccgtcttttgctgcacgagaaccagctgcagtgggtccaccacaaggcgttccacgacctccgcaggctgaccaccctcttcctcttcaacaacagcctctcggagctgcagggtgagtgcctggccccgctgggggccctggagttcctccgcctcaacggcaacccctgggactgtggttgtcgcgcgcgctccctgtgggaatggctgcagaggttccggggctccagctccgctgtcccctgtgtgtcccctgggctgcggcacggccaggacctgaagctgctgagggccgaggacttccggaactgcacgggaccagcgtccccgcaccagatcaagtcacacacgctcaccaccaccgacagggccgcccgcaaggaacaccactcaccccacggccccaccaggagcaagggccacccgcacggcccccggcccggccacaggaagccggggaagaactgcaccaaccccaggaaccgcaatcagatctctaaggcgggcgccgggaaacaggcccccgagctgccagactatgccccagactaccagcacaagttcagttttgacatcatgcctacggcccggcccaagaggaagggcaagtgtgcccgcaggacccccatccgtgcccccagcggggtgcagcaggcctcctcggccagttccctgggggcctccctcctggcctggacactggggctggcggtcactctccgctgaggacccagggcgtcagcacccagcactgccacatgtccaccaaggaacagaatttattttcttctttttttaacaagtggaagatctgctgggtttcaggaaaaggctggtagagccttcggctgctgtctggacgtctggaccctgccatgtggattataaacccaaagtgtacagccctaggcgggagggggtggcgcttctcagccggctgtcccagccagccccgcagagcgcccacggacagtgtccactctggcaaggtgggaaaaggcactccaagtgcatcctccactggcaacagtgggacaattgcccccgacggcggcaccggggctctgtggaatcccgatcgttccgagaggtctggagggccccgtggttcctggagaaagcaggacgcagagaagaacaaatgaggctcacccacgaggctgggtggccagcagtctgggcacacacgagcaggtggcatcttggctcttgcctgaggccagtcaccctgccctgaattctatcctactccaccttcagcccctccctcgggggtagcgcctctcattcctgatgtctcaggcaaccctggcagacccaggtccaactgctggggtccaagaaccaattaccaaaggaaagatcatcagaggctgaaatctagaacttcatcccgggcaatgaggttctcacagaaggtgcagttttataactaactacgtccacttatatatattcacactctacatatatatatatatatatatatatatatatatatatatatatacacaaatgcacagtccccctcccactccgttacctaactgtacgtcttttcatgtttataaactatacagaaaactgtatttgctgaactaaggattgtattggtgatttctagcaaaaacaaagtgatagaatttttgtctagaatcccaaactggcaacgatagtctccaagggacctggccttgccaagggcctggggcaaggtgtcggcgggacggtgaggaagggggaggcagcaagagtcactttgggggaccaatattcttagatatttagagcatcaccttgtttttatatgcaacacaagcctgtctgccaccctggagcgccctgtcacccctgctgtcgtagctgttggcttcagggtgagaagtgagaagcagcttattgtatatgagggagccaggccccgagggtgagcgagatggagaaggggaaggaaggggctttgggatctggaaaccagcaggccaggcagcatccacagtgttagtccaaagggtcggaccgtgtcgtcagcctagcgtttggtcagtgacggcctggacgggccaaggagactccgggcttgagcccaggcctcccgcacggctcagctgctgaatttttccttgaggctgtttggtgtgtgacccagcaagggccctgtgtgggacagcaggagggaggcgtcgggggccttagcagaaggggaacaatgagggcatttcatgaaccatctcaggcacttctgcatcacggaagacctggccctcccagccgtcctggggatgctcagggtgcaggcagaggctcgggaggccggactcaggggtcagaagcagggactggggcaggcgagcccggacagggaagaggggctccgatcaaagccggccgtgctgctggccgggggcccaggtgggtacaagctcctttgtgctttgcacaaacctgaatcccccaccagagaggatgtgtgtgaggagccagaaacgctgaatccaattaagagagaaaaataataataacaataaatgatcttggacaagaa

SEQ ID NO: 175258 - DNA, 2203 bp, Homo sapiens
  Payload ID: 14417
  Gene Symbol: RTN4RL2
  Gene Name: reticulon 4 receptor-like 2
  Uniprot ID: Q86UN3
  ENST ID: ENST00000335099
  CDS Start-End: 318-1580
tgggcacacggacagacggactgacggactctcgagcggacagcgcagctagcggggcgcgggcgctgggcgtcgacggccagccccagccttccccgccccgtcgcgccccgccccgtcccgtcggggccgatggctcctcccgaggcccgcagcccgggcggcgcagggtagagcgccgcggcccggccacgcagcccggggactcccgggccctcccggagccccgcggggtccccgccgtgcatccggcgggctcagggagcgagtgggagcgccctccccccgctgccccctcccccgagcatcgagacaagatgctgcccgggctcaggcgcctgctgcaagctcccgcctcggcctgcctcctgctgatgctcctggccctgcccctggcggcccccagctgccccatgctctgcacctgctactcatccccgcccaccgtgagctgccaggccaacaacttctcctctgtgccgctgtccctgccacccagcactcagcgactcttcctgcagaacaacctcatccgcacgctgcggccaggcacctttgggtccaacctgctcaccctgtggctcttctccaacaacctctccaccatctacccgggcactttccgccacttgcaagccctggaggagctggacctcggtgacaaccggcacctgcgctcgctggagcccgacaccttccagggcctggagcggctgcagtcgctgcatttgtaccgctgccagctcagcagcctgcccggcaacatcttccgaggcctggtcagcctgcagtacctctacctccaggagaacagcctgctccacctacaggatgacttgttcgcggacctggccaacctgagccacctcttcctccacgggaaccgcctgcggctgctcacagagcacgtgtttcgcggcctgggcagcctggaccggctgctgctgcacgggaaccggctgcagggcgtgcaccgcgcggccttccgcggcctcagccgcctcaccatcctctacctgttcaacaacagcctggcctcgctgcccggcgaggcgctcgccgacctgccctcgctcgagttcctgcggctcaacgctaacccctgggcgtgcgactgccgcgcgcggccgctctgggcctggttccagcgcgcgcgcgtgtccagctccgacgtgacctgcgccacccccccggagcgccagggccgagacctgcgcgcgctccgcgaggccgacttccaggcgtgtccgcccgcggcacccacgcggccgggcagccgcgcccgcggcaacagctcctccaaccacctgtacggggtggccgaggccggggcgcccccagccgatccctccaccctctaccgagatctgcctgccgaagactcgcgggggcgccagggcggggacgcgcctactgaggacgactactgggggggctacgggggtgaggaccagcgaggggagcagatgtgccccggcgctgcctgccaggcgcccccggactcccgaggccctgcgctctcggccgggctccccagccctctgctttgcctcctgctcctggtgccccaccacctctgactgcggtgctgagatcgaagaggccagtgtccgatccccgcttcccgtccacccggggctgcggctccggccccagtcgccccaccttccctggccttgctgcctccctttcccctcccagctcctctcctccccggggagcaggccgcctctccttgcctgccccctgggctgtcctgacttgtggcagccccaagagggcgtgtgtggtggctcagccctgccctccccagttctggccattaactcttccccatcccaaggctggggtggggccccccaggcagccgctgacccgcactcctaagggcccacagcggacaccagaggggcttttgtctgcagagcgtcttccaccagcagagcctttggaagctcccccagggagccccacccaggaccctttgggggatgcctcagtcagggccaggctgaccctgacccctgcttaccctagtcccctcaacctcctgacactggaggaatacttttctcctaagtctaccctggacactttttagggcacctggagagaactttcctctccactgtggcccctgcgtggtgaagatcaaaagaagttgtttgggaaaaaaaatttattaaaaaattctattatttta

SEQ ID NO: 175259 - DNA, 582 bp, Homo sapiens
  Payload ID: 14417
  Gene Symbol: RTN4RL2
  Gene Name: reticulon 4 receptor-like 2
  Uniprot ID: Q86UN3
  ENST ID: ENST00000395120
  CDS Start-End: 1-582
atgctgcccgggctcaggcgcctgctgcaagctcccgcctcggcctgcctcctgctgatgctcctggccctgcccctggcggcccccagctgccccatgctctgcacctgctactcatccccgcccaccgtgagctgccaggccaacaacttctcctctgtgccgctgtccctgccacccagcactcagcgactcttcctgcagaacaacctcatccgcacgctgcggccaggcacctttgggtccaacctgctcaccctgtggctcttctccaacaacctctccaccatctacccgggcactttccgccacttgcaagccctggaggagctggacctcggtgacaaccggcacctgcgctcgctggagcccgacaccttccagggcctggagcggctgcagtcgctgcatttgtaccgctgccagctcagcagcctgcccggcaacatcttccgaggcctggtcagcctgcagtacctctacctccaggagaacagcctgctccacctacagggtcccctgcccaaaggcctttgcagctgtttttctcacccaccctcaagtctgcccacatcacggtga

SEQ ID NO: 175260 - DNA, 637 bp, Homo sapiens
  Payload ID: 14417
  Gene Symbol: RTN4RL2
  Gene Name: reticulon 4 receptor-like 2
  ENST ID: ENST00000533205
  CDS Start-End: 10-624
cgagacaagatgctgcccgggctcaggcgcctgctgcaagctcccgcctcggcctgcctcctgctgatgctcctggccctgcccctggcggcccccagctgccccatgctctgcacctgctactcatccccgcccaccgtgagctgccaggccaacaacttctcctctgtgccgctgtccctgccacccagcactcagcgactcttcctgcagaacaacctcatccgcacgctgcggccaggcacctttgggtccaacctgctcaccctgtggctcttctccaacaacctctccaccatctacccgggcactttccgccacttgcaagccctggaggagctggacctcggtgacaaccggcacctgcgctcgctggagcccgacaccttccagggcctggagcggctgcagtcgctgcatttgtaccgctgccagctcagcagcctgcccggcaacatcttccgaggcctggtcagcctgcagtacctctacctccaggagaacagcctgctccacctacaggggaagaaagaaaagggtaaatctctgttatgcagctggagaatggatgctctgaaaatggaaggaataccagtaattgttattcattgttattattattgatctaattattgtt

SEQ ID NO: 175261 - DNA, 2935 bp, Homo sapiens
  Payload ID: 14418
  Gene Symbol: RAX
  Gene Name: retina and anterior neural fold homeobox
  Uniprot ID: Q9Y2V3
  ENST ID: ENST00000256852
  CDS Start-End: 180-494
aaggcggcagcgggctgagcgctcggccacccccagcgtgcgcagcccgggcgggcttcgcccgcggagcttgacctagggtcgggacccgtcgggttgcaccgccgcactcgggaagacccggcttcgagcctctcctctccgtctccaaagcgccctcccgcctcccggcgctccccatgcacctgccgggctgcgcgccagccatggccgacgggagcttctcgcttgccggccacctgctccgcagcccgggcgggagcacctcgcgacttcacagcatcgaggccatcctggggtttaccaaggacgacgggatcctcggcaccttcccggcggagcggggcgcccggggcgcgaaggagcgggataggaggctgggcgcgcggcccgcctgccccaaggcgcccgaggaaggctccgagccctccccgccgccagccccggcgcccgcccccgagtacgaaggtgtggttccagaaccgacgggctaagtggcggcggcaggagaagctggaagtgtcctccatgaagctgcaggactcgcccctcctctccttcagccgctccccgccctccgcgacgctgtcgcccctcggggcgggcccgggcagcggtggcgggccggctgggggcgcgctgccgctggagtcctggctcgggccgccgctgccgggcgggggcgccacggcgctgcagagcctgccgggcttcgggccgccggcgcagagcctgcctgccagctacacgccaccgccgccgcctccgcccttcctgaactccccgccgttgggccccggcctgcaacctctcgcgccgccgccgccctcctacccgtgcgggcccggcttcggggacaagttcccgctggacgaggcggacccgcgcaacagcagcatcgcggcgctgcgtctgaaagccaaggagcacatccaggccatcgggaagccgtggcaggccctctaggggcactggggaacgtcttgggatccgaccccgggccgaccgcaccgtacccgcatcctctctcccagggacaacccccctccccagctcggcccctctttccctgtcgcctgcagccacccgccaagcatagttcagggccacgcgcctgctcccgatgcacggggagaagggcgactttcaggcctgaggagaggccctctggccgcctcaacgcacttcgcggacctcagccctgcagctggagggcaacaggctgccgggccccgctggccacgccgctcccatcaccgcaggcgctggagcctccaggcccaaacaggctgaagctcctaaacttggccattcccaggaggcttggagacccccagataaccataacagggaagcaggggaggcggaaaaatagagtttgagaaacttttgtataagtagtttcaaactatttgagaggagaattaaagacatgcttgttttgtttcgactctgtttaagcacgctcaggacttggggagaggagtgaatattggggtacgggaggagggtgcgttgacggacagggtgggtcagggaaagaggaggactgagaagaagctcagggtttccttgtgaaaattctagggacacttcgctgcagcagagaatcgtccccattccgaacgcttcggcggcctagaccagaggcgcccttccctggagccggcgtgcgcgcttggggtccggagtggatggggctaaggctcagatgctagcgcgctcccagttcccccgctagccccatagtccagcggcagctgatattttcaagtttgacttcaatagaaagcgtcaagaccaccttccctagggcgagagcgaagtgtcccccggcccctggcgtccccgctctcctaaggactcctctcagttcaccaagcagatctccggttcggtgccagtccctaacacccaaggttgatcaccagcggtacaagaactgaggcaaagagatgcttttccttttcggagccgcgagactctctaacctccccaactcgctccacactcgccaacccagagttcggtaaaaggcgcgtctggtgaggtgccgcgctcggagagtgtcctggagcgccctacgccaccgccccgagagctagttcttgcgggcgtgccctggacagtatctgcagttctttggcgccggctctagggcgaggaaggaatctcgaaatctcagcccgcttcacaatctcctgagactctctgaagaaggagagtcccggactcccgcctgagcgtgctcgatatccaccgttgacactggaagctgggcgaccgccagcagaacctggatgcccgccaacaggtcctggcacggggggggggggggcgtccaccccacaacccccgtccctaagcgtgctttcaggatgatgcccccagagccttaattagcatcaactggctactgtctgtcggtcctgagcaaattagtgaagctcccagtcccctttcctcgtctaaataaactctgtctctctggaaggtgggaaagatggaataagatcacctgtaaaggctttgtggaaagtaccaagaccctggcatgacgcaatatggattgtaatcatcgtccccatttccccgaaattccctggctgttctccggttcctgaaaccgacttgggaaaaggatgaccacgctggagctgggaatatgggaagcctcatcatagtttccagtcctttctctgcgggtctaagaggctattgcataaccagggctgtgtacccctagacctccagatggtgccttgcacacagtaggctgatcagtaaaaatgtactgaataaattattcccccccaagaggtagggagtaatatctgcacttttcctcacaaggatgtctccttgggggaggaggatggagcagcccgtgtgttatcaccttttagcaagaaaacaaaacaaaacaaaaccagaa

SEQ ID NO: 175262 - DNA, 3197 bp, Homo sapiens
  Payload ID: 14418
  Gene Symbol: RAX
  Gene Name: retina and anterior neural fold homeobox
  Uniprot ID: Q9Y2V3
  ENST ID: ENST00000334889
  CDS Start-End: 188-1228
ctgggactaaggcggcagcgggctgagcgctcggccacccccagcgtgcgcagcccgggcgggcttcgcccgcggagcttgacctagggtcgggacccgtcgggttgcaccgccgcactcgggaagacccggcttcgagcctctcctctccgtctccaaagcgccctcccgcctcccggcgctccccatgcacctgccgggctgcgcgccagccatggccgacgggagcttctcgcttgccggccacctgctccgcagcccgggcgggagcacctcgcgacttcacagcatcgaggccatcctggggtttaccaaggacgacgggatcctcggcaccttcccggcggagcggggcgcccggggcgcgaaggagcgggataggaggctgggcgcgcggcccgcctgccccaaggcgcccgaggaaggctccgagccctccccgccgccagccccggcgcccgcccccgagtacgaagcccctcgaccctactgccccaaggagcccggggaggcacggccgagcccagggctgcccgtcgggccagccaccggcgaagcgaaactgtcagaggaggaacagcccaagaaaaagcatcggcggaaccgcacgactttcaccacgtaccagctgcatgagctggagcgcgcgttcgagaagtcccactacccggacgtgtacagccgcgaggagctggccggcaaggtcaacctaccagaggtccgggtccaggtgtggttccagaaccgacgggctaagtggcggcggcaggagaagctggaagtgtcctccatgaagctgcaggactcgcccctcctctccttcagccgctccccgccctccgcgacgctgtcgcccctcggggcgggcccgggcagcggtggcgggccggctgggggcgcgctgccgctggagtcctggctcgggccgccgctgccgggcgggggcgccacggcgctgcagagcctgccgggcttcgggccgccggcgcagagcctgcctgccagctacacgccaccgccgccgcctccgcccttcctgaactccccgccgttgggccccggcctgcaacctctcgcgccgccgccgccctcctacccgtgcgggcccggcttcggggacaagttcccgctggacgaggcggacccgcgcaacagcagcatcgcggcgctgcgtctgaaagccaaggagcacatccaggccatcgggaagccgtggcaggccctctaggggcactggggaacgtcttgggatccgaccccgggccgaccgcaccgtacccgcatcctctctcccagggacaacccccctccccagctcggcccctctttccctgtcgcctgcagccacccgccaagcatagttcagggccacgcgcctgctcccgatgcacggggagaagggcgactttcaggcctgaggagaggccctctggccgcctcaacgcacttcgcggacctcagccctgcagctggagggcaacaggctgccgggccccgctggccacgccgctcccatcaccgcaggcgctggagcctccaggcccaaacaggctgaagctcctaaacttggccattcccaggaggcttggagacccccagataaccataacagggaagcaggggaggcggaaaaatagagtttgagaaacttttgtataagtagtttcaaactatttgagaggagaattaaagacatgcttgttttgtttcgactctgtttaagcacgctcaggacttggggagaggagtgaatattggggtacgggaggagggtgcgttgacggacagggtgggtcagggaaagaggaggactgagaagaagctcagggtttccttgtgaaaattctagggacacttcgctgcagcagagaatcgtccccattccgaacgcttcggcggcctagaccagaggcgcccttccctggagccggcgtgcgcgcttggggtccggagtggatggggctaaggctcagatgctagcgcgctcccagttcccccgctagccccatagtccagcggcagctgatattttcaagtttgacttcaatagaaagcgtcaagaccaccttccctagggcgagagcgaagtgtcccccggcccctggcgtccccgctctcctaaggactcctctcagttcaccaagcagatctccggttcggtgccagtccctaacacccaaggttgatcaccagcggtacaagaactgaggcaaagagatgcttttccttttcggagccgcgagactctctaacctccccaactcgctccacactcgccaacccagagttcggtaaaaggcgcgtctggtgaggtgccgcgctcggagagtgtcctggagcgccctacgccaccgccccgagagctagttcttgcgggcgtgccctggacagtatctgcagttctttggcgccggctctagggcgaggaaggaatctcgaaatctcagcccgcttcacaatctcctgagactctctgaagaaggagagtcccggactcccgcctgagcgtgctcgatatccaccgttgacactggaagctgggcgaccgccagcagaacctggatgcccgccaacaggtcctggcacggggggggggggggcgtccaccccacaacccccgtccctaagcgtgctttcaggatgatgcccccagagccttaattagcatcaactggctactgtctgtcggtcctgagcaaattagtgaagctcccagtcccctttcctcgtctaaataaactctgtctctctggaaggtgggaaagatggaataagatcacctgtaaaggctttgtggaaagtaccaagaccctggcatgacgcaatatggattgtaatcatcgtccccatttccccgaaattccctggctgttctccggttcctgaaaccgacttgggaaaaggatgaccacgctggagctgggaatatgggaagcctcatcatagtttccagtcctttctctgcgggtctaagaggctattgcataaccagggctgtgtacccctagacctccagatggtgccttgcacacagtaggctgatcagtaaaaatgtactgaataaattattcccccccaagaggtagggagtaatatctgcacttttcctcacaaggatgtctccttgggggaggaggatggagcagcccgtgtgttatcaccttttagcaagaaaacaaaacaaaacaaaaccagaa

SEQ ID NO: 175263 - DNA, 473 bp, Homo sapiens
  Payload ID: 14418
  Gene Symbol: RAX
  Gene Name: retina and anterior neural fold homeobox
  ENST ID: ENST00000555288
  CDS Start-End: 252-473
gccggcgctcaagtccgaggggactgggaggagttacaacagatatagacggacaaactaaacgcgaggtccgggacttcgtacaacccagccaagaaaggagtgggtcccgaaaagggagccagcgaggggaaattcaaactgcgacgagtgcggggctgggaagccttcggctgggtctcggcgcttccagggggcacaggccagggtggcggccccgcggagcgccctcccgcctcccggcgctccccatgcacctgccgggctgcgcgccagccatggccgacgggagcttctcgcttgccggccacctgctccgcagcccgggcgggagcacctcgcgacttcacagcatcgaggccatcctggggtttaccaaggacgacgggatcctcggcaccttcccggcggagcggggcgcccggggcgcgaaggagcgggataggaggctgggcgcgcggcccgcctgcccc

SEQ ID NO: 175264 - DNA, 2414 bp, Homo sapiens
  Payload ID: 14419
  Gene Symbol: RAX2
  Gene Name: retina and anterior neural fold homeobox 2
  Uniprot ID: Q96IS3
  ENST ID: ENST00000555633
  CDS Start-End: 328-882
gcgccaggcccgctggggcaggtgtcccgtggaaatcgacggaggggctgccgtgggcggccgtgacagtcacagagaggggaagagaaaacagggacggtgacacacacagagagaaggaagagcagacagaggcacagcaggagacccccccaagcccgaggaggacagcctggggatgcagagcgcatgccggccccagtggagggaaccgatttccccggagccgggaggcaagcctggggctcccctgccctgtccctgccggtagcccccccagccgtctccccaccatctgtcccgctgccgtcccaccaggtgggagccatgttcctgagcccgggcgaggggccggcaaccgagggtgggggtctggggccgggcgaggaggcccccaagaagaagcaccggaggaaccgcaccaccttcaccacctaccagctgcaccagctggagcgggcgttcgaggcctctcactacccggatgtgtacagccgtgaggagctggcagccaaggtgcacctacctgaggtgcgcgtgcaggtgtggttccagaaccgccgggccaagtggcgccgccaggagcggctggagtcaggctcgggtgccgtggcagctccgagactccccgaggccccagcgctgccgttcgcccgccccccggccatgtcgctgcccctggagccctggttgggccccggaccgccggccgtgccaggcctcccccgcctcctgggcccgggcccggggctgcaagcgtccttcgggcctcatgcctttgctcccaccttcgcagatggcttcgccctggaggaggcgtccctgcggctgctggccaaggaacatgcacaggctctggacagggcctggccgccagcctgagcctgccgccctcccgggccccctcctcggcccaacccgagaaccggggacgtgccctggtgacagccaccacgccttggcctaggccgaggtcatggagcaaccgtggtcaggccaggccaccaccactggggagcgggaccagagagacaggctgctgggttccctgcccccatcccgtctcccaccccatcgccacccgtcctgctggcagcggactggcccccagtgtcaggcaggaggtgacccaagtattctcaggccaggtgcggggacctcctcccctcctggggcctcagtctcctgtctgttaattgggcgtgggggcctccgaggttcgagggctgcgaggctgtgggtggcgggaccgctgactctgtaagatgagtgtaaatctctctgcttctcctaatccccatcagcagagctgcccactctccaggctcccagtcccctggaaataacaaatagcagcagctcccgcgagcctggtctcctctcaccgtgtgctcgccatgtgagcactcccctctccgttgtgccctggacctcgggcacagctgtcagcccattctatagagagggaaaccggggcttaggcaggaagccaggtccccaaagtcgcacggccaggagtggatggagctgcctttcagacccatcaccggtcctaccgtccggggcacagcgacaggttctggagagagggtgggtcccgggccaggtgctggtgggcctccaggtggaggcgggctgatgctgggtgtgtcgtcatcgtcagaccgttcctcacgtccccacagaccccaggccctgtgcatgtccccagtggaggcatggccagcatctgctctgtccaacccagccgcatcgcccaagagctctgagcaaggaggctgtcgcggggccgagaacccgctgggactggcaagcacggctggcccagtgcagcaggagggggccctgaggcatgggatgggacagtctgggccagcgccacctcccgggacagaagtgcggcaccagggcaggagctgcagtagctaccctccccgtctccagcctgggctccccagatcactcccagatcaccaggtcaccccatctctaggcggcacctcacacaccagtcctgtggtccaacgccccgccatcacccaatgtcaccgcacaccaggcagtggggacacggcagtaagcacaagaaagatttttttttttaaagctaaaccaggccaggtgcggtggctcatgcctgtaatcccagtgctttgggaggctgaggtgggaggattgcttgagaccagcctgggtgacacagcaagaccccatctccacaaacgtttttaaaatgtgccgggtgtactggtgcacacctgtcatcccagctacccaagaagctgaggcaagaggatcacttgagcccagaaggtcgaggctgcagggagctgtgatcacactgctgcactccagcctgtgcaacagagccagaccctgactcaatacaaataaaaaacaaatctaaaacaaaa

SEQ ID NO: 175265 - DNA, 2145 bp, Homo sapiens
  Payload ID: 14419
  Gene Symbol: RAX2
  Gene Name: retina and anterior neural fold homeobox 2
  Uniprot ID: Q96IS3
  ENST ID: ENST00000555978
  CDS Start-End: 59-613
cgctggggcaggtgtcccgtggaaatcgacggaggggctgccgtgggcggtgggagccatgttcctgagcccgggcgaggggccggcaaccgagggtgggggtctggggccgggcgaggaggcccccaagaagaagcaccggaggaaccgcaccaccttcaccacctaccagctgcaccagctggagcgggcgttcgaggcctctcactacccggatgtgtacagccgtgaggagctggcagccaaggtgcacctacctgaggtgcgcgtgcaggtgtggttccagaaccgccgggccaagtggcgccgccaggagcggctggagtcaggctcgggtgccgtggcagctccgagactccccgaggccccagcgctgccgttcgcccgccccccggccatgtcgctgcccctggagccctggttgggccccggaccgccggccgtgccaggcctcccccgcctcctgggcccgggcccggggctgcaagcgtccttcgggcctcatgcctttgctcccaccttcgcagatggcttcgccctggaggaggcgtccctgcggctgctggccaaggaacatgcacaggctctggacagggcctggccgccagcctgagcctgccgccctcccgggccccctcctcggcccaacccgagaaccggggacgtgccctggtgacagccaccacgccttggcctaggccgaggtcatggagcaaccgtggtcaggccaggccaccaccactggggagcgggaccagagagacaggctgctgggttccctgcccccatcccgtctcccaccccatcgccacccgtcctgctggcagcggactggcccccagtgtcaggcaggaggtgacccaagtattctcaggccaggtgcggggacctcctcccctcctggggcctcagtctcctgtctgttaattgggcgtgggggcctccgaggttcgagggctgcgaggctgtgggtggcgggaccgctgactctgtaagatgagtgtaaatctctctgcttctcctaatccccatcagcagagctgcccactctccaggctcccagtcccctggaaataacaaatagcagcagctcccgcgagcctggtctcctctcaccgtgtgctcgccatgtgagcactcccctctccgttgtgccctggacctcgggcacagctgtcagcccattctatagagagggaaaccggggcttaggcaggaagccaggtccccaaagtcgcacggccaggagtggatggagctgcctttcagacccatcaccggtcctaccgtccggggcacagcgacaggttctggagagagggtgggtcccgggccaggtgctggtgggcctccaggtggaggcgggctgatgctgggtgtgtcgtcatcgtcagaccgttcctcacgtccccacagaccccaggccctgtgcatgtccccagtggaggcatggccagcatctgctctgtccaacccagccgcatcgcccaagagctctgagcaaggaggctgtcgcggggccgagaacccgctgggactggcaagcacggctggcccagtgcagcaggagggggccctgaggcatgggatgggacagtctgggccagcgccacctcccgggacagaagtgcggcaccagggcaggagctgcagtagctaccctccccgtctccagcctgggctccccagatcactcccagatcaccaggtcaccccatctctaggcggcacctcacacaccagtcctgtggtccaacgccccgccatcacccaatgtcaccgcacaccaggcagtggggacacggcagtaagcacaagaaagatttttttttttaaagctaaaccaggccaggtgcggtggctcatgcctgtaatcccagtgctttgggaggctgaggtgggaggattgcttgagaccagcctgggtgacacagcaagaccccatctccacaaacgtttttaaaatgtgccgggtgtactggtgcacacctgtcatcccagctacccaagaagctgaggcaagaggatcacttgagcccagaaggtcgaggctgcagggagctgtgatcacactgctgcactccagcctgtgcaacagagccagaccctgactcaatacaaataaaaaacaaatctaaaacaaaa

SEQ ID NO: 175266 - DNA, 4266 bp, Homo sapiens
  Payload ID: 14420
  Gene Symbol: RD3
  Gene Name: retinal degeneration 3
  Uniprot ID: Q7Z3Z2
  ENST ID: ENST00000367002
  CDS Start-End: 1165-1752
ttcatgcccattacagtattcccatgcccctcacagggcagtgtgcatctgttttagtgctacctaatgtctgttaggtgcaagctggcccacacatggcttctaggcagaacagtctacaagtgacagcgtgaccagagagcagagacaggaaggaggcccagacatgagtgtgggatgctgcagaacagcaacaggatgcttctgctatccccaaatgttatctcaaatacctcaacgtcaatgctttctgttccatgttcctcttctccctggacagcccctccttctgaaagtcagaactgtctgctcttgagcttgccttgagggaaggaaataatttagataagcagagaggaagacaggcaagggatgtggtggggcaaaggcggagatgtatcttcacaggtccctgtcctcagcacccagaatcaccccttccctgtaggagggagctgatagaaagaggggatctccatccaggagccacccaccaggcagctggaaacatttgccaacagcaggtacacctagggctcagcagagggttgggtgagaatggtcttgcccagtttgtgccacactgagcaccggctggaggaggaagcggacagaatgccatctggacacaagtgctccctcactgcctgggcctgggtcgcctcaggcttttgtgtcagatcagccactccctctacagataatgctgctccaggcaaagaggcttaggtgggtctccagggcaaccgcagctcaggagctggcccgcctccatggttcatcagggaagctgtggctccagcctcgcgggatacatacacgcatacacacacacacacacacacacacacacacacacacacacacacctacacaccccacaaacaatagtccaggctggatctctcctcctgtctcttctcttggtaaaacttctcagagaaccaaagagaggcaaaatttgaggccagccggcagcagcagagaagctgagggagacttgaggatgtagactgccctgccctgctgtggctgctcaactttctttttttttcctgaaaatatccagacactctcttctcccagactgggaagcagaacgcaggccccctgctgtgacgctgcacctgagcagaggctgacctcagagcagggccaggggctatgtctctcatctcatggcttcggtggaacgaggccccatcccggctgtccaccaggagccctgctgagatggtgctggagacgcttatgatggagctgacggggcagatgcgagaggctgagaggcagcagcgggagcgcagcaatgcggtcagaaaggtctgcaccggtgtggactacagctggctggccagcacaccccggtccacctatgacctcagccccattgagcggttgcagctggaagatgtctgcgttaagatccacccatcctattgtgggcctgctatcctcaggttccggcagctgctggcggagcaggagcccgaggtgcaggaggtgtcccagctcttccgctcggtgctgcaggaggtcctggagaggatgaagcaggaagaggaggcccacaagctgacgcgccagtggagcctgcggccccgcggcagcctggccaccttcaagacccgcgcgcgcatctcgcccttcgccagcgacatcaggaccatctccgaggacgtggagcgggacacaccgccgccactgcggtcctggagcatgcccgaattccgggcgcccaaagccgactgaccccggccgcttccctgcccagaagcggagccttctgcagggggaatgataggccggtgaccggagcgccgggccctggaacctccccacctaggcctgacgaggagacccaagaggcggccccatcccaagacgctgctataaaatgaagcgactccctgccccatcctcttcctctggccacaaagctgagttaggtcgtagagcggcaccgccctctccctctcctgcgctagtctgcaggagcagccccttccctaactggcagattcaaggttttggaagacagaccattgccccatcctcatctcctggttctgtctaaaaggggacagttgccctgccttttggcaagacctaggttctcaccccaatttcagggatgtcccattcacccccctacccccatccccaatgagaagggacctgttggctggtatgccttcttgctagtgactggctgagctcaccactgcaggtgggtcacacacagcctcataggcaggcacagctggaagggaccagagagacatttagatccactctcttcagctagtaaatgtggaacttgaggctcagagagggacacttcttctgcctttaactgcagccagctcctcatgaacagtgagattgttcctgcatgaatagtgtctgttcctgagtttggaatcctgggctatgaagggacaggtccaaaggctacatctctacctacctgtggcctgatccatctcttaccttggcagtgggatgagaatctaagctgctctccaagaagtgtagctaggggtggaggtaggttactcattaccccacgccacaatgtcatcgcatgggctgtggccagtccctaacagcttcttccagaggctcagctccaaggacttcagatgctgccctaaagagcccaggtttctcaattccagggttccgctttctgcagctggtcacacctgctctctggctttctccagaaagtgatgcccaaacccctgactgaccttgaggcagctgagtgaaatgttctagaagagcttcctgcagcttcattgtccttcccttttctaacatggttaggccttgatgatgggcatgtggattacccaatgtgtggatcacccatggaaaatctggaaggccaggaggccttcccacacactctggggttgaagtggggtgtaagggggatgggtggggaagtgtctaccctcaactaccagcacacatgcagaaaatgcaagtggaccttaatagtagcctaaataaaatacccggaggagatataatcaacaggggggaaaagtgtgtattccctcagtggaaaaaagtttttttgaatgatttggttttgaacttcccttttgaagtttttttggattttcacttgaatctggacagagaatcataggatggtggaaaacctctgatccaacactatcaagatgaaagagttgattggcttattaatgtaattggtagaagttgagaatcacttaaaatatacatcttaaacatcttacgtattttatttgaagacataaaaagttcacttggttgccaaacttttttttttttttttgagactgagtctcactctgttacccaggctgcagtgcagtggcgtgatctcggctcaccacaacctttgcctcccgggttcaagtgattcttctgcctcagcctcctaagtagctgggactacaggcacgtgccatcaccccagctaatttttgtatttttattagagatggggtttcactatgttgcccagaatggtcttgaactcctgacctcgtgatccactcgccttggcctcccaaagtgctgggattacagacatgagccactgtgcctggctgccaaacttttgatgtgggtccaagctgtgcttttttgtgacctatatgttttgtctggtgggagttctacacttaagttttcttggtttgcactttaatcataacaataagaacaactggcgtaaaagagttttggaacaagcagaagtgacccttggtaagcagactgctcagctggtaggggcaaaagtgttgggggaggattagaaaaaggcctccacattgtgggctttccgggtgccctggatgtgggtcagcaaatgttttagaggaagtagttaacctggagggagattcaaaggaggctggataagagaatgtctatttttctccttccctatcaccttacatgtacctattctccccaaagagaaggaagaccttaggctttcaatgtggtgttctttcttaagtttaagtaactggctgccaatgaaaaccttcccttcgagccgcaggcatgtggacagaatccaccaccctccttagacactcctcagactactacaggctatccccagctggtggctctcaaattcatgagggtccagaagttgttcctctggattcaggttgttaaagggactaatgaggtctgcttccattactattattgaaacctcaataaccacaaataaaagaacaaaaagtt

SEQ ID NO: 175267 - DNA, 1201 bp, Homo sapiens
  Payload ID: 14421
  Gene Symbol: RD3L
  Gene Name: retinal degeneration 3-like
  Uniprot ID: P0DJH9
  ENST ID: ENST00000557640
  CDS Start-End: 225-821
attaatgagcattctctccaaatgaagacatcacagcctcattcctaacacagaaagttatttatttcaaatacagtttcggtgggtaaataaggtggcgcattccttctacagaggacacacctaggagagcaagatacgtcccagtgaaacacagcttcgtcaccaacttcagtcaactctttggcaacatcacatcagcccatcaacttaacaggctaaaaatgccactttttggctggatgaaatggcccaaaaacgattcctacaaacccacacactatcctggctcagacatagtgacaaagactctgcttcgggaattaaaatggcacctaaaggagcgagagagattaatacaagaaatcgaaaatgaacaaaaagtgaaaaaaacaggtgtggattacaactggctcagaaactaccagaatccccacacaactatcccagtgactgaacaaagacaacttgaagttctttgctcacaagttcaaccttgccaaactggaactattctcagcagatttcgagaagttttggcagaaaatgatgtactgccatgggaaatagtctacatcttcaagcaagttctgaaagacttcctaagcagctctgacagagggagtgagcaagaggacctggaggactcagggagcatggactgctctgctccttctgtgatccaaggtgacagctccaagagggcagacaaagatgaaatacccaccatttccagttacgtagacaaaaacacaaaggacaggttcccagtgttctcacacagaatatggaacctaccatattatcacccatctagttaagttacttacaactagaggggtttttatgaacaccttagaactcctaatattaagaataagaaaaagtgatgtgacttcaagtttttctttgttacaaggtcagtatcctgtggatgtagcctatgttttaaatagtgttctttttttaaccactctaaacatgctatgttttcattgaatagtatgcttttaactaaaatgtttcctaagtattttgaaaaaatgtttgcagtattttcttatacctcaaacccacctcacaggaactaaagcaactttagtatgaagtctgacaaattctgtacaaaacttagatattaaccttgacttttattctacaatgaagctacatatagaattaaataaattattaatacgaa

SEQ ID NO: 175268 - DNA, 1349 bp, Homo sapiens
  Payload ID: 14422
  Gene Symbol: RGR
  Gene Name: retinal G protein coupled receptor
  Uniprot ID: P47804
  ENST ID: ENST00000358110
  CDS Start-End: 39-800
agagacagctgggccactggcagtgagggagagtgaggatggcagagaccagtgccctgcccactggcttcggggagctcgaggtgctggctgtggggatggtgctactggtggaagctctctccggtctcagcctcaataccctgaccatcttctctttctgcaagaccccggagctgcggactccctgccacctactggtgctgagcttggctcttgcggacagtgggatcagcctgaatgccctcgttgcagccacatccagccttctccggcgctggccctacggctcggacggctgccaggctcacggcttccagggctttgtgacagcgttggccagcatctgcagcagtgcagccatcgcatgggggcgttatcaccactactgcacccgtagccagctggcctggaactcagccgtctctctggtgctcttcgtgtggctgtcttctgccttctgggcagctctgccccttctgggttggggtcactacgactatgagccactggggacatgctgcaccctggactactccaagggggacagaaacttcaccagcttcctcttcaccatgtccttcttcaacttcgccatgcccctcttcatcacgatcacttcctacagtctcatggagcagaaactggggaagagtggccatctccaggtgcccgccctcattgccaaaatggtgcccacgatcaatgccatcaactatgccctgggcaatgagatggtctgcaggggaatctggcagtgcctctcaccgcagaagagggagaaggaccgaaccaagtgagcctgccaccctggagtgagccccaggccaggaggctgttccaggagtcctgcccagcagcctcagtggccaagcccagacactcacccaccttccccagtggccccgtggatcctggtcctaggctggacacaggattcagaaagacaccaggctgcacagaaagagccagatggacctgagtgtcggtcacagccccctacactcaaggctgagaggcctcaggaaagtcattcctttttaaaaataataataaatgtaagggggtacagtgcagttttgttacatggatagattgcctagtggtgaagtctgggcttttagtgtaaccatcaccctaataatatacgttgtacccattaagttatttctcatccctcaccccctcccaccttgtcacccttctgagtctccaatgtctattattccacactccatgtccacgtgtacacattatttagctcccacttacaagtgagaacatgtggtatttgactttctgtttttgagttatttcacttaaaataatgacctccagtttcatccatg

SEQ ID NO: 175269 - DNA, 2247 bp, Homo sapiens
  Payload ID: 14422
  Gene Symbol: RGR
  Gene Name: retinal G protein coupled receptor
  Uniprot ID: P47804
  ENST ID: ENST00000359452
  CDS Start-End: 39-926
agagacagctgggccactggcagtgagggagagtgaggatggcagagaccagtgccctgcccactggcttcggggagctcgaggtgctggctgtggggatggtgctactggtggaagctctctccggtctcagcctcaataccctgaccatcttctctttctgcaagaccccggagctgcggactccctgccacctactggtgctgagcttggctcttgcggacagtgggatcagcctgaatgccctcgttgcagccacatccagccttctccgtgtctcccacaggcgctggccctacggctcggacggctgccaggctcacggcttccagggctttgtgacagcgttggccagcatctgcagcagtgcagccatcgcatgggggcgttatcaccactactgcacccgtagccagctggcctggaactcagccgtctctctggtgctcttcgtgtggctgtcttctgccttctgggcagctctgccccttctgggttggggtcactacgactatgagccactggggacatgctgcaccctggactactccaagggggacagaaacttcaccagcttcctcttcaccatgtccttcttcaacttcgccatgcccctcttcatcacgatcacttcctacagtctcatggagcagaaactggggaagagtggccatctccaggtaaacaccactctgccagcaaggacgctgctgctcggctggggcccctatgccatcctgtatctatacgcagtcatcgcagacgtgacttccatctcccccaaactgcagatggtgcccgccctcattgccaaaatggtgcccacgatcaatgccatcaactatgccctgggcaatgagatggtctgcaggggaatctggcagtgcctctcaccgcagaagagggagaaggaccgaaccaagtgagcctgccaccctggagtgagccccaggccaggaggctgttccaggagtcctgcccagcagcctcagtggccaagcccagacactcacccaccttccccagtggccccgtggatcctggtcctaggctggacacaggattcagaaagacaccaggctgcacagaaagagccagatggacctgagtgtcggtcacagccccctacactcaaggctgagaggcctcaggaaagtcattcctttttaaaaataataataaatgtaagggggtacagtgcagttttgttacatggatagattgcctagtggtgaagtctgggcttttagtgtaaccatcaccctaataatatacgttgtacccattaagttatttctcatccctcaccccctcccaccttgtcacccttctgagtctccaatgtctattattccacactccatgtccacgtgtacacattatttagctcccacttacaagtgagaacatgtggtatttgactttctgtttttgagttatttcacttaaaataatgacctccagtttcatccatgttgctgcaaaagacatgatctcgttcttttttatggcagtgtagtattccattccatatacatatataaacgttatatatatgtaacgttttctttatccaatcatctgttgatggatagattccatatctttgctactgtaaacagctgtgataagcatacaagtgcaggtttctttttgatatactgatttcttttcctttgggtagataccagtagtaggactgctggatcaaatggtagctctatttttaagacagtatggagaaatcaccatactgttttccataggggttgtactaatttacagtcccaccaacagtgtataggtgttcccttttctctgcatccttaccaatatctgtaattttttgactttttaataatagccattctcacttgtgtgagataaggtctcattgtggttttaatttccatttctctgatgacttttgatgttaagcattttttcatatgcttcttagccacgtgtatgtattctttttgaaaaaatgtttattcatgtcttttgcccactttttaatggcattatttggattttttttgttgagttatttgagtttcttatatattctggataatagtctggataatatattctggataatatataatagtcttatatattctggatatattctggatacatggtttgcaaatattttctccggttctgcacgttgttcattctgttgatggtttattttgctgtgcagaaacttttttagtttaattaagtcccatttgtcta

SEQ ID NO: 175270 - DNA, 868 bp, Homo sapiens
  Payload ID: 14422
  Gene Symbol: RGR
  Gene Name: retinal G protein coupled receptor
  ENST ID: ENST00000372092
  CDS Start-End: 6-368
tgaggatggcagagaccagtgccctgcccactggcttcggggagctcgaggtgctggctgtggggatggtgctactggtggaagaccccggagctgcggactccctgccacctactggtgctgagcttggctcttgcggacagtgggatcagcctgaatgccctcgttgcagccacatccagccttctccgtgtctcccacaggcgctggccctacggctcggacggctgccaggctcacggcttccagggctttgtgacagcgttggccagcatctgcagcagtgcagccatcgcatgggggcgttatcaccactactgcacccgccaaaatgctgccatcggtctcatcattttgagtggcgataggttagccctcttgtccacttggcctcagagcacttctcccactccttacatcccagcccctgcccctaatgctcccttggaccatcttatacacacacacacacacacacacacacacacacacacaccaccttctcagatagcaacaggcttctctgcctcaatatagaacagttaatccctgtgccagaggccttagatcaaagccctttctatactgagagcatggcagagcagtgtgaaggcaggcaaaggggaatgaggaggtctgaattcatctactccatccctgggtggttgtaggcatgtcaccttggccatctgtttctaaagctgaaagtctgaggcagcacaatggtccaggtagatattaattattgtgcccacagagaattgtttgaacctggaaggcagaggttgcagtgagctgagatggcaccactgcactccagcctgggcaacagaatgagactccgcctcaataaaaaaaaaaaaaaaaa

SEQ ID NO: 175271 - DNA, 1878 bp, Homo sapiens
  Payload ID: 14423
  Gene Symbol: ROM1
  Gene Name: retinal outer segment membrane protein 1
  Uniprot ID: Q03395
  ENST ID: ENST00000278833
  CDS Start-End: 542-1597
acaaacaggcgccggacgcggagccgccaggaagcgcgggagggggggcgggcccgagggggggccgggccgcttggtaacccctccctgtccgggcctcgccgctcagtacgggggcggggctagccggctgaccccctggcctactcccggcctccggctccaggcccttcccggatccccgcccccggattcccaggggacggggaagggagcgcccgccccgatatctccgccccccagcccctaacccctcagggttgagcggaccaaccccaccacttccgcgaggggcaggggcggggtcacaaaacgggccctcggcctaggggcggagtttctcgtaaggggcaaggccaaggcatcttgtattggggctgacaggggggcgggttattagggctgaggatgggaggatgctcagggtattggggtcagggtggcattagcccagctcaagccgggccgggctgactcagcatcctgccccagccagcttccatccctgacacctctgcattcccttgggcagagatgggagatggcgccggtgttgcccctggtgctgcccctgcagccccgcatccgcctggcacaagggctctggctcctctcctggctgctggcgctggctggtggcgtcatcctcctctgtagtgggcacctcctggtccagctaaggcaccttggcaccttcctggctccctcctgtcagttccctgtcctgccccaggctgccctggcagcgggcgcggtggctctgggcacaggactagtgggtgtaggagccagccgggcaagtctgaatgcagctctataccctccctggcgaggggtcctgggcccgctgctggtggctggcacggctggtgggggggggctcctggtcgtcggcctcgggctagccctggctttgcctgggagtctggatgaggcgctggaggagggcctggtgactgccttggctcactacaaggacacagaggtgcctgggcactgtcaggccaaaaggctggtggatgagctgcaactgaggtaccactgctgcgggcgccacgggtacaaggattggtttggggtccagtgggtcagcagccgttacctggatcccggtgaccgggatgtggctgaccggatccagagcaatgtagaaggcctatacctgactgatggggtccctttctcctgttgcaacccccactcaccccggccttgcctgcaaaaccgtctttcagactcctacgcccaccccctgttcgatccccgacaacccaaccaaaacctctgggcccaagggtgccatgaggtgctgctggagcacttgcaggacttggcaggcacactgggtagcatgctggctgtcaccttcctactgcaggctctggtgctccttggcctgcggtacctgcaaacagcactggaggggcttggaggggtcattgatgcgggaggagagacccagggctatctctttcccagtgggctgaaagatatgctgaaaacagcatggctacagggaggggttgcctgcaggccagcacctgaggaggccccaccaggagaagcacctcccaaggaggatctatctgaggcctagaggcctggagcttggggtgaggaagagggagggatggacaagtctgaaaacctcacaactccttaccaaggctccaggttggggggatcgtaggattagaggggctaaggatagtcagcgagctggactggggtaagaaagaaaaccagatgtcctagggcctagcccttgtagtcagaaccaccagggaacagcaaagaacagagtgatgggaaagtgacatgagaaggcctggaggctgattctgatatagactcaataaagtttttggatggaagcaa

SEQ ID NO: 175272 - DNA, 862 bp, Homo sapiens
  Payload ID: 14423
  Gene Symbol: ROM1
  Gene Name: retinal outer segment membrane protein 1
  ENST ID: ENST00000534093
  CDS Start-End: 174-491
gcgagaaacctggcaaagctcccttcctgctgccgtctcagcctccgcaaagactgggagtaccatggagtaccgggggggaaatatggagtactgccgaggaacgtgggagccacagagagaggcgccgcactgccggatccagagcaatgtagaaggcctatacctgactgatggggtccctttctcctgttgcaacccccactcaccccggccttgcctgcaaaaccgtctttcagactcctacgcccaccccctgttcgatccccgacaacccaaccaaaacctctgggcccaagggtgccatgaggtgctgctggagcacttgcaggacttggcaggcacactgggtagcatgctggctgtcaccttcctactgcaggctctggtgctccttggcctgcggtacctgcaaacagcactggaggggcttggaggggtcattgatgcgggaggagagacccagggctatctctttcccagtgggctgaaagatatgctgaaaacagcatggctacagggaggggttgcctgcaggccagcacctgaggaggccccaccaggagaagcacctcccaaggaggatctatctgaggcctagaggcctggagcttggggtgaggaagagggagggatggacaagtctgaaaacctcacaactccttaccaaggctccaggttggggggatcgtaggattagaggggctaaggatagtcagcgagctggactggggtaagaaagaaaaccagatgtcctagggcctagcccttgtagtcagaaccaccagggaacagcaaagaacagagtgatgggaaagtgacatgagaaggcctggaggctgattctgatatagactcaata

SEQ ID NO: 175273 - DNA, 587 bp, Homo sapiens
  Payload ID: 14423
  Gene Symbol: ROM1
  Gene Name: retinal outer segment membrane protein 1
  ENST ID: ENST00000525947
  CDS Start-End: 286-587
ccagccgggcaagtctgaatgcagctctataccctccctggcgaggggtcctgggcccgctgctggtggctggcacggctggtgggggggggctcctggtcgtcggcctcgggctagccctggctttgcctgggagtctggatgaggcgctggaggagggcctggtgactgccttggctcactacaaggacacagaggtgcctgggcactgtcaggccaaaaggctggtggatgagctgcaactgagccggatccagagcaatgtagaaggcctatacctgactgatggggtccctttctcctgttgcaacccccactcaccccggccttgcctgcaaaaccgtctttcagactcctacgcccaccccctgttcgatccccgacaacccaaccaaaacctctgggcccaagggtgccatgaggtgctgctggagcacttgcaggacttggcaggcacactgggtagcatgctggctgtcaccttcctactgcaggctctggtgctccttggcctgcggtacctgcaaacagcactggaggggcttggaggggtcattgatgcgggaggagagacccagggctatctc

SEQ ID NO: 175274 - DNA, 584 bp, Homo sapiens
  Payload ID: 14423
  Gene Symbol: ROM1
  Gene Name: retinal outer segment membrane protein 1
  ENST ID: ENST00000525801
  CDS Start-End: 409-584
gaatgctcgtccagaggggaggagacggtggtaaaggatcaagggcctccttctggcagggcaggcgagaaacctggcaaagctcccttcctgctgccgtctcagcctccgcaaagactgggagtaccatggagtaccgggggggaaatatggagtactgccgaggaacgtgggagccacagagagaggcgccgcactggtgagggcagggaccgcagccctccccacgcgcccccagcaagctcaggtctccagcgaaagctgagtaactgagccgggggaacaccaggagagagaacggggtgcgggaatggagtcatactgaggacccagagtacaagaaaagagatccagagtgacaggagagagtccggatccagagcaatgtagaaggcctatacctgactgatggggtccctttctcctgttgcaacccccactcaccccggccttgcctgcaaaaccgtctttcagactcctacgcccaccccctgttcgatccccgacaacccaaccaaaacctctgggcccaagggtgccatgaggtgctgctggagcacttgcaggacttggcaggcacactg

SEQ ID NO: 175275 - DNA, 1455 bp, Homo sapiens
  Payload ID: 14424
  Gene Symbol: RRH
  Gene Name: retinal pigment epithelium-derived rhodopsin homolog
  Uniprot ID: O14718
  ENST ID: ENST00000317735
  CDS Start-End: 35-1048
attatgaagggtgtttcggtatcttccctccaaaatgctaagaaataatttaggcaacagttcagactctaaaaatgaagatggctcggtcttttcacagactgaacacaatattgttgcaacttacttgattatggcaggtatgataagtattatcagcaacataatagttctgggcatcttcattaagtacaaggaacttcggacacccacaaatgcaattattattaacctggctgttactgatataggggtcagtagcattggctatcccatgtctgctgcctcagatctgtatggaagttggaaatttggatacgcaggctgtcaggtttatgctggattgaatattttttttggaatggcaagcattggattactcacggtcgtggctgtggaccgatacctgaccatctgccttcctgacgtagggagaagaatgaccaccaacacttacatcggcttgattctgggagcctggatcaatggcctgttttgggctttgatgcctatcatagggtgggctagttatgccccagatcctactggtgctacgtgtaccataaactggaggaaaaatgatagatcttttgtgtcttacaccatgacagttattgcgataaattttattgtgcccttgacagtgatgttttactgctattaccatgtcacgctatccattaaacatcacactaccagtgactgcactgagtccctcaacagagactggtcagatcagatagatgtaacaaagatgtctgtgatcatgatctgcatgtttctggtggcatggtccccttattccatcgtgtgcttatgggcttcttttggtgacccaaagaagattcctccccccatggccatcatagctccactgtttgcaaaatcttctacattctataacccctgcatttatgtggttgctaataaaaagtttcggagggcaatgcttgccatgttcaaatgtcagactcaccaaacaatgcctgtgacaagtattttacccatggatgtatctcaaaacccattggcttctggaagaatctgaaataagataaaaggacacactatcaaaacactttagttttttgacaatgcttttcttttaaatatgagcccatttagatcaagtgcagacatggatcattgtcctatgagagtgtaagctcctcaagcacagctcgtgcttctgtttgtgcactctggctgctgtagtgtatgcttctctgtgtcctgatatatcaacttattgctcatctcctttgatgaattaggcatcagaggttaaggtcccctttctttctccctattatggcatgcattacactgtactgatgacctttaacttgcctggctcctccattagaataaaagcagtcactaatttaatgttagaataaatgaataattctagataattactgaaatgagttgttggatgttcccagttagaat

SEQ ID NO: 175276 - DNA, 2610 bp, Homo sapiens
  Payload ID: 14425
  Gene Symbol: RPE65
  Gene Name: retinal pigment epithelium-specific protein 65kDa
  Uniprot ID: Q16518
  ENST ID: ENST00000262340
  CDS Start-End: 55-1656
tccttcttcattctgcagttggtgccagaactctggatcctgaactggaagaaaatgtctatccaggttgagcatcctgctggtggttacaagaaactgtttgaaactgtggaggaactgtcctcgccgctcacagctcatgtaacaggcaggatccccctctggctcaccggcagtctccttcgatgtgggccaggactctttgaagttggatctgagccattttaccacctgtttgatgggcaagccctcctgcacaagtttgactttaaagaaggacatgtcacataccacagaaggttcatccgcactgatgcttacgtacgggcaatgactgagaaaaggatcgtcataacagaatttggcacctgtgctttcccagatccctgcaagaatatattttccaggtttttttcttactttcgaggagtagaggttactgacaatgcccttgttaatgtctacccagtgggggaagattactacgcttgcacagagaccaactttattacaaagattaatccagagaccttggagacaattaagcaggttgatctttgcaactatgtctctgtcaatggggccactgctcacccccacattgaaaatgatggaaccgtttacaatattggtaattgctttggaaaaaatttttcaattgcctacaacattgtaaagatcccaccactgcaagcagacaaggaagatccaataagcaagtcagagatcgttgtacaattcccctgcagtgaccgattcaagccatcttacgttcatagttttggtctgactcccaactatatcgtttttgtggagacaccagtcaaaattaacctgttcaagttcctttcttcatggagtctttggggagccaactacatggattgttttgagtccaatgaaaccatgggggtttggcttcatattgctgacaaaaaaaggaaaaagtacctcaataataaatacagaacttctcctttcaacctcttccatcacatcaacacctatgaagacaatgggtttctgattgtggatctctgctgctggaaaggatttgagtttgtttataattacttatatttagccaatttacgtgagaactgggaagaggtgaaaaaaaatgccagaaaggctccccaacctgaagttaggagatatgtacttcctttgaatattgacaaggctgacacaggcaagaatttagtcacgctccccaatacaactgccactgcaattctgtgcagtgacgagactatctggctggagcctgaagttctcttttcagggcctcgtcaagcatttgagtttcctcaaatcaattaccagaagtattgtgggaaaccttacacatatgcgtatggacttggcttgaatcactttgttccagataggctctgtaagctgaatgtcaaaactaaagaaacttgggtttggcaagagcctgattcatacccatcagaacccatctttgtttctcacccagatgccttggaagaagatgatggtgtagttctgagtgtggtggtgagcccaggagcaggacaaaagcctgcttatctcctgattctgaatgccaaggacttaagtgaagttgcccgggctgaagtggagattaacatccctgtcacctttcatggactgttcaaaaaatcttgagcatactccagcaagatatgtttttggtagcaaaactgagaaaatcagcttcaggtctgcaatcaaattctgttcaattttagcctgctatatgtcatggttttaacttgcagatgcgcacaattttgcaatgttttacagaaagcactgagttgagcaagcaattcctttatttaaaaaaaaaagtacgtatttagataatcatacttcctctgtgagacaggccataactgaaaaactcttaaatatttagcaatcaaataggaaatgaatgtggacttactaaatggcttttaattcctattataagagcatattttaggtacctatctgctccaattatatttttaacatttaaaaaccaaagtcctctacacttgatttatattatatgtggctttgctgagtcaaggaagtatcatgcaataaggcttaattactaaatgtcaaaccaaactttttctcaaaccagggactatcatctaagattaattacagtaattattttgcgtatacgtaactgctcaaagattatgaatcttatgaatgttaacctttccgtttattacaagcaagtactattatttctgattttataataagaaaatctgtgtttaatcaactgaggcctctcaaccaaataacatctcagagattaagttatatattaaaagcttatgtaacataaaagcaagtacatatagtagtgactatatttaaaaaaacagcataaaatgcttaaaaatgtaatatttactaaaatcagattatgggataatgttgcaggattatactttattgcatcttttttgtttaattgtatttaagcattgtgcaatcacttgggaaaaatattaaattattaacattgaggtattaatacattttaagccttttgtttttaaatttcttttcttccagagattgtttaaaaataaatattgacaaaaataa

SEQ ID NO: 175277 - DNA, 1810 bp, Homo sapiens
  Payload ID: 14426
  Gene Symbol: RLBP1
  Gene Name: retinaldehyde binding protein 1
  Uniprot ID: P12271
  ENST ID: ENST00000268125
  CDS Start-End: 441-1394
ggcctctcccctctcccctttctctctgggtcttcctttgccccactgagggcctcctgtgagcccgatttaacggaaactgtgggcggtgagaagttccttatgacacactaatcccaacctgctgaccggaccacgcctccagcggagggaacctctagagctccaggacattcaggtaccaggtagccccaaggaggagctgccgacctggcagggaacaaccaagactggggttaaatctcacagcctgcaagtggaagagaagaacttgaacccaggtccaacttttgcgccacagcaggctgcctcttggtcctgacaggaagtcacaacttggccctgacttcctatcctagggaaggggccggctggagaggccaggacagagaaagcagatcccttctttttccaaggactctgtgtcttccataggcaacatgtcagaaggggtgggcacgttccgcatggtacctgaagaggaacaggagctccgtgcccaactggagcagctcacaaccaaggaccatggacctgtctttggcccgtgcagccagctgccccgccacaccttgcagaaggccaaggatgagctgaacgagagagaggagacccgggaggaggcagtgcgagagctgcaggagatggtgcaggcgcaggcggcctcgggggaggagctggcggtggccgtggcggagagggtgcaagagaaggacagcggcttcttcctgcgcttcatccgcgcacggaagttcaacgtgggccgtgcctatgagctgctcagaggctatgtgaatttccggctgcagtaccctgagctctttgacagcctgtccccagaggctgtccgctgcaccattgaagctggctaccctggtgtcctctctagtcgggacaagtatggccgagtggtcatgctcttcaacattgagaactggcaaagtcaagaaatcacctttgatgagatcttgcaggcatattgcttcatcctggagaagctgctggagaatgaggaaactcaaatcaatggcttctgcatcattgagaacttcaagggctttaccatgcagcaggctgctagtctccggacttcagatctcaggaagatggtggacatgctccaggattccttcccagcccggttcaaagccatccacttcatccaccagccatggtacttcaccacgacctacaatgtggtcaagcccttcttgaagagcaagctgcttgagagggtctttgtccacggggatgacctttctggtttctaccaggagatcgatgagaacatcctgccctctgacttcgggggcacgctgcccaagtatgatggcaaggccgttgctgagcagctctttggcccccaggcccaagctgagaacacagccttctgaaaacatctcctgccagctgaactgtagttagaatctctgggcctctcctcaactgtcctggacccaaggctaggaaagggctgcttgagatgactgtggtccccccttagactccctaagcccgagtgagctcaggtgtcaccctgttctcaagttgggggatgggtaataaaggagggggaattcccttgaacaagaagaactggggatagttatatttccacctgcccttgaagctttaagacagtgatttttgtgtaaggttgtatttcaaagactcgaattcattttctcagtcatttcctttgtaacagagttttacgacttagagtctgtgaaaacaggcaaggagcccgggttaaaatatccccctattcgcccccaaaatgcaataaaagaagataaaagagagagga

SEQ ID NO: 175278 - DNA, 609 bp, Homo sapiens
  Payload ID: 14426
  Gene Symbol: RLBP1
  Gene Name: retinaldehyde binding protein 1
  ENST ID: ENST00000563254
  CDS Start-End: 1-326
tcaatggcttctgcatcattgagaacttcaagggctttaccatgcagcaggctgctagtctccggacttcagatctcaggaagatggtggacatgctccagccatggtacttcaccacgacctacaatgtggtcaagcccttcttgaagagcaagctgcttgagagggtctttgtccacggggatgacctttctggtttctaccaggagatcgatgagaacatcctgccctctgacttcgggggcacgctgcccaagtatgatggcaaggccgttgctgagcagctctttggcccccaggcccaagctgagaacacagccttctgaaaacatctcctgccagctgaactgtagttagaatctctgggcctctcctcaactgtcctggacccaaggctaggaaagggctgcttgagatgactgtggtccccccttagactccctaagcccgagtgagctcaggtgtcaccctgttctcaagttgggggatgggtaataaaggagggggaattcccttgaacaagaagaactggggatagttatatttccacctgcccttgaagctttaagacagtgatttttgtgtaaggttgtatttcaaagactcgaa

SEQ ID NO: 175279 - DNA, 782 bp, Homo sapiens
  Payload ID: 14426
  Gene Symbol: RLBP1
  Gene Name: retinaldehyde binding protein 1
  ENST ID: ENST00000567787
  CDS Start-End: 245-460
gcctccagcggagggaacctctagagctccaggacattcaggtaccaggtagccccaaggaggagctgccgacctggcagggaacaaccaagactggggttaaatctcacagcctgcaagtggaagagaagaacttgaacccagccctgacttcctatcctagggaaggggccggctggagaggccaggacagagaaagcagatcccttctttttccaaggactctgtgtcttccataggcaacatgtcagaaggggtgggcacgttccgcatggtacctgaagaggaacaggagctccgtgcccaactggagcagctcacaaccaaggaccatggacctgtctttggcccgtgcagccagctgccccgccacaccttgcagaaggccaaggatgagctgaacgagagagaggagacccgggaggagcctgtccccagaggctgtccgctgcaccattgaagctggctaccctggtgtcctctctagtcgggacaagtatggccgagtggtcatgctcttcaacattgagaactggcaaagtcaagaaatcacctttgatgagatcttgcaggcatattgcttcatcctggagaagctgctggagaatgaggaaactcaaatcaatggcttctgcatcattgagaacttcaagggctttaccatgcagcaggctgctagtctccggacttcagatctcaggaagatggtggacatgctccaggattccttcccagcccggttcaaagccatccacttcatccaccagccatggtacttcacc

SEQ ID NO: 175280 - DNA, 7100 bp, Homo sapiens
  Payload ID: 14427
  Gene Symbol: RP1
  Gene Name: retinitis pigmentosa 1 (autosomal dominant)
  Uniprot ID: P56715
  ENST ID: ENST00000220676
  CDS Start-End: 149-6619
gacatactgagaataaatccaaagacattagtttctttgcacgaaatgaggttacatatccagtgacatttatttgagctatttaaacaacttaaacatctttttcttttcttaataagggacgtttcaagttgtggtctcagccaaaatgagtgataccccttctactggtttttccatcattcatcctacgtcttctgaaggtcaagttccaccccctcgccatttgagcctcactcatcctgttgtggccaagcgaatcagtttctacaagagcggagacccccaattcggcggggtcagggtggtggtcaaccctcgctcctttaagtcctttgatgctctgctggataacttgtccaggaaggtgcccctcccttttggagtgaggaacatcagcacccctcggggcaggcacagcatcacgcgcctggaggagctggaggacggcgagtcctacctatgttcccacggcaggaaggtgcagcctgtagacctggacaaagcccgtcggcgcccgcggccctggctcagcagccgggccattagcgcgcactcaccgccccaccccgtagccgtcgctgctcccggcatgccccgccccccacggagcctagtggtcttcaggaatggcgacccgaagacgaggcgtgcggttcttctgagcaggagggtcacccagagcttcgaggcatttctacagcacctgacagaggtcatgcagcgccctgtggtcaagctgtacgctacggacggaaggagggttcccagcctccaggcagtgatcctgagctctggagctgtggtggcggcaggaagggagccatttaaaccaggaaattatgacatccaaaaatacttgcttcctgctagattaccagggatctctcagcgtgtgtaccccaagggaaatgcaaagtcagaaagcagaaagataagcacacatatgtcttcaagctcaaggtcccagatttattctgtttcttctgagaaaacacataataatgattgctacttagactattcttttgttcctgaaaagtacttggccttagaaaagaatgattctcagaatttaccaatatatccttctgaagatgatattgagaaatcaattatttttaatcaagacggcactatgacagttgagatgaaagttcgattcagaataaaagaggaagaaaccataaaatggacaactactgtcagtaaaactggtccttctaataatgatgaaaagagtgagatgagttttccaggaagaacagaaagtcgatcatctggtttaaagcttgcagcatgttcattctctgcagatgtgtcacctatggagcgaagcagtaatcaagagggcagtttggcagaggagataaacattcaaatgacagatcaagtggctgaaacttgcagttctgctagttgggagaatgctactgtggacacagatatcatccagggaactcaagaccaagcaaagcatcgtttttataggccccctacacctggactaagaagagtgagacaaaagaaatctgtgattggcagtgtgaccttagtatctgaaactgaggttcaagagaaaatgattggacagttttcatatagtgaagaaagggaaagtggggaaaacaagtctgagtatcacatgtttacacattcttgcagtaaaatgtcatcagtatctaacaaaccagtacttgttcagatcaataacaatgatcaaatggaggagtcatcattagaaagaaaaaaggaaaacagtctgcttaagtcaagtgcaataagtgctggtgttatagaaattacaagtcagaagatgttagagatgtcacataataatggtttgccatcaactatatcaaataactcaattgtggaggaagatgtagttgattgtgtggtattggacaacaaaactggtatcaagaacttcaaaacttatggtaacaccaatgataggttcagtcctatttcagcagatgcaacccatttttcaagtaataactctggaactgacaaaaatatttctgaggctccagcttcagaagcatcctctactgtcactgcaagaattgacagactaattaatgaatttgctcagtgtggtttaacaaaacttccaaaaaatgaaaagaagattttgtcatctgttgccagcaaaaagaagaaaaaatctcgacagcaagcaataaattccaggtatcaagatggacagcttgcaaccaaaggaattcttaataagaatgagagaataaacacaaaaggtagaattacaaaggaaatgatagtgcaagattcagatagtccccttaaaggagggatactttgtgaggaagacctccagaaaagtgatactgtaattgaatcaaatactttttgttccaaaagtaatctcaattccacgatttccaagaatttccatagaaataaattaaatactactcaaaattccaaggttcaaggacttttaaccaaaagaaaatctagatcactaaataaaataagcttaggagcacctaaaaaaagagaaatcggtcaaagagataaagtgtttcctcacaatgaatctaaatattgcaaaagtacttttgaaaacaaaagtttatttcatgtatttaacatccttgagcaaaaacccaaagatttttatgcaccgcaatctcaagcagaagtggcatctgggtatttgagaggaatggcaaagaagagtttagtttcaaaagttactgattcacacataactttaaaaagccagaaaaaacgtaaaggggataaagtgaaagcaagtgctattttaagtaaacaacatgctacaaccagggcaaattctttagcttctttgaaaaaacctgattttcctgaggctattgctcatcattcaattcaaaattatatacagagttggttgcagaacataaatccatatccaactttaaagcctataaaatcagctccagtatgtagaaatgaaacgagtgtggtaaattgtagcaataatagtttttcagggaatgatccccatacaaattctggaaaaataagtaattttgttatggaaagtaataagcacataactaaaattgccggtttgacaggagataatctatgtaaagagggagataagtcttttattgccaatgacactggtgaagaagatctccatgagacacaggttggatctctgaatgatgcttatttggttcccctgcatgaacactgtactttgtcacagtcagctattaatgatcataatactaaaagtcatatagctgctgaaaaatcaggaccagagaaaaaacttgtttaccaggaaataaacctagctagaaaaaggcaaagtgtagaggctgccattcaagtagatcctatagaagaggaaactccaaaagacctcttaccagtcctgatgcttcaccaattgcaagcttcagttcctggtattcacaagactcagaatggagttgttcaaatgccaggttcacttgcaggtgttccctttcattctgcaatatgtaattcatccactaatctccttctagcttggctcttggtgctaaacctaaagggaagtatgaatagcttctgtcaagttgatgctcacaaggctaccaacaaatcttcagaaacacttgcattgttggagattctaaagcacatagctatcacagaggaagctgatgacttgaaagctgctgttgccaatttagtggagtcaactacaagccactttggactcagtgagaaagaacaagacatggttccaatagatctttctgcaaattgttccacggtcaacattcagagtgttcctaagtgcagtgaaaatgaaagaacacaaggaatctcctctttggatggaggttgctctgccagtgaggcatgtgcccctgaagtctgtgttttggaagtgacttgctctccatgtgagatgtgcactgtaaataaggcttattctccaaaagagacatgtaaccccagtgacactttttttcctagtgatggttatggtgtggatcagacttctatgaataaggcttgtttcctaggagaggtctgttcacttactgatactgtgttttctgataaggcttgtgctcaaaaggagaaccatacctatgagggagcttgcccaattgatgagacctacgttcctgtcaatgtctgcaataccattgactttttaaactccaaagaaaacacatatactgataacttggattcaactgaagagttagaaagaggtgatgacattcagaaagatctaaatattttgacagaccctgaatataaaaatggatttaatacattggtgtcacatcaaaatgtcagtaatttaagctcctgtggcctttgcctaagtgaaaaagaagcagaacttgataagaaacatagttctctagatgattttgaaaattgttcactaaggaagtttcaggatgaaaatgcatatacttcctttgatatggaagaaccacggacttctgaagaaccaggctcaataaccaacagcatgacatcaagtgaaagaaacatttcagaattggaatcttttgaagaattagaaaaccatgacactgatatctttaatacagtggtaaatggaggagagcaagccactgaagaattaatccaagaagaggtagaggctagtaaaactttagaattgatagacatctctagtaagaatattatggaagaaaaaagaatgaacggtataatttatgaaataatcagtaagaggctggcaacaccaccatctttagatttttgctatgattctaagcaaaatagtgaaaaggagaccaatgaaggagaaactaagatggtaaaaatgatggtgaaaactatggaaactggaagttattcagagtcctctcctgatttaaaaaaatgcatcaaaagtccagtgacttctgattggtcagactatcggcctgacagtgacagtgagcagccatataaaacatccagtgatgatcccaatgacagtggcgaacttacccaagagaaagaatataacataggatttgttaaaagggcaatagaaaaactgtacggtaaagcagatattatcaaaccatctttttttcctgggtctacccgcaaatctcaggtttgtccttataattctgtggaatttcagtgttccaggaaagcaagtctttatgattctgaagggcagtcatttggctcttctgaacaggtatctagtagttcatctatgttgcaggaattccaggaggaaagacaagataagtgtgatgttagtgctgtgagggacaattattgtaggggtgacattgtagaacctggtacaaaacaaaatgatgatagcagaatcctcacagacatagaggaaggagtactgattgacaaaggcaaatggcttctgaaagaaaatcatttgctaaggatgtcatctgaaaatcctggcatgtgtggcaatgcagacaccacatcagtggacaccctacttgataataacagcagtgaggtaccatattcacattttggtaatttggccccaggcccaacgatggatgaactctcctcttcagaactcgaggaactgactcaaccccttgaactaaaatgcaattactttaacatgcctcatggtagtgactcagaaccttttcatgaggacttgctggatgttcgcaatgaaacctgtgccaaggaaagaatagcaaatcatcatacagaggagaagggtagtcatcagtcagaaagagtatgcacatctgtcactcattcctttatttctgctggtaacaaagtctaccctgtctctgatgatgctattaaaaaccaaccattgcctggcagtaatatgattcatggtacacttcaggaagctgactctttggataaactgtatgctctttgtggtcaacattgcccaatactaactgttattatccaacccatgaatgaggaagaccgaggatttgcatatcgcaaagaatctgatattgaaaatttcttgggtttttatttatggatgaaaatacacccatatttacttcagacagacaaaaatgtgttcagggaagagaacaataaagcaagtatgagacaaaatcttattgataatgccattggtgatatatttgatcagttttatttcagtaacacatttgacttgatgggtaaaagaagaaaacaaaaaagaattaacttcttggggttagaggaagaaggtaatttaaagaaatttcaaccagatttgaaggaaaggttttgtatgaatttcttgcacacatcattgttagttgtgggtaatgtggattcaaatacacaagacctcagcggtcagacaaatgaaatctttaaagcagtcgatgagaataacaacttattaaataacagattccagggctcaagaacaaatctcaaccaagtagtaagagaaaatatcaactgtcattacttctttgaaatgcttggtcaagcttgcctcttagatatttgccaagttgagacctccttaaatattagcaacagaaatattttagaactttgtatgtttgagggtgaaaatcttttcatttgggaagaggaagacatattaaatttaactgatcttgaaagcagtagagaacaagaagatttataatttcaatatcagcacactcattctttgtcaattcattttttcccatgagatgaagcacatgtgacgaatacggactagataacctctaagaattttccacttcttcaaaatgaacttactctagaaagcttacccttggataaccagtttgactttcataatgtctctgttttttgtttttccaacaattacagactcaggttctcttattttggaagtttctatctggttttgttctgaacttacattttttttttttttggtatctatgattttttttgctcagggcatcaaaatgtgctaaggacaagaattatatcctttttaaaaaatgttgttagcttggtgtaaaatgtatattgactgtattggtgaataaattgaatagacataacctcaaagtacttcacttattctttttaactactgatttgataaaaagtatgattataagatatccacgacaatctcatagtttctt

SEQ ID NO: 175281 - DNA, 7973 bp, Homo sapiens
  Payload ID: 14428
  Gene Symbol: RP1L1
  Gene Name: retinitis pigmentosa 1-like 1
  ENST ID: ENST00000382483
  CDS Start-End: 225-7427
gcccaagggactggggcctcaggctctcaggccaaggagagtggccccgaggactgtccggaggagggtggccagccctgctgcccagagggactgagccactggcagggaaggaggcggtgttccccctggcctgactttcctccaaaggacgtccccctgaggcttaggggctgagccatgcccttgtgctccctggaggacgcggccagagcccccacaccatgaacagcacccccaggaatgcccaggccccgagccaccgtgagtgcttcctgccctctgtggctcgcaccccctcggtcaccaaggtcacgccagccaagaagatcaccttcctcaagcgaggggatccacggtttgctggggtccgcctggccgttcaccagcgcgcctttaagaccttcagcgccctcatggacgagctctcccagcgcgtgcctctctcctttggggtgcgctctgtcaccacaccccggggcctgcatagcctcagcgccctggagcagctggaagatggaggctgctacctctgctctgataagaagccccccaagacccccagtggaccaggccggccacaggagagaaaccccactgctcagcagttgcgggatgtcgaaggccagcgtgaagccccaggcacctcctcctcccggaagagtcttaaaaccccccggaggatactgctgattaagaacatggaccctcgcctccagcagacagtggttctcagtcacaggaatactaggaacctggccgcctttctcggcaaagcctcagatctcctgcgctttcctgtgaagcagttgtacacgaccagcgggaaaaaggtggactcgctgcaggccctgctgcacagcccctctgtgctggtgtgtgccgggcatgaggccttcagaaccccagccatgaaaaatgccaggagaagcgaggctgaaactttatctgggctgacttcaagaaacaaaaacgggagctgggggccaaagaccaagccgagtgtgatccattcgcggtctccgccaggcagcacgccacggctgccagaaaggcctggtcctagcaaccccccggtgggccctgctcctggcaggcaccctcaggacacgccagctcagtcgggcccgctggtggctggcgatgacatgaagaagaaggtccgcatgaatgaggacggcagcctgtccgtggagatgaaagtccgcttccacctggtcggcgaggacacgctcctatggtcccggaggatgggcagggccagcgccctcacggcagccagtggggaagaccccgttctgggggaggtagaccccctctgctgtgtgtgggagggctacccttggggcttctcagagcctggggtgtggggaccccggccctgcagggtgggatgcagggaagtctttggccgaggcgggcagccagggcccaagtatgaaatctggacgaatcccctgcatgcctcccagggagagagagtggcagctcggaagaggtggggactggcccagcacgtccgctgcagtggcctgtggggccacgggactgccgggagggagagatgcagccaggacagtgccagcccagcctccagcaccggcctccccgagggctcggagccagagtcctcctgctgccccaggaccccggaggacggggtggacagtgccagcccctctgcccagataggggctgagcggaaagctggagggagcctgggtgaggaccccggcctatgcatagatggagcagggctgggcggcccagagcaaggcggccgcctgacaccgagggcccggagtgaggagggggcttcttcggactcgtcagccagcaccggctctcatgagggatccagcgaatggggtgggcggccccagggctgtccaggcaaggcaagggccgagacctctcagcaggaggccagcgagggaggcgaccccgcttctccagccctgagtctttcatctttaaggagtgacgacctgcaggcagagacgcaaggacagggcaccgagcaggccacgggagcggctgtgacaagggagcctctggttctgggcctttcctgctcctgggactcggaaggagcctcttccaccccttccacctgcacttcatcccagcaggggcagagaaggcacagaagccgggccagtgcaatgtcctcacccagcagccctggccttggccgagtggccccgagaggccatcccaggcattctcactaccgcaaggacacccacagcccactggactcctctgtaaccaagcaagtgccgaggcctcctgagcggcgaagggcctgccaggatggctcagtgccacgatattctggaagctcatcgagcaccaggacacaggcctctgggaacctgagacctccctcctcgggctctcttccttcccaggaccttctgggaaccagcagtgccactgtcacccctgcagtccactcggattttgtttctggagtctccccgcacaacgctccctctgccgggtgggcaggggacgcggggtccaggacatgctcgccggcccccatacctccccacacatccgactcctgctcaaaatctggggctgccagcctgggggaagaggccagggacacgcctcagccctcctcacccttggttctgcaggttggacggcctgagcaaggggcggtgggcccccaccgaagccactgctgctcacagcctgggacgcagccggcccaagaggcccagcggggaccctcccctgaggctagctggctgtgtggcaggtactgtcccaccccgcccagggggcggccctgcccccagaggcgctcttccagctgtgggagcaccggcagcagccaccaaagcactgcccgggggccaggtgggagcccgcaggaggggacacgccagccaggccccacgccgtccccaggccccaattcaggggcatcaaggagaagcagtgccagccagggtgcggggtctcgggggctgtccgaggagaagaccttgaggagtgggggaggcccccaggggcaggaggaggccagtggtgtgtcacccagctctctgccccgctcgtctccagaggctgtggtccgcgaatggctggacaacattccagaagagcccatactcatgacatatgagttggcggacgagaccacaggtgcagctgggggtggcctgagaggccccgaggtggaccctggggatgaccattctctggaaggcctgggggagccagctcaggcgggacagcagtccctggaaggggaccccggccaggacccagagccagagggagccctcctggggagtagtgacactggtccccaatcaggagagggtgtcccccaaggggcagctccagagggagtttccgaggcccctgcagaggccggagcagacagagaggccccagcaggctgcagggtgagcctgcgggcacttcctggccgggtgtctgcctccacgcagatcatgagggcgctgatgggctccaagcagggccggcccagcagcgtgcccgaagtgtctaggcccatggccaggaggctcagctgctcagccggggccctcattacttgtctggccagtctgcagttatttgaggaagaccttgggtctcctgccagcaaagtgaggttcaaagactcccctcggtaccaggagctgctcagcatctcgaaggacctgtggccaggatgtgacgttggggaagaccagctggactcaggcctctgggagctcacatggagccaggctctgccagaccttgggtcccatgccatgacggagaacttcacgcccacatcctcctctggtgtggacatcagcagcggctctggaggctcaggggagagtagcgtaccctgtgccatggacggcaccctggtgacacaggggacagagctgcccctgaaaacctccaaccagaggcctgattcaagaacttatgagagcccaggggatctggaaaaccaacagcagtgttgtttcccaaccttcttgaacgcccgagcctgcgcttgtgccaccaatgaggatgaagcagaaagagacagtgaggagcagagggcgagctcgaacctggagcagttagctgaaaacacagtgcaagaagaggtgcaattagaggaaactaaagaaggaacagaaggagaagggctgcaagaagaggcggtgcagttagaggaaactaaaacagaagaagggctgcaagaagagggggtgcagttagaggaaactaaagaaacagaaggagaaggacagcaagaagaagaggcgcagttagaggaaattgaagaaacaggaggagaagggctgcaagaagagggggtgcagttagaggaagttaaagaagggccagaaggaggactgcaaggagaggctcttgaagagggtctcaaagaggaaggacttccagaagaaggaagcgtccacgggcaggaattgtcagaggccagctctccggatgggaaaggctcccaggaagatgacccagtccaggaggaggaagcaggaagagcctctgcctctgcagagccgtgccccgcagagggcacagaggaacccacagagccccctagtcatctcagcgagacggacccaagtgccagcgagaggcagagtggctcccagcttgagcctggtttggaaaagccgcccggagccaccatgatgggccaagagcacacgcaggcccaacccacccagggggctgcagagaggagctcttcggtggcctgcagcgcggctctggactgcgaccccatctgggtgtccgtgttactgaagaagacggagaaggccttcctggcccaccttgccagtgcggtggctgagctccgagcacgctggggcctgcaggacaatgatctgctggaccagatggcggccgagctgcagcaggacgtggcccaacgcctccaggacagcaccaagagagagctccagaagctccagggccgggcgggtaggatggtgctggagcctccaagggaggccctcaccggggagctgctcctgcagacccagcagcgcagacaccgtctccggggcctgcgaaacctctcggccttctctgagcggaccctgggcctggggcccctctccttcaccctggaggacgagccagccctcagcacagccctggggagccagctgggcgaggaggcggagggggaggagttctgtccctgcgaggcctgcgtgaggaagaaagtgagccctatgtcccccaaggccacaatgggggcaaccagaggtcccatcaaagaggcctttgacctgcagcagattctgcagaggaagaggggagaacacactgatggggaggcagcagaggtggcccctggcaagacccacacggaccccacgagcactaggactgtccagggagctgagggagggctggggccggggctgagccaggggcctggagtggacgagggtgaggatggcgaggggagccagagactcaacagagacaaagatcccaaactcggggaggcagagggagatgcaatggctcaggagagagaagggaaaacccacaacagtgaaaccagtgcgggcagtgagttgggggaagctgagcaggagggagagggcataagtgaaaggggagaaactgggggtcaaggctctgggcatgaggacaacttgcagggtgaagctgcggcaggaggtgaccaagatccaggacagagtgatggggccgaaggcatagaggccccggaggctgaaggggaggcccagccagagtcagaaggtgtagaggccccagaggcagaaggggatgcccaggaggctgaaggggaggcccagccagagtcagaagatgtagaggccccagaggcagaaggagaggcccagccagagtcagaagatgtagagaccccagaggcagaatgggaggtccagccagagtcagaaggtgcagaagccccggaggcagaaaaggaggcccagccagagacagaaagtgtagaggccctggagactgaaggggaggacgagccagagtcagaaggtgcagaggcccaagaggcagaagaggcggcccaggaggcagaagggcagacccagccagagtcagaagttatagagtcccaggaggcagaagaggaagcccagccagagtcagaagatgtagaggccctggaggttgaagtggagacccaggaggcagaaggggaggcccagccagagtcagaagatgtagaggccccagaggctgaaggggagatgcaagaggcagaagaggaggcccagccagagtcagacggtgtagaggcccagccaaagtcagaaggtgaagaggcccaggaggttgaaggggagacccagaagacagaaggggatgcccagccagagtcagacggtgtagaggccccggaggcagaagaggaggcacaggaggctgaaggggaggtccaggaggcagaaggggaggcccacccagagtcagaagatgtagatgcccaggaggcagaaggggaggcccagccagaatcagaaggtgtagaggccccagaggcagaaggggaggcccagaaggcagaaggtatagaggccccagagactgaaggggaggcccagccagagtcagaaggtatagaggccccagaggctgaaggggaggcccagcctgagtcagaaggtgtagaggcccaggatgcagaaggggaggcccagccagagtcagaaggtatagaggcccaggaggctgaagaggaggcccaaccagagttagaaggtgtagaggccccagaggcagaaggggaggcccagccagagtcagaaggtatagaggccccagaggcagaaggggaggcccaaccagagttagaaggtgtagaggccccggaggctgaagaggaggcccagccagagccagaaggcgtagagaccccggaggctgaaggggaggcccagccagagtcagaaggagaaactcaaggtgagaaaaaggggagccctcaggtcagtctaggagatggccaatctgaggaggcttctgaaagcagcagcccagtccctgaggacaggcccactccacccccttccccaggtggagacactccccaccaaaggccaggctcccaaacaggcccttcctcctccagagcatcctcttggggcaactgctggcagaaagactcagaaaatgaccatgtacttggagacacaaggagccctgatgccaagtccacggggacccctcatgcagagaggaaggccaccaggatgtacccagaaagttctacttctgagcaagaagaggcccctttgggctcaaggactccagagcagggggccagtgaaggttatgacctacaagaggaccaggcactcggaagtctcgcccccactgaggcagtgggcagggcagacggctttggccaagatgacttagatttctagacaagatcaagctagaaaacaatcacgagcttgggagctctgtttttattcatattttttctacaaaactgagcaacgttcagtccactggagatgtccatagtacatggacaaagaccaaggacttgccaaggacacagcccatgccatgctgtcctgggactcttaagtccagaagtgtcagagagctctgcggcccgtcccacacgcagtgtgaagaaagggggtgtctgcggatctgcccggttatcggaggtcagcccggctcctatttatttgtctgcagagcccgaaagatggaactgattggaaaggctccagtttagcttttgtttgtgggtttgttttctgctagcaagtgttgctctctgtcttttccctgttgatctcctgttacttttctccttggcttctgttggcactcacctcatttgactttgaggtgctttttttctagtcttgaatatatttgatgactctgcagaaatacttgggcaaagcaggtaacttcagagtcattggataaagtttgttctcaactccaaa

SEQ ID NO: 175282 - DNA, 3803 bp, Homo sapiens
  Payload ID: 14429
  Gene Symbol: RP2
  Gene Name: retinitis pigmentosa 2 (X-linked recessive)
  Uniprot ID: O75695
  ENST ID: ENST00000218340
  CDS Start-End: 162-1214
ggggtgctgggcctggcgggcaaactaaggctgcggaccgttgggcggttccgcggggcgttgtccggagagctgcgaggccggggttcccagggttcacgccacactctaggaagtgcctgagctagtgagctggccaacgagctccgcgggctgggaccatgggctgcttcttctccaagagacggaaggctgacaaggagtcgcggcccgagaacgaggaggagcggccaaagcagtacagctgggatcagcgcgagaaggttgatccaaaagactacatgttcagtggactgaaggatgaaacagtaggtcgcttacctgggacggtagcaggacaacagtttctcattcaagactgtgagaactgtaacatctatatttttgatcactctgctacagttaccattgatgactgtactaactgcataatttttctgggacccgtgaaaggcagcgtgtttttccggaattgcagagattgcaagtgcacattagcctgccaacaatttcgtgtgcgagattgtagaaagctggaagtctttttgtgttgtgccactcaacccatcattgagtcttcctcaaatatcaaatttggatgttttcaatggtactatcctgaattagctttccagttcaaagatgcagggctaagtatcttcaacaatacatggagtaacattcatgactttacacctgtgtcaggagaactcaactggagccttcttccagaagatgctgtggttcaggactatgttcctatacctactaccgaagagctcaaagctgttcgtgtttccacagaagccaatagaagcattgttccaatatcccggggtcagagacagaagagcagcgatgaatcatgcttagtggtattatttgctggtgattacactattgcaaatgccagaaaactaattgatgagatggttggtaaaggctttttcctagttcagacaaaggaagtgtccatgaaagctgaggatgctcaaagggtttttcgggaaaaagcacctgacttccttcctcttctgaacaaaggtcctgttattgccttggagtttaatggggatggtgctgtagaagtatgtcaacttattgtaaacgagatattcaatgggaccaagatgtttgtatctgaaagcaaggagacggcatctggagatgtagacagcttctacaactttgctgatatacagatgggaatatgaagtgcaatgtggaaccaggacttggtattaagcctttcccaacttgtgaatatagaatttgataatacacttttgtgtattagcaatggtttttactaatgctaaaacttttaaagtttattttttaataaattgttgagtattacatcatttacttgaggttcaaaaataattcattttaaattaagtagttttaatcagcttaaaagctatttaacccattttaataagcttgcagttttgtttctctgcatatgatattcttattagaaaacagaagtagctaaaagtttattattttaatcctatttaaatgttctttcaaatctctaataatttaaactttcctcagtgctccatgatactttttttgagactccatatcattgcttattttacctttttcaatttagagggatttgttactagtcgatcaattagaatgaacctatgcacatttttatgtacacatatccagttatataattgcttcctagttgcattatatggcaaatgagattttgtacatggagttgacataatactttgtaaattgaattttttaaagaaataggcatttgataaccagcttggcaagtaactctactaacagatgttggtatagctatttaaagactacttcgtaagtagtatgattatttgaataaattacacattgtttagttttttaatacaactgctatatgactcttctgcttcctgataagaaaaggtatatgcaatgctaaaactgtagaagcccaatcaccagcagtttttaaaaaggtgataacttttattagctcttgtgggctatcaagagaattggaacaaaaccttgtgacttttaggtaagaaataggcatgatgataagctatgcagattattaaaaagcttgatacatttgatttttcattagatatgccattcatatcaagtaatgttcaagtatgataaaattattttggttgctttaaagcactgtttcccaaatctacctgatcataataatttaccaggaagcagaggagagctacttgtttaaaaatccacattcttggacccaatcctcagatgcacggattcagtcttcaggggaaactctgttttaaggggtatgttgtaatctaaagtaattggttcaggaggtgtcaataggttgaacttgtgagaaggcactgaatctgccatccacatcacatatagcagctattatgaaatcagctttcataggcctatttttaaaaggaatctgaaatttaattctattttgataaaactaagactgaaaataaccacttgtaaacattcctatgattgttactaaaatgtattttcatgtttaaaatgtttttggatatttttgggttaataactactacattgaattgcatgttaaggtgcagaaataatacattaaaagattttcactttaaattaattagtaatattgagcgctcaccctgtgcgtggccttgtgctaaccattagcactgcatcatttcaattcttttataagggcattcaatactacaaaatcaacatgatttcataaggtgcaaataaaagttggtgacagatttaatataattttgatcacaatttacaaatgatctttgcaaatagtggtcagacggcattagtttttcccttagttaagctaaattaaagggactccatcctgttatgattatattattattattattattattatttttgaggtggagtttcactcttgttgcccaagctggagtgcaatggcgcgatctcggctcaccacaacatccgcctcctgggttcaagcgattctcctgcctcagcctcctgagtagctgggaatacaggcatgcgccactacacctggctaatttttgtatttttagttgagatggggtttttccacgttggtcaggctggtctcgaactcctgacctcaggtgatccgtccacctcagcctcccaaagagctgggattacaggtgtgagctaccgcgcctggccatgatgatattattaaacaccattattcacatttcaaataataacaatactttttgtttttcaaaaataaaatgcaatgttatataaagctataaactaagttctttatgatatttgagcaacaactcaggaatataacatataagggagatgttaatttaaaaatttccactacacttattatctattaaccaaagcttaaaattttgtattcttctgttagataagaccttttacccatttaatttgtctttaaggacagtcatttggcttctgaatgtttgaaacgattttaaaaaataagtagtgctatggttgtttctataattctaacctttgatagtaatcagaatgtattacatttcatttctgaatagcttttgaatttatgaaaaattattaacaatgaaaaattggtaattttattaagttatatgtgtttaaatattatattagcttatttctcttgcattaatagtactgctgtttttgttttgcttctttatatttatgtctagcttttatatgtaatttatctagtgtttataaaatgtgatttgtaataaatgttgttaaaatgaaaa

SEQ ID NO: 175283 - DNA, 1121 bp, Homo sapiens
  Payload ID: 14430
  Gene Symbol: RP9
  Gene Name: retinitis pigmentosa 9 (autosomal dominant)
  Uniprot ID: Q8TA86
  ENST ID: ENST00000297157
  CDS Start-End: 19-684
ggcgctgcgggggctgacatgtcgtcccggcctgggcgcgaggacgtgggggctgcgggcgcgcggcggccgcgtgagccgccggagcaggagctgcagcgacgtcgggagcagaagcggcggcgacacgacgcgcagcagctgcagcagctcaagcacctggagtccttttacgaaaaacctcctcctgggcttatcaaggaagatgagactaagccagaagattgcataccagatgtaccaggcaatgaacacgccagggaatttctggctcatgcaccaactaaaggactttggatgccactggggaaagaagtcaaagttatgcagtgttggcgttgcaaacgctatggtcaccgaacgggtgacaaagaatgccctttctttatcaaaggcaaccaaaagttagagcagttcagagtggcacatgaagatcccatgtatgacatcatacgagacaataaacgacatgaaaaggacgtaaggatacagcagttaaaacagttactggaggattctacctcagatgaagataggagcagctccagttcctctgaaggtaaagagaaacacaagaaaaagaagaagaaagaaaagcataagaaaaggaagaaagaaaagaaaaagaagaaaaaacggaagcacaaatcttccaagtcaaatgagggttctgactcagagtgacaaggatgtgacttgttcaacattctcttctcaaacactgaccaaggaacagaggaagatgcagtcagagaaagcagcaggatagagacgccgagagaggagtatatgtgggtcacagcagtgagctcccacccgccttgcagtgaagatgtgaccccaggagagggagtgtctccttccaggtgctagctctggacagcagctgattttaggcaggaaagtttcttcatcgttgtcctccctgctggtcacatgagtttacgattcctttgaagtgtctcccacagggtggcaggactgggagaatctctgaggcgtgtcttccaggccctcccacagcttgtgccctccacagtgtggactcaggtcccatagacatcaggctggagtcttctctgttgttgagaataataaaagctcattatttattttttaaa

SEQ ID NO: 175284 - DNA, 629 bp, Homo sapiens
  Payload ID: 14430
  Gene Symbol: RP9
  Gene Name: retinitis pigmentosa 9 (autosomal dominant)
  ENST ID: ENST00000448915
  CDS Start-End: 131-629
aacacctcgccttcagaatttccttcccatcttgctgcctgtcccatctggagacttgcgtgctcagcattctgggtctcctctgggttcagtccctggatggaaataaggaaggcctggccagtcttagatggcaggtgccgctcagcacagggaggagaagcattctgctcttctcagttacgaaaaacctcctcctgggcttatcaaggaagatgagactaagccagaagattgcataccagatgtaccaggcaatgaacacgccagggaatttctggctcatgcaccaactaaaggactttggatgccactggggaaagaagtcaaagttatgcagtgttggcgttgcaaacgctatggtcaccgaacgggtgacaaagaatgccctttctttatcaaaggcaaccaaaagttagagcagttcagagtggcacatgaagatcccatgtatgacatcatacgagacaataaacgacatgaaaaggacgtaaggatacagcagttaaaacagttactggaggattctacctcagatgaagataggagcagctccagttcctctgaaggtaaagagaaacacaagaaaaagaagaagaaagaaaagcataagaaaaggaagaaagaaa

SEQ ID NO: 175285 - DNA, 3108 bp, Homo sapiens
  Payload ID: 14431
  Gene Symbol: RPGR
  Gene Name: retinitis pigmentosa GTPase regulator
  Uniprot ID: Q92834
  ENST ID: ENST00000318842
  CDS Start-End: 198-2645
aagctccgcccccgttgcccgtagcggctgtttgttgacttccgggagcgcggttgtagttgatctccggagtttcgccatgcggaacttgggggctttcgcggcccgcgtcggtgcggagtagctgctttagccccgaccaaaccgtcctctacagcctcctggccccggcgcaggctgcccgtactgcccgtggcatgagggagccggaagagctgatgcccgattcgggtgctgtgtttacatttgggaaaagtaaatttgctgaaaataatcccggtaaattctggtttaaaaatgatgtccctgtacatctttcatgtggagatgaacattctgctgttgttaccggaaataataaactttacatgtttggcagtaacaactggggtcagttaggattaggatcaaagtcagccatcagcaagccaacatgtgtcaaagctctaaaacctgaaaaagtgaaattagctgcctgtggaaggaaccacaccctggtgtcaacagaaggaggcaatgtatatgcaactggtggaaataatgaaggacagttggggcttggtgacaccgaagaaagaaacacttttcatgtaattagcttttttacatccgagcataagattaagcagctgtctgctggatctaatacttcagctgccctaactgaggatggaagactttttatgtggggtgacaattccgaagggcaaattggtttaaaaaatgtaagtaatgtctgtgtccctcagcaagtgaccattgggaaacctgtctcctggatctcttgtggatattaccattcagcttttgtaacaacagatggtgagctatatgtgtttggagaacctgagaatgggaagttaggtcttcccaatcagctcctgggcaatcacagaacaccccagctggtgtctgaaattccggagaaggtgatccaagtagcctgtggtggagagcatactgtggttctcacggagaatgctgtgtatacctttgggctgggacaatttggtcagctgggtcttggcacttttctttttgaaacttcagaacccaaagtcattgagaatattagggatcaaacaataagttatatttcttgtggagaaaatcacacagctttgataacagatatcggccttatgtatacttttggagatggtcgccacggaaaattaggacttggactggagaattttaccaatcacttcattcctactttgtgctctaattttttgaggtttatagttaaattggttgcttgtggtggatgtcacatggtagtttttgctgctcctcatcgtggtgtggcaaaagaaattgaattcgatgaaataaatgatacttgcttatctgtggcgacttttctgccgtatagcagtttaacctcaggaaatgtactgcagaggactctatcagcacgtatgcggcgaagagagagggagaggtctccagattctttttcaatgaggagaacactacctccaatagaagggactcttggcctttctgcttgttttctccccaattcagtctttccacgatgttctgagagaaacctccaagagagtgtcttatctgaacaggacctcatgcagccagaggaaccagattatttgctagatgaaatgaccaaagaagcagagatagataattcttcaactgtagaaagccttggagaaactactgatatcttaaacatgacacacatcatgagcctgaattccaatgaaaagtcattaaaattatcaccagttcagaaacaaaagaaacaacaaacaattggggaactgacgcaggatacagctcttactgaaaacgatgatagtgatgaatatgaagaaatgtcagaaatgaaagaagggaaagcatgtaaacaacatgtgtcacaagggattttcatgacgcagccagctacgactatcgaagcattttcagatgaggaagtagagatcccagaggagaaggaaggagcagaggattcaaaaggaaatggaatagaggagcaagaggtagaagcaaatgaggaaaatgtgaaggtgcatggaggaagaaaggagaaaacagagatcctatcagatgaccttacagacaaagcagaggatcatgaattttctaaaactgaggaactaaaactagaagatgtggatgaggaaattaatgctgaaaatgtggaaagcaagaagaaaactgtgggagatgatgaaagtgttcctacaggttatcacagtaaaacagaaggagcagaaagaaccaatgatgatagctcagctgaaactattgaaaagaaagaaaaagccaacctagaggaacgggccatttgtgagtacaatgaaaacccaaaaggatacatgcttgatgatgcagatagcagttcattagaaatcctagaaaacagtgaaacaacaccaagcaaagacatgaaaaaaacaaagaagatttttctgttcaaaagagtcccctcaataaatcaaaagattgtcaagaataacaatgagccgctcccagagataaaatccataggagaccagatcattttaaaaagtgataataaagatgccgaccagaaccacatgagtcagaatcatcagaatatcccaccaacaaatacagagagaagatcaaaatcctgtacaatactataaatatatatttatgttttcacagtcaccaagtgtattgtaatgtatacttgaaaaatgttataacttatgaagtaaagtttctgatagtagtctttaaaagatataagacttaatatgttttattcagcttctataagtgtgaccagttttgatatttatttatgctaatatttttaacaagtcatttcaaaatatgtgtatctcaaattctccctaaagtgttgtggccttaactgttcagtattgcaataaaaaatatatttttatatgtggaaaattgaaataagatatttcctagtttttactaaacaattttacttctttataattttataaggcaatatttgcaatcttacgacactgtaacagtttttgatgtatttacaatttttacaaaactgaggtaaaattgtttataatgaacatattttaataaactatatctggtcagttccactgttaa

SEQ ID NO: 175286 - DNA, 3686 bp, Homo sapiens
  Payload ID: 14431
  Gene Symbol: RPGR
  Gene Name: retinitis pigmentosa GTPase regulator
  Uniprot ID: Q92834
  ENST ID: ENST00000339363
  CDS Start-End: 169-3231
gtttgttgacttccgggagcgcggttgtagttgatctccggagtttcgccatgcggaacttgggggctttcgcggcccgcgtcggtgcggagtagctgctttagccccgaccaaaccgtcctctacagcctcctggccccggcgcaggctgcccgtactgcccgtggcatgagggagccggaagagctgatgcccgattcgggtgctgtgtttacatttgggaaaagtaaatttgctgaaaataatcccggtaaattctggtttaaaaatgatgtccctgtacatctttcatgtggagatgaacattctgctgttgttaccggaaataataaactttacatgtttggcagtaacaactggggtcagttaggattaggatcaaagtcagccatcagcaagccaacatgtgtcaaagctctaaaacctgaaaaagtgaaattagctgcctgtggaaggaaccacaccctggtgtcaacagaaggaggcaatgtatatgcaactggtggaaataatgaaggacagttggggcttggtgacaccgaagaaagaaacacttttcatgtaattagcttttttacatccgagcataagattaagcagctgtctgctggatctaatacttcagctgccctaactgaggatggaagactttttatgtggggtgacaattccgaagggcaaattggtttaaaaaatgtaagtaatgtctgtgtccctcagcaagtgaccattgggaaacctgtctcctggatctcttgtggatattaccattcagcttttgtaacaacagatggtgagctatatgtgtttggagaacctgagaatgggaagttaggtcttcccaatcagctcctgggcaatcacagaacaccccagctggtgtctgaaattccggagaaggtgatccaagtagcctgtggtggagagcatactgtggttctcacggagaatgctgtgtatacctttgggctgggacaatttggtcagctgggtcttggcacttttctttttgaaacttcagaacccaaagtcattgagaatattagggatcaaacaataagttatatttcttgtggagaaaatcacacagctttgataacagatatcggccttatgtatacttttggagatggtcgccacggaaaattaggacttggactggagaattttaccaatcacttcattcctactttgtgctctaattttttgaggtttatagttaaattggttgcttgtggtggatgtcacatggtagtttttgctgctcctcatcgtggtgtggcaaaagaaattgaattcgatgaaataaatgatacttgcttatctgtggcgacttttctgccgtatagcagtttaacctcaggaaatgtactgcagaggactctatcagcacgtatgcggcgaagagagagggagaggtctccagattctttttcaatgaggagaacactacctccaatagaagggactcttggcctttctgcttgttttctccccaattcagtctttccacgatgttctgagagaaacctccaagagagtgtcttatctgaacaggacctcatgcagccagaggaaccagattatttgctagatgaaatgaccaaagaagcagagatagataattcttcaactgtagaaagccttggagaaactactgatatcttaaacatgacacacatcatgagcctgaattccaatgaaaagtcattaaaattatcaccagttcagaaacaaaagaaacaacaaacaattggggaactgacgcaggatacagctcttactgaaaacgatgatagtgatgaatatgaagaaatgtcagaaatgaaagaagggaaagcatgtaaacaacatgtgtcacaagggattttcatgacgcagccagctacgactatcgaagcattttcagatgaggaagtaggtaatgacacaggccaggtgggacctcaggctgacactgatggagagggtttacaaaaagaggtatatagacatgaaaataataatggtgttgatcaacttgatgctaaggaaatagaaaaggaaagtgatggaggacacagtcagaaggaatcagaagcagaagaaatagacagtgagaaggaaactaaactggcagaaatagcaggtatgaaggatttaagagaaagggaaaagagtacaaaaaagatgagtcctttctttggcaacttaccagatagaggtatgaatactgagagtgaagaaaataaagattttgttaagaaaagggaaagttgcaagcaagatgtgatctttgacagtgaaagagaatcagtagaaaagccagacagttacatggaaggtgcaagtgagagtcaacagggtatagctgatggattccagcagcctgaggcaatagaatttagtagtggagagaaagaggatgatgaagtggaaactgaccaaaacatacggtatggcaggaaattgattgaacaaggaaatgaaaaagagactaaacccataatatccaaatccatggcaaagtatgattttaaatgtgatcgcttgtcagagatcccagaggagaaggaaggagcagaggattcaaaaggaaatggaatagaggagcaagaggtagaagcaaatgaggaaaatgtgaaggtgcatggaggaagaaaggagaaaacagagatcctatcagatgaccttacagacaaagcagaggatcatgaattttctaaaactgaggaactaaaactagaagatgtggatgaggaaattaatgctgaaaatgtggaaagcaagaagaaaactgtgggagatgatgaaagtgttcctacaggttatcacagtaaaacagaaggagcagaaagaaccaatgatgatagctcagctgaaactattgaaaagaaagaaaaagccaacctagaggaacgggccatttgtgagtacaatgaaaacccaaaaggatacatgcttgatgatgcagatagcagttcattagaaatcctagaaaacagtgaaacaacaccaagcaaagacatgaaaaaaacaaagaagatttttctgttcaaaagagtcccctcaataaatcaaaagattgtcaagaataacaatgagccgctcccagagataaaatccataggagaccagatcattttaaaaagtgataataaagatgccgaccagaaccacatgagtcagaatcatcagaatatcccaccaacaaatacagagagaagatcaaaatcctgtacaatactataaatatatatttatgttttcacagtcaccaagtgtattgtaatgtatacttgaaaaatgttataacttatgaagtaaagtttctgatagtagtctttaaaagatataagacttaatatgttttattcagcttctataagtgtgaccagttttgatatttatttatgctaatatttttaacaagtcatttcaaaatatgtgtatctcaaattctccctaaagtgttgtggccttaactgttcagtattgcaataaaaaatatatttttatatgtggaaaattgaaataagatatttcctagtttttactaaacaattttacttctttataattttataaggcaatatttgcaatcttacgacactgtaacagtttttgatgtatttacaatttttacaaaactgaggtaaaattgtttataatgaacatattttaataaactatatctggtcagttcc

SEQ ID NO: 175287 - DNA, 4767 bp, Homo sapiens
  Payload ID: 14431
  Gene Symbol: RPGR
  Gene Name: retinitis pigmentosa GTPase regulator
  Uniprot ID: Q92834
  ENST ID: ENST00000378505
  CDS Start-End: 178-3636
gtagcggctgtttgttgacttccgggagcgcggttgtagttgatctccggagtttcgccatgcggaacttgggggctttcgcggcccgcgtcggtgcggagtagctgctttagccccgaccaaaccgtcctctacagcctcctggccccggcgcaggctgcccgtactgcccgtggcatgagggagccggaagagctgatgcccgattcgggtgctgtgtttacatttgggaaaagtaaatttgctgaaaataatcccggtaaattctggtttaaaaatgatgtccctgtacatctttcatgtggagatgaacattctgctgttgttaccggaaataataaactttacatgtttggcagtaacaactggggtcagttaggattaggatcaaagtcagccatcagcaagccaacatgtgtcaaagctctaaaacctgaaaaagtgaaattagctgcctgtggaaggaaccacaccctggtgtcaacagaaggaggcaatgtatatgcaactggtggaaataatgaaggacagttggggcttggtgacaccgaagaaagaaacacttttcatgtaattagcttttttacatccgagcataagattaagcagctgtctgctggatctaatacttcagctgccctaactgaggatggaagactttttatgtggggtgacaattccgaagggcaaattggtttaaaaaatgtaagtaatgtctgtgtccctcagcaagtgaccattgggaaacctgtctcctggatctcttgtggatattaccattcagcttttgtaacaacagatggtgagctatatgtgtttggagaacctgagaatgggaagttaggtcttcccaatcagctcctgggcaatcacagaacaccccagctggtgtctgaaattccggagaaggtgatccaagtagcctgtggtggagagcatactgtggttctcacggagaatgctgtgtatacctttgggctgggacaatttggtcagctgggtcttggcacttttctttttgaaacttcagaacccaaagtcattgagaatattagggatcaaacaataagttatatttcttgtggagaaaatcacacagctttgataacagatatcggccttatgtatacttttggagatggtcgccacggaaaattaggacttggactggagaattttaccaatcacttcattcctactttgtgctctaattttttgaggtttatagttaaattggttgcttgtggtggatgtcacatggtagtttttgctgctcctcatcgtggtgtggcaaaagaaattgaattcgatgaaataaatgatacttgcttatctgtggcgacttttctgccgtatagcagtttaacctcaggaaatgtactgcagaggactctatcagcacgtatgcggcgaagagagagggagaggtctccagattctttttcaatgaggagaacactacctccaatagaagggactcttggcctttctgcttgttttctccccaattcagtctttccacgatgttctgagagaaacctccaagagagtgtcttatctgaacaggacctcatgcagccagaggaaccagattatttgctagatgaaatgaccaaagaagcagagatagataattcttcaactgtagaaagccttggagaaactactgatatcttaaacatgacacacatcatgagcctgaattccaatgaaaagtcattaaaattatcaccagttcagaaacaaaagaaacaacaaacaattggggaactgacgcaggatacagctcttactgaaaacgatgatagtgatgaatatgaagaaatgtcagaaatgaaagaagggaaagcatgtaaacaacatgtgtcacaagggattttcatgacgcagccagctacgactatcgaagcattttcagatgaggaagtagagatcccagaggagaaggaaggagcagaggattcaaaaggaaatggaatagaggagcaagaggtagaagcaaatgaggaaaatgtgaaggtgcatggaggaagaaaggagaaaacagagatcctatcagatgaccttacagacaaagcagaggtgagtgaaggcaaggcaaaatcagtgggagaagcagaggatgggcctgaaggtagaggggatggaacctgtgaggaaggtagttcaggagcagaacactggcaagatgaggagagggagaagggggagaaagacaagggtagaggagaaatggagaggccaggagagggagagaaggaactagcagagaaggaagaatggaagaagagggatggggaagagcaggagcaaaaggagagggagcagggccatcagaaggaaagaaaccaagagatggaggagggaggggaggaggagcatggagaaggagaagaagaggagggagacagagaagaggaagaagagaaggagggagaagggaaagaggaaggagaaggggaagaagtggagggagaacgtgaaaaggaggaaggagagaggaaaaaggaggaaagagcggggaaggaggagaaaggagaggaagaaggagaccaaggagagggggaagaggaggaaacagaggggagaggggaggaaaaagaggagggaggggaagtagagggaggggaagtagaggaggggaaaggagagagggaagaggaagaggaggagggtgagggggaagaggaggaaggggagggggaagaggaggaaggggagggggaagaggaggaaggagaagggaaaggggaggaagaaggggaagaaggagaaggggaggaagaaggggaggaaggagaaggggagggggaagaggaggaaggagaaggggagggagaagaggaaggagaaggggagggagaagaggaggaaggagaaggggagggagaagaggaaggagaaggggagggagaagaggaggaaggagaagggaaaggggaggaggaaggagaggaaggagaaggggagggggaagaggaggaaggagaaggggaaggggaggatggagaaggggagggggaagaggaggaaggagaatgggagggggaagaggaggaaggagaaggggagggggaagaggaaggagaaggggaaggggaggaaggagaaggggagggggaagaggaggaaggagaaggggagggggaagaggaggaaggggaagaagaaggggaggaagaaggagagggagaggaagaaggggagggagaaggggaggaagaagaggaaggggaagtggaaggggaggtggaaggggaggaaggagagggggaaggagaggaagaggaaggagaggaggaaggagaagaaagggaaaaggagggggaaggagaagaaaacaggaggaacagagaagaggaggaggaagaagaggggaagtatcaggagacaggcgaagaagagaatgaaaggcaggatggagaggagtacaaaaaagtgagcaaaataaaaggatctgtgaaatatggcaaacataaaacatatcaaaaaaagtcagttactaacacacagggaaatgggaaagagcagaggtccaaaatgccagtccagtcaaaacgacttttaaaaaacgggccatcaggttccaaaaagttctggaataatgtattaccacattacttggaattgaagtaacaaaccttaaatgtgacccgattatggccagtcagacaatttaaatgccttgcatataacgggcactcattacgtgttattaaattgattttatgtcaattattttatgtgtagtaaaaaaaaaagcaactgatgcagctgtgttaaggagccaaagacaataggaggcactggtaaattttggcctctctcaaactaaaattttcgtgtatttcccccccaaattataaaaacataactagaaaatattaaaaggtcatatcagattattaacattatatattcattaaaggcagctttaggaaacaggaatatactacaagagtgttttgtttgtgtatacaaatcattccatttttaaatggcacagatgcttaagggctataaaaacttctaatttcttataaatatgttagcactttttttaagttagtgattacagtttacctactgtatagaataattttctaataatggatggtattctaaaactcaattgaggcattcacattttaaagaaagtattgtctttcaccttttatgtgttctttttgcaaaaatctacaaagtgacagctgtgttcagagcttagatcccaaaaacgtgatctcttttagttactatctgggcagatggtagtatatctaatgaaatggtgattaatttaaatgtataatctggaaatatgtaaaacttgaagtattttttgtccaggcaaaggtactcattgggcctcagtttcttcatctctaaaatggagtggatgagatgatgtgataactgcagtcccttctaactcttaaattcttttcattctcacagattcactctatcattattgttattcatgtaagaaacgttttagggagaaaaattacactttaaaattaatttagttttctatacagttgttttctttactcttgaaaagttatgacagctttaacgtctcttgtcttctgtaattttttatttctaaactcctatcatttccaagctttaactgtactttatcagagccttcatttctggtatgtgttatatgccctcaatgtattcactgactgttctgtaatttcagtttgtctgttccttgtcagaatgtttcaagtaaaataaaaaattaaatgt

SEQ ID NO: 175288 - DNA, 426 bp, Homo sapiens
  Payload ID: 14431
  Gene Symbol: RPGR
  Gene Name: retinitis pigmentosa GTPase regulator
  ENST ID: ENST00000494707
  CDS Start-End: 1-426
gaccaaagaagcagagatagataattcttcaactgtagaaagccttggagaaactactgatatcttaaacatgacacacatcatgagcctgaattccaatgaaaagtcattaaaattatcaccagttcagaaacaaaaggatcatgaattttctaaaactgaggaactaaaactagaagatgtggatgaggaaattaatgctgaaaatgtggaaagcaagaagaaaactgtgggagatgatgaaagtgttcctacaggttatcacagtaaaacagaaggagcagaaagaaccaatgatgatagctcagctgaaactattgaaaagaaagaaaaagccaacctagaggaacgggccatttgtgagtacaatgaaaacccaaaaggatacatgcttgatgatgcagatagcagttcattagaaatcct

SEQ ID NO: 175289 - DNA, 428 bp, Homo sapiens
  Payload ID: 14431
  Gene Symbol: RPGR
  Gene Name: retinitis pigmentosa GTPase regulator
  ENST ID: ENST00000464437
  CDS Start-End: 1-389
atatcggccttatgtatacttttggagatggtcgccacggaaaattaggacttggactggagaattttaccaatcacttcattcctactttgtgctctaattttttgaggtttatagttaaattggttgcttgtggtggatgtcacatggtagtttttgctgctcctcatcgtggtgtggcaaaagaaattgaattcgatgaaataaatgatacttgcttatctgtggcgacttttctgccgtatagcagtttaacctcaggaaatgtactgcagaggactctatcagcacgtatgcggcgaagagagaggttaagcctcatgagcagtgggagcttatatactataaacaatgaaatgggaaaacaaaggaataaggacttcaattagagagaggaaatattctctcaattaaatttagagattttc

SEQ ID NO: 175290 - DNA, 2268 bp, Homo sapiens
  Payload ID: 14431
  Gene Symbol: RPGR
  Gene Name: retinitis pigmentosa GTPase regulator
  Uniprot ID: Q92834
  ENST ID: ENST00000474584
  CDS Start-End: 140-1582
gttgatctccggagtttcgccatgcggaacttgggggctttcgcggcccgcgtcggtgcggagtagctgctttagccccgaccaaaccgtcctctacagcctcctggccccggcgcaggctgcccgtactgcccgtggcatgagggagccggaagagctgatgcccgattcgggtgctgtgtttacatttgggaaaagtaaatttgctgaaaataatcccggtaaattctggtttaaaaatgatgtccctgtacatctttcatgtggagatgaacattctgctgttgttaccggaaataataaactttacatgtttggcagtaacaactggggtcagttaggattaggatcaaagtcagccatcagcaagccaacatgtgtcaaagctctaaaacctgaaaaagtgaaattagctgcctgtggaaggaaccacaccctggtgtcaacagaaggaggcaatgtatatgcaactggtggaaataatgaaggacagttggggcttggtgacaccgaagaaagaaacacttttcatgtaattagcttttttacatccgagcataagattaagcagctgtctgctggatctaatacttcagctgccctaactgaggatggaagactttttatgtggggtgacaattccgaagggcaaattggtttaaaaaatgtaagtaatgtctgtgtccctcagcaagtgaccattgggaaacctgtctcctggatctcttgtggatattaccattcagcttttgtaacaacagatggtgagctatatgtgtttggagaacctgagaatgggaagttaggtcttcccaatcagctcctgggcaatcacagaacaccccagctggtgtctgaaattccggagaaggtgatccaagtagcctgtggtggagagcatactgtggttctcacggagaatgctgtgtatacctttgggctgggacaatttggtcagctgggtcttggcacttttctttttgaaacttcagaacccaaagtcattgagaatattagggatcaaacaataagttatatttcttgtggagaaaatcacacagctttgataacagatatcggccttatgtatacttttggagatggtcgccacggaaaattaggacttggactggagaattttaccaatcacttcattcctactttgtgctctaattttttgaggtttatagttaaattggttgcttgtggtggatgtcacatggtagtttttgctgctcctcatcgtggtgtggcaaaagaaattgaattcgatgaaataaatgatacttgcttatctgtggcgacttttctgccgtatagcagtttaacctcaggaaatgtactgcagaggactctatcagcacgtatgcggcgaagagagagggagaggtctccagattctttttcaatgaggagaacactacctccaatagaagggactcttggcctttctgcttgttttctccccaattcagtctttccacgatgttctgagagaaacctccaagagagtgtcttatctgaacaggacctcatgcagccagaggaaccagacacacatcatgagcctgaattccaatgaaaagtcattaaaattatcaccagttcagaaacaaaaggatcatgaattttctaaaactgaggaactaaaactagaagatgtggatgaggaaattaatgctgaaaatgtggaaagcaagaagaaaactgtgggagatgatgaaagtgttcctacaggttatcacagtaaaacagaaggagcagaaagaaccaatgatgatagctcagctgaaactattgaaaagaaagaaaaagccaacctagaggaacgggccatttgtgagtacaatgaaaacccaaaaggatacatgcttgatgatgcagatagcagttcattagaaatcctagaaaacagtgaaacaacaccaagcaaagacatgaaaaaaacaaagaagatttttctgttcaaaagagtcccctcaataaatcaaaagattgtcaagaataacaatgagccgctcccagagataaaatccataggagaccagatcattttaaaaagtgataataaagatgccgaccagaaccacatgagtcagaatcatcagaatatcccaccaacaaatacagagagaagatcaaaatcctgtacaatactataaatatatatttatgttttcacagtcaccaagtgtattgtaatgtatacttgaaaaatgttataacttatgaagtaaagtttctgatagtagtctttaaaagatataa

SEQ ID NO: 175291 - DNA, 2819 bp, Homo sapiens
  Payload ID: 14431
  Gene Symbol: RPGR
  Gene Name: retinitis pigmentosa GTPase regulator
  Uniprot ID: Q92834
  ENST ID: ENST00000482855
  CDS Start-End: 56-1996
aaccgtcctctacagcctcctggccccggcgcaggctgcccgtactgcccgtggcatgagggagccggaagagctgatgcccgattcgggtgctgtgtttacatttgggaaaagtaaatttgctgaaaataatcccggtaaattctggtttaaaaatgatgtccctgtacatctttcatgtggagatgaacattctgctgttgttaccggaaataataaactttacatgtttggcagtaacaactggggtcagttaggattaggatcaaagtcagccatcagcaagccaacatgtgtcaaagctctaaaacctgaaaaagtgaaattagctgcctgtggaaggaaccacaccctggtgtcaacagaaggaggcaatgtatatgcaactggtggaaataatgaaggacagttggggcttggtgacaccgaagaaagaaacacttttcatgtaattagcttttttacatccgagcataagattaagcagctgtctgctggatctaatacttcagctgccctaactgaggatggaagactttttatgtggggtgacaattccgaagggcaaattggtttaaaaaatgtaagtaatgtctgtgtccctcagcaagtgaccattgggaaacctgtctcctggatctcttgtggatattaccattcagcttttgtaacaacagatggtgagctatatgtgtttggagaacctgagaatgggaagttaggtcttcccaatcagctcctgggcaatcacagaacaccccagctggtgtctgaaattccggagaaggtgatccaagtagcctgtggtggagagcatactgtggttctcacggagaatgctgtgtatacctttgggctgggacaatttggtcagctgggtcttggcacttttctttttgaaacttcagaacccaaagtcattgagaatattagggatcaaacaataagttatatttcttgtggagaaaatcacacagctttgataacagatatcggccttatgtatacttttggagatggtcgccacggaaaattaggacttggactggagaattttaccaatcacttcattcctactttgtgctctaattttttgaggtttatagttaaattggttgcttgtggtggatgtcacatggtagtttttgctgctcctcatcgtggtgtggcaaaagaaattgaattcgatgaaataaatgatacttgcttatctgtggcgacttttctgccgtatagcagtttaacctcaggaaatgtactgcagaggactctatcagcacgtatgcggcgaagagagagggagaggtctccagattctttttcaatgaggagaacactacctccaatagaagggactcttggcctttctgcttgttttctccccaattcagtctttccacgatgttctgagagaaacctccaagagagtgtcttatctgaacaggacctcatgcagccagaggaaccagattatttgctagatgaaatgaccaaagaagcagagatagataattcttcaactgtagaaagccttggagaaactactgatatcttaaacatgacacacatcatgagcctgaattccaatgaaaagtcattaaaattatcaccagttcagaaacaaaagaaacaacaaacaattggggaactgacgcaggatacagctcttactgaaaacgatgatagtgatgaatatgaagaaatgtcagaaatgaaagaagggaaagcatgtaaacaacatgtgtcacaagggattttcatgacgcagccagctacgactatcgaagcattttcagatgaggaagtagagatcccagaggagaaggaaggagcagaggattcaaaaggaaatggaatagaggagcaagaggtagaagcaaatgaggaaaatgtgaaggtgcatggaggaagaaaggagaaaacagagatcctatcagatgaccttacagacaaagcagagtattctgccagtcactcccaaattgtttcagtttaaaaggatcatgaattttctaaaactgaggaactaaaactagaagatgtggatgaggaaattaatgctgaaaatgtggaaagcaagaagaaaactgtgggagatgatgaaagtgttcctacaggttatcacagtaaaacagaaggagcagaaagaaccaatgatgatagctcagctgaaactattgaaaagaaagaaaaagccaacctagaggaacgggccatttgtgagtacaatgaaaacccaaaaggatacatgcttgatgatgcagatagcagttcattagaaatcctagaaaacagtgaaacaacaccaagcaaagacatgaaaaaaacaaagaagatttttctgttcaaaagagtcccctcaataaatcaaaagattgtcaagaataacaatgagccgctcccagagataaaatccataggagaccagatcattttaaaaagtgataataaagatgccgaccagaaccacatgagtcagaatcatcagaatatcccaccaacaaatacagagagaagatcaaaatcctgtacaatactataaatatatatttatgttttcacagtcaccaagtgtattgtaatgtatacttgaaaaatgttataacttatgaagtaaagtttctgatagtagtctttaaaagatataagacttaatatgttttattcagcttctataagtgtgaccagttttgatatttatttatgctaatatttttaacaagtcatttcaaaatatgtgtatctcaaattctccctaaagtgttgtggccttaactgttcagtattgcaataaaaaatatatttttatatgtggaaaa

SEQ ID NO: 175292 - DNA, 2004 bp, Homo sapiens
  Payload ID: 14432
  Gene Symbol: RPGRIP1
  Gene Name: retinitis pigmentosa GTPase regulator interacting protein 1
  Uniprot ID: Q96KN7
  ENST ID: ENST00000382933
  CDS Start-End: 81-1919
agttggtaaatgacagttatgaataaagcaagggcagaaaaaaacatgtaggggagagaatgaggaactaggtccaggagatgctgaaactggataataaagacgtcatatcacaccccttggggtatccatctgagagcttgctttccattgccagcatgctggacagcagtgacagctccagtcagccccactggagcaacgagctcatagcggaacagctacagcagcaagtctctcagctgcaggatcagctggatgctgagctggaggacaagagaaaagttttacttgagctgtccagggagaaagcccaaaatgaggatctgaagcttgaagtcaccaacatacttcagaagcataaacaggaagtagagctcctccaaaatgcagccacaatttcccaacctcctgacaggcaatctgaaccagccactcacccagctgtattgcaagagaacactcagatcgagccaagtgaacccaaaaaccaagaagaaaagaaactgtcccaggtgctaaatgagttgcaagtatcacacgcagagaccacattggaactagaaaagaccagggacatgcttattctgcagcgcaaaatcaacgtgtgttatcaggaggaactggaggcaatgatgacaaaagctgacaatgataatagagatcacaaagaaaagctggagaggttgactcgactactagacctcaagaataaccgtatcaagcagctggaaggtattttaagaagccatgaccttccaacatctggtgattttaacctcactgaccctgcagagaaacccaacggatctattcaagtgcaactggattggaagtttccctacataccccctgagagcttcctgaaaccagaagctcagactaaggggaaggataccaaggacagttcaaagatctcatctgaagaggaaaaggcttcatttccttcccaggatcagatggcatctcctgaggttcccattgaagctggccagtatcgatctaagagaaaacctcctcatgggggagaaagaaaggagaaggagcaccaggttgtgagctactcaagaagaaaacatggcaaaagaataggtgttcaaggaaagaatagaatggagtatcttagccttaacatcttaaatggaaatacaccagagcaggtgaattacactgagtggaagttctcagagactaacagcttcataggtgatggctttaaaaatcagcacgaggaagaggaaatgacattatcccattcagcactgaaacagaaggaacctctacatcctgtaaatgacaaagaatcctctgaacaaggttctgaagtcagtgaagcacaaactaccgacagtgatgatgtcatagtgccacccatgtctcagaaatatcctaaggcagattcagagaagatgtgcattgaaattgtctccctggccttctacccagaggcagaagtgatgtctgatgagaacataaaacaggtgtatgtggagtacaaattctacgacctacccttgtcggagacagagactccagtgtccctaaggaagcctagggcaggagaagaaatccactttcactttagcaaggtaatagacctggacccacaggagcagcaaggccgaaggcggtttctgttcgacatgctgaatggacaagatcctgatcaaggacatttaaagtttacagtggtaagtgatcctctggatgaagaaaagaaagaatgtgaagaagtgggatatgcatatcttcaactgtggcagatcctggagtcaggaagagatattctagagcaagagctagacattgttagccctgaagatctggctaccccaataggaaggctgaaggtttcccttcaagcagctgctgtcctccatgctatttacaaggagatgactgaagatttgttttcatgaaggaacaagtgctattccaatctaaaagtctctgagggaaccatagtaaaaagtctcttataaagttagcttgctataacatgaa

SEQ ID NO: 175293 - DNA, 3940 bp, Homo sapiens
  Payload ID: 14432
  Gene Symbol: RPGRIP1
  Gene Name: retinitis pigmentosa GTPase regulator interacting protein 1
  Uniprot ID: Q96KN7
  ENST ID: ENST00000400017
  CDS Start-End: 1-3861
atgtcacatctggtggaccctacatcaggagacttgccagttagagacatagatgctatacctctggtgctaccagcctcaaaaggtaagaatatgaaaactcaaccacccttgagcaggatgaaccgggaggaattggaggacagtttctttcgacttcgcgaagatcacatgttggtgaaggagctttcttggaagcaacaggatgagatcaaaaggctgaggaccaccttgctgcggttgaccgctgctggccgggacctgcgggtcgcggaggaggcggcgccgctctcggagaccgcaaggcgcgggcagaaggcgggatggcggcagcgcctctccatgcaccagcgcccccagatgcaccgactgcaagggcatttccactgcgtcggccctgccagcccccgccgcgcccagcctcgcgtccaagtgggacacagacagctccacacagccggtgcaccggtgccggagaaacccaagagggggccaagggacaggctgagctacacagcccctccatcgtttaaggagcatgcgacaaatgaaaacagaggtgaagtagccagtaaacccagtgaacttgtttctggttctaacagcataatttctttcagcagtgtcataagtatggctaaacccattggtctatgcatgcctaacagtgcccacatcatggccagcaataccatgcaagtggaagagccacccaagtctcctgagaaaatgtggcctaaagatgaaaattttgaacagagaagctcattggagtgtgctcagaaggctgcagagcttcgagcttccattaaagagaaggtagagctgattcgacttaagaagctcttacatgaaagaaatgcttcattggttatgacaaaagcacaattaacagaagttcaagaggcatacgaaaccttgctccagaagaatcagggaatcctgagtgcagcccatgaggccctcctcaagcaagtgaatgagctcagggcagagctgaaggaagaaagcaagaaggctgtgagcttgaagagccaactggaagatgtgtctatcttgcagatgactctgaaggagtttcaggagagagttgaagatttggaaaaagaacgaaaattgctgaatgacaattatgacaaactcttagaaagcatgctggacagcagtgacagctccagtcagccccactggagcaacgagctcatagcggaacagctacagcagcaagtctctcagctgcaggatcagctggatgctgagctggaggacaagagaaaagttttacttgagctgtccagggagaaagcccaaaatgaggatctgaagcttgaagtcaccaacatacttcagaagcataaacaggaagtagagctcctccaaaatgcagccacaatttcccaacctcctgacaggcaatctgaaccagccactcacccagctgtattgcaagagaacactcagatcgagccaagtgaacccaaaaaccaagaagaaaagaaactgtcccaggtgctaaatgagttgcaagtatcacacgcagagaccacattggaactagaaaagaccagggacatgcttattctgcagcgcaaaatcaacgtgtgttatcaggaggaactggaggcaatgatgacaaaagctgacaatgataatagagatcacaaagaaaagctggagaggttgactcgactactagacctcaagaataaccgtatcaagcagctggaaggtattttaagaagccatgaccttccaacatctgaacagctcaaagatgttgcttatggcacccgaccgttgtcgttatgtttggaaacactgccagcccatggagatgaggataaagtggatatttctctgctgcatcagggtgagaatctttttgaactgcacatccaccaggccttcctgacatctgccgccctagctcaggctggagatacccaacctaccactttctgcacctattccttctatgactttgaaacccactgtaccccattatctgtggggccacagcccctctatgacttcacctcccagtatgtgatggagacagattcgcttttcttacactaccttcaagaggcttcagcccggcttgacatacaccaggccatggccagtgaacacagcactcttgctgcaggatggatttgctttgacagggtgctagagactgtggagaaagtccatggcttggccacactgattggagctggtggagaagagttcggggttctagagtactggatgaggctgcgtttccccataaaacccagcctacaggcgtgcaataaacgaaagaaagcccaggtctacctgtcaaccgatgtgcttggaggccggaaggcccaggaagaggagttcagatcggagtcttgggaacctcagaacgagctgtggattgaaatcaccaagtgctgtggcctccggagtcgatggctgggaactcaacccagtccatatgctgtgtaccgcttcttcaccttttctgaccatgacactgccatcattccagccagtaacaacccctactttagagaccaggctcgattcccagtgcttgtgacctctgacctggaccattatctgagacgggaggccttgtctatacatgtttttgatgatgaagacttagagcctggctcgtatcttggccgagcccgagtgcctttactgcctcttgcaaaaaatgaatctatcaaaggtgattttaacctcactgaccctgcagagaaacccaacggatctattcaagtgcaactggattggaagtttccctacataccccctgagagcttcctgaaaccagaagctcagactaaggggaaggataccaaggacagttcaaagatctcatctgaagaggaaaaggcttcatttccttcccaggatcagatggcatctcctgaggttcccattgaagctggccagtatcgatctaagagaaaacctcctcatgggggagaaagaaaggagaaggagcaccaggttgtgagctactcaagaagaaaacatggcaaaagaataggtgttcaaggaaagaatagaatggagtatcttagccttaacatcttaaatggaaatacaccagagcaggtgaattacactgagtggaagttctcagagactaacagcttcataggtgatggctttaaaaatcagcacgaggaagaggaaatgacattatcccattcagcactgaaacagaaggaacctctacatcctgtaaatgacaaagaatcctctgaacaaggttctgaagtcagtgaagcacaaactaccgacagtgatgatgtcatagtgccacccatgtctcagaaatatcctaaggcagattcagagaagatgtgcattgaaattgtctccctggccttctacccagaggcagaagtgatgtctgatgagaacataaaacaggtgtatgtggagtacaaattctacgacctacccttgtcggagacagagactccagtgtccctaaggaagcctagggcaggagaagaaatccactttcactttagcaaggtaatagacctggacccacaggagcagcaaggccgaaggcggtttctgttcgacatgctgaatggacaagatcctgatcaaggacatttaaagtttacagtggtaagtgatcctctggatgaagaaaagaaagaatgtgaagaagtgggatatgcatatcttcaactgtggcagatcctggagtcaggaagagatattctagagcaagagctagacattgttagccctgaagatctggctaccccaataggaaggctgaaggtttcccttcaagcagctgctgtcctccatgctatttacaaggagatgactgaagatttgttttcatgaaggaacaagtgctattccaatctaaaagtctctgagggaaccatagtaaaaagtctcttataaagttagcttgctataa

SEQ ID NO: 175294 - DNA, 429 bp, Homo sapiens
  Payload ID: 14432
  Gene Symbol: RPGRIP1
  Gene Name: retinitis pigmentosa GTPase regulator interacting protein 1
  ENST ID: ENST00000554303
  CDS Start-End: 1-429
ctgcagcgcaaaatcaacgtgtgttatcaggaggaactggaggcaatgatgacaaaagctgacaatgataatagagatcacaaagaaaagctggagaggttgactcgactactagacctcaagaataaccgtatcaagcagctggaagaacagctcaaagatgttgcttatggcacccgaccgttgtcgttatgtttggaaacactgccagcccatggagatgaggataaagtggatatttctctgctgcatcagggtgagaatctttttgaactgcacatccaccaggccttcctgacatctgccgccctagctcaggctggagatacccaacctaccactttctgcacctattccttctatgactttgaaacccactgtaccccattatctgtggggccacagcccctctatgacttcacctcccag

SEQ ID NO: 175295 - DNA, 2955 bp, Homo sapiens
  Payload ID: 14432
  Gene Symbol: RPGRIP1
  Gene Name: retinitis pigmentosa GTPase regulator interacting protein 1
  ENST ID: ENST00000556336
  CDS Start-End: 39-2870
tgtcctctgggatctcttacagcttgggaacagagatcatgtcacatctggtggaccctacatcaggagacttgccagttagagacatagatgctatacctctggtgctaccagcctcaaaaggtaagaatatgaaaactcaaccacccttgagcaggatgaaccgggaggaattggaggacagtttctttcgacttcgcgaagatcacatgttggtgaaggagctttcttggaagcaacaggatgagatcaaaaggctgaggaccaccttgctgcggttgaccgctgctggccgggacctgcgggtcgcggaggaggcggcgccgctctcggagaccgcaaggcgcgggcagaaggcgggatggcggcagcgcctctccatgcaccagcgcccccagatgcaccgactgcaagggcatttccactgcgtcggccctgccagcccccgccgcgcccagcctcgcgtccaagtgggacacagacagctccacacagccggtgcaccggtgccggagaaacccaagagggggccaagggacaggctgagctacacagcccctccatcgtttaaggagcatgcgacaaatgaaaacagaggtgaagtagccagtaaacccagtgaacttgcccacatcatggccagcaataccatgcaagtggaagagccacccaagtctcctgagaaaatgtggcctaaagatgaaaattttgaacagagaagctcattggagtgtgctcagaaggctgcagagcttcgagcttccattaaagagaaggtagagctgattcgacttaagaagctcttacatgaaagaaatgcttcattggttatgacaaaagcacaattaacagaagttcaagaggcatacgaaaccttgctccagaagaatcagggaatcctgagtgcagcccatgaggccctcctcaagcaagtgaatgagctcagggcagagctgaaggaagaaagcaagaaggctgtgagcttgaagagccaactggaagatgtgtctatcttgcagatgactctgaaggagtttcaggagagagttgaagatttggaaaaagaacgaaaattgctgaatgacaattatgacaaactcttagaaagcatgctggacagcagtgacagctccagtcagccccactggagcaacgagctcatagcggaacagctacagcagcaagtctctcagctgcaggatcagctggatgctgagctggaggacaagagaaaagttttacttgagctgtccagggagaaagcccaaaatgaggatctgaagcttgaagtcaccaacatacttcagaagcataaacaggaagtagagctcctccaaaatgcagccacaatttcccaacctcctgacaggcaatctgaaccagccactcacccagctgtattgcaagagaacactcagatcgagccaagtgaacccaaaaaccaagaagaaaagaaactgtcccaggtgctaaatgagttgcaagtatcacacgcagagaccacattggaactagaaaagaccagggacatgcttattctgcagcgcaaaatcaacgtgtgttatcaggaggaactggaggcaatgatgacaaaagctgacaatgataatagagatcacaaagaaaagctggagaggttgactcgactactagacctcaagaataaccgtatcaagcagctggaaggtattttaagaagccatgaccttccaacatctggtgattttaacctcactgaccctgcagagaaacccaacggatctattcaagtgcaactggattggaagtttccctacataccccctgagagcttcctgaaaccagaagctcagactaaggggaaggataccaaggacagttcaaagatctcatctgaagaggaaaaggcttcatttccttcccaggatcagatggcatctcctgaggttcccattgaagctggccagtatcgatctaagagaaaacctcctcatgggggagaaagaaaggagaaggagcaccaggttgtgagctactcaagaagaaaacatggcaaaagaataggtgttcaaggaaagaatagaatggagtatcttagccttaacatcttaaatggaaatacaccagagcaggtgaattacactgagtggaagttctcagagactaacagcttcataggtgatggctttaaaaatcagcacgaggaagaggaaatgacattatcccattcagcactgaaacagaaggaacctctacatcctgtaaatgacaaagaatcctctgaacaaggttctgaagtcagtgaagcacaaactaccgacagtgatgatgtcatagtgccacccatgtctcagaaatatcctaaggcagattcagagaagatgtgcattgaaattgtctccctggccttctacccagaggcagaagtgatgtctgatgagaacataaaacaggtgtatgtggagtacaaattctacgacctacccttgtcggagacagagactccagtgtccctaaggaagcctagggcaggagaagaaatccactttcactttagcaaggtaatagacctggacccacaggagcagcaaggccgaaggcggtttctgttcgacatgctgaatggacaagatcctgatcaaggacatttaaagtttacagtggtaagtgatcctctggatgaagaaaagaaagaatgtgaagaagtgggatatgcatatcttcaactgtggcagatcctggagtcaggaagagatattctagagcaagagctagacattgttagccctgaagatctggctaccccaataggaaggctgaaggtttcccttcaagcagctgctgtcctccatgctatttacaaggagatgactgaagatttgttttcatgaaggaacaagtgctattccaatctaaaagtctctgagggaaccatagtaaaaagtctcttataaagttagcttgctataacatgaa

SEQ ID NO: 175296 - DNA, 2373 bp, Homo sapiens
  Payload ID: 14432
  Gene Symbol: RPGRIP1
  Gene Name: retinitis pigmentosa GTPase regulator interacting protein 1
  ENST ID: ENST00000555322
  CDS Start-End: 1-80
gggacatgcttattctgcagcgcaaaatcaacgtgtgttatcaggtgcaaggaaagatggtacaggaaggggatggataacaggaacgtgggaaccactcacaggactgggaatgaagcaagacctaagtttccagggctgataccaggaactggaggcaatgatgacaaaagctgacaatgataatagagatcacaaagaaaagctggagaggttgactcgactactagacctcaagaataaccgtatcaagcagctggaaggtattttaagaagccatgaccttccaacatctgggtgagaatctttttgaactgcacatccaccaggccttcctgacatctgccgccctagctcaggctggagatacccaacctaccactttctgcacctattccttctatgactttgaaacccactgtaccccattatctgtggggccacagcccctctatgacttcacctcccagtatgtgatggagacagattcgcttttcttacactaccttcaagaggcttcagcccggcttgacatacaccaggccatggccagtgaacacagcactcttgctgcaggatggatttgctttgacagggtgctagagactgtggagaaagtccatggcttggccacactgattggagctggtggagaagagttcggggttctagagtactggatgaggctgcgtttccccataaaacccagcctacaggcgtgcaataaacgaaagaaagcccaggtctacctgtcaaccgatgtgcttggaggccggaaggcccaggaagaggagttcagatcggagtcttgggaacctcagaacgagctgtggattgaaatcaccaagtgctgtggcctccggagtcgatggctgggaactcaacccagtccatatgctgtgtaccgcttcttcaccttttctgaccatgacactgccatcattccagccagtaacaacccctactttagagaccaggctcgattcccagtgcttgtgacctctgacctggaccattatctgagacgggaggccttgtctatacatgtttttgatgatgaagacttagagcctggctcgtatcttggccgagcccgagtgcctttactgcctcttgcaaaaaatgaatctatcaaaggtgattttaacctcactgaccctgcagagaaacccaacggatctattcaagtgcaactggattggaagtttccctacataccccctgagagcttcctgaaaccagaagctcagactaaggggaaggataccaaggacagttcaaagatctcatctgaagaggaaaaggcttcatttccttcccaggatcagatggcatctcctgaggttcccattgaagctggccagtatcgatctaagagaaaacctcctcatgggggagaaagaaaggagaaggagcaccaggttgtgagctactcaagaagaaaacatggcaaaagaataggtgttcaaggaaagaatagaatggagtatcttagccttaacatcttaaatggaaatacaccagagcaggtgaattacactgagtggaagttctcagagactaacagcttcataggtgatggctttaaaaatcagcacgaggaagaggaaatgacattatcccattcagcactgaaacagaaggaacctctacatcctgtaaatgacaaagaatcctctgaacaaggttctgaagtcagtgaagcacaaactaccgacagtgatgatgtcatagtgccacccatgtctcagaaatatcctaaggcagattcagagaagatgtgcattgaaattgtctccctggccttctacccagaggcagaagtgatgtctgatgagaacataaaacaggtgtatgtggagtacaaattctacgacctacccttgtcggagacagagactccagtgtccctaaggaagcctagggcaggagaagaaatccactttcactttagcaaggtaatagacctggacccacaggagcagcaaggccgaaggcggtttctgttcgacatgctgaatggacaagatcctgatcaaggacatttaaagtttacagtggtaagtgatcctctggatgaagaaaagaaagaatgtgaagaagtgggatatgcatatcttcaactgtggcagatcctggagtcaggaagagatattctagagcaagagctagacattgttagccctgaagatctggctaccccaataggaaggctgaaggtttcccttcaagcagctgctgtcctccatgctatttacaaggagatgactgaagatttgttttcatgaaggaacaagtgctattccaatctaaaagtctctgagggaaccatagtaaaaagtctcttataaagttagcttgctataacatgaa

SEQ ID NO: 175297 - DNA, 2139 bp, Homo sapiens
  Payload ID: 14432
  Gene Symbol: RPGRIP1
  Gene Name: retinitis pigmentosa GTPase regulator interacting protein 1
  ENST ID: ENST00000555489
  CDS Start-End: 1-180
gagaggttgactcgactactagacctcaagaataaccgtatcaagcagctggaagaaagagctccctaccctttaacggataggcagctttctttcccctctagaacagctcaaagatgttgcttatggcacccgaccgttgtcgttatgtttggaaacactgccagcccatggagatgaggataaagtggatatttctctgctgcatcaggcccctctatgacttcacctcccagtatgtgatggagacagattcgcttttcttacactaccttcaagaggcttcagcccggcttgacatacaccaggccatggccagtgaacacagcactcttgctgcaggatggatttgctttgacagggtgctagagactgtggagaaagtccatggcttggccacactgattggagctggtggagaagagttcggggttctagagtactggatgaggctgcgtttccccataaaacccagcctacaggcgtgcaataaacgaaagaaagcccaggtctacctgtcaaccgatgtgcttggaggccggaaggcccaggaagaggagttcagatcggagtcttgggaacctcagaacgagctgtggattgaaatcaccaagtgctgtggcctccggagtcgatggctgggaactcaacccagtccatatgctgtgtaccgcttcttcaccttttctgaccatgacactgccatcattccagccagtaacaacccctactttagagaccaggctcgattcccagtgcttgtgacctctgacctggaccattatctgagacgggaggccttgtctatacatgtttttgatgatgaagacttagagcctggctcgtatcttggccgagcccgagtgcctttactgcctcttgcaaaaaatgaatctatcaaaggtgattttaacctcactgaccctgcagagaaacccaacggatctattcaagtgcaactggattggaagtttccctacataccccctgagagcttcctgaaaccagaagctcagactaaggggaaggataccaaggacagttcaaagatctcatctgaagaggaaaaggcttcatttccttcccaggatcagatggcatctcctgaggttcccattgaagctggccagtatcgatctaagagaaaacctcctcatgggggagaaagaaaggagaaggagcaccaggttgtgagctactcaagaagaaaacatggcaaaagaataggtgttcaaggaaagaatagaatggagtatcttagccttaacatcttaaatggaaatacaccagagcaggtgaattacactgagtggaagttctcagagactaacagcttcataggtgatggctttaaaaatcagcacgaggaagaggaaatgacattatcccattcagcactgaaacagaaggaacctctacatcctgtaaatgacaaagaatcctctgaacaaggttctgaagtcagtgaagcacaaactaccgacagtgatgatgtcatagtgccacccatgtctcagaaatatcctaaggcagattcagagaagatgtgcattgaaattgtctccctggccttctacccagaggcagaagtgatgtctgatgagaacataaaacaggtgtatgtggagtacaaattctacgacctacccttgtcggagacagagactccagtgtccctaaggaagcctagggcaggagaagaaatccactttcactttagcaaggtaatagacctggacccacaggagcagcaaggccgaaggcggtttctgttcgacatgctgaatggacaagatcctgatcaaggacatttaaagtttacagtggtaagtgatcctctggatgaagaaaagaaagaatgtgaagaagtgggatatgcatatcttcaactgtggcagatcctggagtcaggaagagatattctagagcaagagctagacattgttagccctgaagatctggctaccccaataggaaggctgaaggtttcccttcaagcagctgctgtcctccatgctatttacaaggagatgactgaagatttgttttcatgaaggaacaagtgctattccaatctaaaagtctctgagggaaccatagtaaaaagtctcttataaagttagcttgctataacatgaa

SEQ ID NO: 175298 - DNA, 3870 bp, Homo sapiens
  Payload ID: 14432
  Gene Symbol: RPGRIP1
  Gene Name: retinitis pigmentosa GTPase regulator interacting protein 1
  ENST ID: ENST00000557771
  CDS Start-End: 39-3785
tgtcctctgggatctcttacagcttgggaacagagatcatgtcacatctggtggaccctacatcaggagacttgccagttagagacatagatgctatacctctggtgctaccagcctcaaaaggtaagaatatgaaaactcaaccacccttgagcaggatgaaccgggaggaattggaggacagtttctttcgacttcgcgaagatcacatgttggtgaaggagctttcttggaagcaacaggatgagatcaaaaggctgaggaccaccttgctgcggttgaccgctgctggccgggacctgcgggtcgcggaggaggcggcgccgctctcggagaccgcaaggcgcgggcagaaggcgggatggcggcagcgcctctccatgcaccagcgcccccagatgcaccgactgcaagggcatttccactgcgtcggccctgccagcccccgccgcgcccagcctcgcgtccaagtgggacacagacagctccacacagccggtgcaccggtgccggagaaacccaagagggggccaagggacaggctgagctacacagcccctccatcgtttaaggagcatgcgacaaatgaaaacagaggtgaagtagccagtaaacccagtgaacttgcccacatcatggccagcaataccatgcaagtggaagagccacccaagtctcctgagaaaatgtggcctaaagatgaaaattttgaacagagaagctcattggagtgtgctcagaaggctgcagagcttcgagcttccattaaagagaaggtagagctgattcgacttaagaagctcttacatgaaagaaatgcttcattggttatgacaaaagcacaattaacagaagttcaagaggcatacgaaaccttgctccagaagaatcagggaatcctgagtgcagcccatgaggccctcctcaagcaagtgaatgagctcagggcagagctgaaggaagaaagcaagaaggctgtgagcttgaagagccaactggaagatgtgtctatcttgcagatgactctgaaggagtttcaggagagagttgaagatttggaaaaagaacgaaaattgctgaatgacaattatgacaaactcttagaaagcatgctggacagcagtgacagctccagtcagccccactggagcaacgagctcatagcggaacagctacagcagcaagtctctcagctgcaggatcagctggatgctgagctggaggacaagagaaaagttttacttgagctgtccagggagaaagcccaaaatgaggatctgaagcttgaagtcaccaacatacttcagaagcataaacaggaagtagagctcctccaaaatgcagccacaatttcccaacctcctgacaggcaatctgaaccagccactcacccagctgtattgcaagagaacactcagatcgagccaagtgaacccaaaaaccaagaagaaaagaaactgtcccaggtgctaaatgagttgcaagtatcacacgcagagaccacattggaactagaaaagaccagggacatgcttattctgcagcgcaaaatcaacgtgtgttatcaggaggaactggaggcaatgatgacaaaagctgacaatgataatagagatcacaaagaaaagctggagaggttgactcgactactagacctcaagaataaccgtatcaagcagctggaagaacagctcaaagatgttgcttatggcacccgaccgttgtcgttatgtttggaaacactgccagcccatggagatgaggataaagtggatatttctctgctgcatcagggtgagaatctttttgaactgcacatccaccaggccttcctgacatctgccgccctagctcaggctggagatacccaacctaccactttctgcacctattccttctatgactttgaaacccactgtaccccattatctgtggggccacagcccctctatgacttcacctcccagtatgtgatggagacagattcgcttttcttacactaccttcaagaggcttcagcccggcttgacatacaccaggccatggccagtgaacacagcactcttgctgcaggatggatttgctttgacagggtgctagagactgtggagaaagtccatggcttggccacactgattggagctggtggagaagagttcggggttctagagtactggatgaggctgcgtttccccataaaacccagcctacaggcgtgcaataaacgaaagaaagcccaggtctacctgtcaaccgatgtgcttggaggccggaaggcccaggaagaggagttcagatcggagtcttgggaacctcagaacgagctgtggattgaaatcaccaagtgctgtggcctccggagtcgatggctgggaactcaacccagtccatatgctgtgtaccgcttcttcaccttttctgaccatgacactgccatcattccagccagtaacaacccctactttagagaccaggctcgattcccagtgcttgtgacctctgacctggaccattatctgagacgggaggccttgtctatacatgtttttgatgatgaagacttagagcctggctcgtatcttggccgagcccgagtgcctttactgcctcttgcaaaaaatgaatctatcaaaggtgattttaacctcactgaccctgcagagaaacccaacggatctattcaagtgcaactggattggaagtttccctacataccccctgagagcttcctgaaaccagaagctcagactaaggggaaggataccaaggacagttcaaagatctcatctgaagaggaaaaggcttcatttccttcccaggatcagatggcatctcctgaggttcccattgaagctggccagtatcgatctaagagaaaacctcctcatgggggagaaagaaaggagaaggagcaccaggttgtgagctactcaagaagaaaacatggcaaaagaataggtgttcaaggaaagaatagaatggagtatcttagccttaacatcttaaatggaaatacaccagagcaggtgaattacactgagtggaagttctcagagactaacagcttcataggtgatggctttaaaaatcagcacgaggaagaggaaatgacattatcccattcagcactgaaacagaaggaacctctacatcctgtaaatgacaaagaatcctctgaacaaggttctgaagtcagtgaagcacaaactaccgacagtgatgatgtcatagtgccacccatgtctcagaaatatcctaaggcagattcagagaagatgtgcattgaaattgtctccctggccttctacccagaggcagaagtgatgtctgatgagaacataaaacaggtgtatgtggagtacaaattctacgacctacccttgtcggagacagagactccagtgtccctaaggaagcctagggcaggagaagaaatccactttcactttagcaaggtaatagacctggacccacaggagcagcaaggccgaaggcggtttctgttcgacatgctgaatggacaagatcctgatcaaggacatttaaagtttacagtggtaagtgatcctctggatgaagaaaagaaagaatgtgaagaagtgggatatgcatatcttcaactgtggcagatcctggagtcaggaagagatattctagagcaagagctagacattgttagccctgaagatctggctaccccaataggaaggctgaaggtttcccttcaagcagctgctgtcctccatgctatttacaaggagatgactgaagatttgttttcatgaaggaacaagtgctattccaatctaaaagtctctgagggaaccatagtaaaaagtctcttataaagttagcttgctataacatgaa

SEQ ID NO: 175299 - DNA, 2371 bp, Homo sapiens
  Payload ID: 14432
  Gene Symbol: RPGRIP1
  Gene Name: retinitis pigmentosa GTPase regulator interacting protein 1
  ENST ID: ENST00000555587
  CDS Start-End: 1-2286
atgcttattctgcagcgcaaaatcaacgtgtgttatcaggaactggaggcaatgatgacaaaagctgacaatgataatagagatcacaaagaaaagctggagaggttgactcgactactagacctcaagaataaccgtatcaagcagctggaaggtattttaagaagccatgaccttccaacatctgaacagctcaaagatgttgcttatggcacccgaccgttgtcgttatgtttggaaacactgccagcccatggagatgaggataaagtggatatttctctgctgcatcagggtgagaatctttttgaactgcacatccaccaggccttcctgacatctgccgccctagctcaggctggagatacccaacctaccactttctgcacctattccttctatgactttgaaacccactgtaccccattatctgtggggccacagcccctctatgacttcacctcccagtatgtgatggagacagattcgcttttcttacactaccttcaagaggcttcagcccggcttgacatacaccaggccatggccagtgaacacagcactcttgctgcaggatggatttgctttgacagggtgctagagactgtggagaaagtccatggcttggccacactgattggagctggtggagaagagttcggggttctagagtactggatgaggctgcgtttccccataaaacccagcctacaggcgtgcaataaacgaaagaaagcccaggtctacctgtcaaccgatgtgcttggaggccggaaggcccaggaagaggagttcagatcggagtcttgggaacctcagaacgagctgtggattgaaatcaccaagtgctgtggcctccggagtcgatggctgggaactcaacccagtccatatgctgtgtaccgcttcttcaccttttctgaccatgacactgccatcattccagccagtaacaacccctactttagagaccaggctcgattcccagtgcttgtgacctctgacctggaccattatctgagacgggaggccttgtctatacatgtttttgatgatgaagacttagagcctggctcgtatcttggccgagcccgagtgcctttactgcctcttgcaaaaaatgaatctatcaaaggtgattttaacctcactgaccctgcagagaaacccaacggatctattcaagtgcaactggattggaagtttccctacataccccctgagagcttcctgaaaccagaagctcagactaaggggaaggataccaaggacagttcaaagatctcatctgaagaggaaaaggcttcatttccttcccaggatcagatggcatctcctgaggttcccattgaagctggccagtatcgatctaagagaaaacctcctcatgggggagaaagaaaggagaaggagcaccaggttgtgagctactcaagaagaaaacatggcaaaagaataggtgttcaaggaaagaatagaatggagtatcttagccttaacatcttaaatggaaatacaccagagcaggtgaattacactgagtggaagttctcagagactaacagcttcataggtgatggctttaaaaatcagcacgaggaagaggaaatgacattatcccattcagcactgaaacagaaggaacctctacatcctgtaaatgacaaagaatcctctgaacaaggttctgaagtcagtgaagcacaaactaccgacagtgatgatgtcatagtgccacccatgtctcagaaatatcctaaggcagattcagagaagatgtgcattgaaattgtctccctggccttctacccagaggcagaagtgatgtctgatgagaacataaaacaggtgtatgtggagtacaaattctacgacctacccttgtcggagacagagactccagtgtccctaaggaagcctagggcaggagaagaaatccactttcactttagcaaggtaatagacctggacccacaggagcagcaaggccgaaggcggtttctgttcgacatgctgaatggacaagatcctgatcaaggacatttaaagtttacagtggtaagtgatcctctggatgaagaaaagaaagaatgtgaagaagtgggatatgcatatcttcaactgtggcagatcctggagtcaggaagagatattctagagcaagagctagacattgttagccctgaagatctggctaccccaataggaaggctgaaggtttcccttcaagcagctgctgtcctccatgctatttacaaggagatgactgaagatttgttttcatgaaggaacaagtgctattccaatctaaaagtctctgagggaaccatagtaaaaagtctcttataaagttagcttgctataacatgaa

SEQ ID NO: 175300 - DNA, 402 bp, Homo sapiens
  Payload ID: 14432
  Gene Symbol: RPGRIP1
  Gene Name: retinitis pigmentosa GTPase regulator interacting protein 1
  ENST ID: ENST00000557606
  CDS Start-End: 1-402
ttaacatcttaaatggaaatacaccagagcaggtgaattacactgagtggaagttctcagagactaacagcttcataggtgatggctttaaaaatcagcacgaggaagaggaaatgacattatcccattcagcactgaaacagaaggaacctctacatcctgtaaatgcagacaaagaatcctctgaacaaggttctgaagtcagtgaagcacaaactaccgacagtgatgatgtcatagtgccacccatgtctcagaaatatcctaaggcagattcagagaagatgtgcattgaaattgtctccctggccttctacccagaggcagaagtgatgtctgatgagaacataaaacaggtgtatgtggagtacaaattctacgacctacccttgtcggagacag

SEQ ID NO: 175301 - DNA, 566 bp, Homo sapiens
  Payload ID: 14432
  Gene Symbol: RPGRIP1
  Gene Name: retinitis pigmentosa GTPase regulator interacting protein 1
  ENST ID: ENST00000557351
  CDS Start-End: 67-566
agttatgaataaagcaagggcagaaaaaaacatgtaggggagagaatgaggaactaggtccaggagatgctgaaactggataataaagacgtcatatcacaccccttggggtatccatctgagagcttgctttccattgccagcatgctggacagcagtgacagctccagtcagccccactggagcaacgagctcatagcggaacagctacagcagcaagtctctcagctgcaggatcagctggatgctgagctggaggacaagagaaaagttttacttgagctgtccagggagaaaggtggagtttcgctcttgttgctcaggctcgagtgcaatggcacgatttcagctcactgcaaccttcacctcccagcccaaaatgaggatctgaagcttgaagtcaccaacatacttcagaagcataaacaggaagtagagctcctccaaaatgcagccacaatttcccaacctcctgacaggcaatctgaaccagccactcacccagctgtattgcaagagaacactcagatcgagccaagtgaacccaaaaaccaagaagaaaagaa

SEQ ID NO: 175302 - DNA, 4840 bp, Homo sapiens
  Payload ID: 14433
  Gene Symbol: RB1
  Gene Name: retinoblastoma 1
  Uniprot ID: P06400
  ENST ID: ENST00000267163
  CDS Start-End: 139-2925
tccggtttttctcaggggacgttgaaattatttttgtaacgggagtcgggagaggacggggcgtgccccgacgtgcgcgcgcgtcgtcctccccggcgctcctccacagctcgctggctcccgccgcggaaaggcgtcatgccgcccaaaaccccccgaaaaacggccgccaccgccgccgctgccgccgcggaacccccggcaccgccgccgccgccccctcctgaggaggacccagagcaggacagcggcccggaggacctgcctctcgtcaggcttgagtttgaagaaacagaagaacctgattttactgcattatgtcagaaattaaagataccagatcatgtcagagagagagcttggttaacttgggagaaagtttcatctgtggatggagtattgggaggttatattcaaaagaaaaaggaactgtggggaatctgtatctttattgcagcagttgacctagatgagatgtcgttcacttttactgagctacagaaaaacatagaaatcagtgtccataaattctttaacttactaaaagaaattgataccagtaccaaagttgataatgctatgtcaagactgttgaagaagtatgatgtattgtttgcactcttcagcaaattggaaaggacatgtgaacttatatatttgacacaacccagcagttcgatatctactgaaataaattctgcattggtgctaaaagtttcttggatcacatttttattagctaaaggggaagtattacaaatggaagatgatctggtgatttcatttcagttaatgctatgtgtccttgactattttattaaactctcacctcccatgttgctcaaagaaccatataaaacagctgttatacccattaatggttcacctcgaacacccaggcgaggtcagaacaggagtgcacggatagcaaaacaactagaaaatgatacaagaattattgaagttctctgtaaagaacatgaatgtaatatagatgaggtgaaaaatgtttatttcaaaaattttataccttttatgaattctcttggacttgtaacatctaatggacttccagaggttgaaaatctttctaaacgatacgaagaaatttatcttaaaaataaagatctagatgcaagattatttttggatcatgataaaactcttcagactgattctatagacagttttgaaacacagagaacaccacgaaaaagtaaccttgatgaagaggtgaatgtaattcctccacacactccagttaggactgttatgaacactatccaacaattaatgatgattttaaattcagcaagtgatcaaccttcagaaaatctgatttcctattttaacaactgcacagtgaatccaaaagaaagtatactgaaaagagtgaaggatataggatacatctttaaagagaaatttgctaaagctgtgggacagggttgtgtcgaaattggatcacagcgatacaaacttggagttcgcttgtattaccgagtaatggaatccatgcttaaatcagaagaagaacgattatccattcaaaattttagcaaacttctgaatgacaacatttttcatatgtctttattggcgtgcgctcttgaggttgtaatggccacatatagcagaagtacatctcagaatcttgattctggaacagatttgtctttcccatggattctgaatgtgcttaatttaaaagcctttgatttttacaaagtgatcgaaagttttatcaaagcagaaggcaacttgacaagagaaatgataaaacatttagaacgatgtgaacatcgaatcatggaatcccttgcatggctctcagattcacctttatttgatcttattaaacaatcaaaggaccgagaaggaccaactgatcaccttgaatctgcttgtcctcttaatcttcctctccagaataatcacactgcagcagatatgtatctttctcctgtaagatctccaaagaaaaaaggttcaactacgcgtgtaaattctactgcaaatgcagagacacaagcaacctcagccttccagacccagaagccattgaaatctacctctctttcactgttttataaaaaagtgtatcggctagcctatctccggctaaatacactttgtgaacgccttctgtctgagcacccagaattagaacatatcatctggacccttttccagcacaccctgcagaatgagtatgaactcatgagagacaggcatttggaccaaattatgatgtgttccatgtatggcatatgcaaagtgaagaatatagaccttaaattcaaaatcattgtaacagcatacaaggatcttcctcatgctgttcaggagacattcaaacgtgttttgatcaaagaagaggagtatgattctattatagtattctataactcggtcttcatgcagagactgaaaacaaatattttgcagtatgcttccaccaggccccctaccttgtcaccaatacctcacattcctcgaagcccttacaagtttcctagttcacccttacggattcctggagggaacatctatatttcacccctgaagagtccatataaaatttcagaaggtctgccaacaccaacaaaaatgactccaagatcaagaatcttagtatcaattggtgaatcattcgggacttctgagaagttccagaaaataaatcagatggtatgtaacagcgaccgtgtgctcaaaagaagtgctgaaggaagcaaccctcctaaaccactgaaaaaactacgctttgatattgaaggatcagatgaagcagatggaagtaaacatctcccaggagagtccaaatttcagcagaaactggcagaaatgacttctactcgaacacgaatgcaaaagcagaaaatgaatgatagcatggatacctcaaacaaggaagagaaatgaggatctcaggaccttggtggacactgtgtacacctctggattcattgtctctcacagatgtgactgtataactttcccaggttctgtttatggccacatttaatatcttcagctctttttgtggatataaaatgtgcagatgcaattgtttgggtgattcctaagccacttgaaatgttagtcattgttatttatacaagattgaaaatcttgtgtaaatcctgccatttaaaaagttgtagcagattgtttcctcttccaaagtaaaattgctgtgctttatggatagtaagaatggccctagagtgggagtcctgataacccaggcctgtctgactactttgccttcttttgtagcatataggtgatgtttgctcttgtttttattaatttatatgtatatttttttaatttaacatgaacacccttagaaaatgtgtcctatctatcttccaaatgcaatttgattgactgcccattcaccaaaattatcctgaactcttctgcaaaaatggatattattagaaattagaaaaaaattactaattttacacattagattttattttactattggaatctgatatactgtgtgcttgttttataaaattttgcttttaattaaataaaagctggaagcaaagtataaccatatgatactatcatactactgaaacagatttcatacctcagaatgtaaaagaacttactgattattttcttcatccaacttatgtttttaaatgaggattattgatagtactcttggtttttataccattcagatcactgaatttataaagtacccatctagtacttgaaaaagtaaagtgttctgccagatcttaggtatagaggaccctaacacagtatatcccaagtgcactttctaatgtttctgggtcctgaagaattaagatacaaattaattttactccataaacagactgttaattataggagccttaatttttttttcatagagatttgtctaattgcatctcaaaattattctgccctccttaatttgggaaggtttgtgttttctctggaatggtacatgtcttccatgtatcttttgaactggcaattgtctatttatcttttatttttttaagtcagtatggtctaacactggcatgttcaaagccacattatttctagtccaaaattacaagtaatcaagggtcattatgggttaggcattaatgtttctatctgattttgtgcaaaagcttcaaattaaaacagctgcattagaaaaagaggcgcttctcccctcccctacacctaaaggtgtatttaaactatcttgtgtgattaacttatttagagatgctgtaacttaaaataggggatatttaaggtagcttcagctagcttttaggaaaatcactttgtctaactcagaattatttttaaaaagaaatctggtcttgttagaaaacaaaattttattttgtgctcatttaagtttcaaacttactattttgacagttattttgataacaatgacactagaaaacttgactccatttcatcattgtttctgcatgaatatcatacaaatcagttagtttttaggtcaagggcttactatttctgggtcttttgctactaagttcacattagaattagtgccagaattttaggaacttcagagatcgtgtattgagatttcttaaataatgcttcagatattattgctttattgcttttttgtattggttaaaactgtacatttaaaattgctatgttactattttctacaattaatagtttgtctattttaaaataaattagttgttaagagtcttaatggtctgatgttgtgttctttgtattaagtacactaatgttctcttttctgtctaggagaagatagatagaagataactctcctagtatctcatcc

SEQ ID NO: 175303 - DNA, 480 bp, Homo sapiens
  Payload ID: 14433
  Gene Symbol: RB1
  Gene Name: retinoblastoma 1
  ENST ID: ENST00000467505
  CDS Start-End: 139-300
tccggtttttctcaggggacgttgaaattatttttgtaacgggagtcgggagaggacggggcgtgccccgacgtgcgcgcgcgtcgtcctccccggcgctcctccacagctcgctggctcccgccgcggaaaggcgtcatgccgcccaaaaccccccgaaaaacggccgccaccgccgccgctgccgccgcggaacccccggcaccgccgccgccgccccctcctgaggaggacccagagcaggacagcggcccggaggacctgcctctcgtcaggggaagtattacaaatggaagatgatctggtgatttcatttcagttaatgctatgtgtccttgactattttattaaactctcacctcccatgttgctcaaagaaccatataaaacagctgttatacccattaatggttcacctcgaacacccaggcgaggtcagaacaggagtgcacggatagcaaaacaactagaaaatgatac

SEQ ID NO: 175304 - DNA, 1417 bp, Homo sapiens
  Payload ID: 14434
  Gene Symbol: RBBP4
  Gene Name: retinoblastoma binding protein 4
  Uniprot ID: Q09028
  ENST ID: ENST00000373485
  CDS Start-End: 74-1306
agcgagctcttgcagcctccccgcccctcccgcaacgctcgaccccaggattcccccggctcgcctgcccgccatggccgacaaggaagcagccttcgacgacgcagtggaagaacgagtgatcaacgaggaatacaaaatatggaaaaagaacaccccttttctttatgatttggtgatgacccatgctctggagtggcccagcctaactgcccagtggcttccagatgtaaccagaccagaagggaaagatttcagcattcatcgacttgtcctggggacacacacatcggatgaacaaaaccatcttgttatagccagtgtgcagctccctaatgatgatgctcagtttgatgcgtcacactacgacagtgagaaaggagaatttggaggttttggttcagttagtggaaaaattgaaatagaaatcaagatcaaccatgaaggagaagtaaacagggcccgttatatgccccagaacccttgtatcatcgcaacaaagactccttccagtgatgttcttgtttttgactatacaaaacatccttctaaaccagatccttctggagagtgcaacccagacttgcgtctccgtggacatcagaaggaaggctatgggctttcttggaacccaaatctcagtgggcacttacttagtgcttcagatgaccataccatctgcctgtgggacatcagtgccgttccaaaggagggaaaagtggtagatgcgaagaccatctttacagggcatacggcagtagtagaagatgtttcctggcatctactccatgagtctctgtttgggtcagttgctgatgatcagaaacttatgatttgggatactcgttcaaacaatacttccaaaccaagccactcagttgatgctcacactgctgaagtgaactgcctttctttcaatccttatagtgagttcattcttgccacaggatcagctgacaagactgttgccttgtgggatctgagaaatctgaaacttaagttgcattcctttgagtcacataaggatgaaatattccaggttcagtggtcacctcacaatgagactattttagcttccagtggtactgatcgcagactgaatgtctgggatttaagtaaaattggagaggaacaatccccagaagatgcagaagacgggccaccagagttgttgtttattcatggtggtcatactgccaagatatctgatttctcctggaatcccaatgaaccttgggtgatttgttctgtatcagaagacaatatcatgcaagtgtggcaaatggagttagtccttgaccactagtttgatgccatctccattttgggtgacctgtttcaccagcaggcctgttactctccatgactaactgtgtaagtgcttaaaatggaataaattgcttttctacataacccc

SEQ ID NO: 175305 - DNA, 7943 bp, Homo sapiens
  Payload ID: 14434
  Gene Symbol: RBBP4
  Gene Name: retinoblastoma binding protein 4
  Uniprot ID: Q09028
  ENST ID: ENST00000373493
  CDS Start-End: 160-1437
gctcccattggctgatgttggcgcgaaggtgcgcgagtcagccctcgcgctgggggcgcaggaaacaatagaggccgcgcgcacagagcgagctcttgcagcctccccgcccctcccgcaacgctcgaccccaggattcccccggctcgcctgcccgccatggccgacaaggaagcagccttcgacgacgcagtggaagaacgagtgatcaacgaggaatacaaaatatggaaaaagaacaccccttttctttatgatttggtgatgacccatgctctggagtggcccagcctaactgcccagtggcttccagatgtaaccagaccagaagggaaagatttcagcattcatcgacttgtcctggggacacacacatcggatgaacaaaaccatcttgttatagccagtgtgcagctccctaatgatgatgctcagtttgatgcgtcacactacgacagtgagaaaggagaatttggaggttttggttcagttagtggaaaaattgaaatagaaatcaagatcaaccatgaaggagaagtaaacagggcccgttatatgccccagaacccttgtatcatcgcaacaaagactccttccagtgatgttcttgtttttgactatacaaaacatccttctaaaccagatccttctggagagtgcaacccagacttgcgtctccgtggacatcagaaggaaggctatgggctttcttggaacccaaatctcagtgggcacttacttagtgcttcagatgaccataccatctgcctgtgggacatcagtgccgttccaaaggagggaaaagtggtagatgcgaagaccatctttacagggcatacggcagtagtagaagatgtttcctggcatctactccatgagtctctgtttgggtcagttgctgatgatcagaaacttatgatttgggatactcgttcaaacaatacttccaaaccaagccactcagttgatgctcacactgctgaagtgaactgcctttctttcaatccttatagtgagttcattcttgccacaggatcagctgacaagactgttgccttgtgggatctgagaaatctgaaacttaagttgcattcctttgagtcacataaggatgaaatattccaggttcagtggtcacctcacaatgagactattttagcttccagtggtactgatcgcagactgaatgtctgggatttaagtaaaattggagaggaacaatccccagaagatgcagaagacgggccaccagagttgttgtttattcatggtggtcatactgccaagatatctgatttctcctggaatcccaatgaaccttgggtgatttgttctgtatcagaagacaatatcatgcaagtgtggcaaatggcagagaacatttataatgatgaagaccctgaaggaagcgtggatccagaaggacaagggtcctagatatgtctttacttgttgtgattttagactccccttttttcttctcaaccctgagagtgatttaacactggttttgagacagactttattcagctatccctctatataataggtaccaccgataatgctattagcccaaaccgtgggtgttttctaaatattaataggggggcttgattcaacaaagccacagacttaacgttgaaattttcttcaggaattttctagtaacccaggtctaaagtagctacagaaaggggaatattatgtgtgattatttttcttcttatgctatatccccaagtttttcagactcatttaagtaaaggctagagtgagtaaggaatagagccaaatgaggtaggtgtctgagccatgaagtataaatactgaaagatgtcacttttattcaggaaatagggggagattcaagtcatatagattcctactcgaaaatcttgacacctgactttccaggatgcacattttcatacgtagaccagtttcctcttggtttcttcagttaagtcaaaacaacacgttcctctttccccatatattcatatatttttgctcgttagtgtatttcttgagctgttttcatgttgtttatttcctgtctgtgaaatggtgtttttttttttgttgttggtttttttttttttttttttaacttgggaccaccaagttgtaaagatgtatgtttttacctgacagttataccacaggtagactgtcaagttgagaagagtgaatcaataacttgtatttgttttaaaaattaaattaatccttgataagagttgctttttttttttaggagttagtccttgaccactagtttgatgccatctccattttgggtgacctgtttcaccagcaggcctgttactctccatgactaactgtgtaagtgcttaaaatggaataaattgcttttctacataaccccatgctgatgggttttatttagtataaaacatccatcaaacaccagtctctggcttctagaagagtccttcagatgacagttgttgtccatggtctttgactatcaagagcagaattaaatgtaatagtcccagagctgtagaaaagaactttactccttcccagggaaagtgaaagacataaaacactgaatcagaggtggcacagattagtctttgataaggtaacgtttctttgaagtctatctgtagagaactacatggacttccaagagtgtcaaaggcagtgtggtagagagaatttaaggcaagatttaaatttggaaaaggtgcttgaaccttttctcagaggttttatttccccagtatgtttttcactggggcctttacttaggttagaaataataggctttgaaggcctctatcaccagatgcaataaccagataaaattcctgttttttcccaatcgcttagttttttgttgttgttgttttttaactgagtagatcattctgacccagaactactttcatgaggtaagatctttgggaaaatctgaatagcgttaaccattagattcaaatctcaaatggtttcttttcaagtctagttgttttagagtatagtgagaaataccttgacacaattttaagagtaaactatatgggtcagcatatccttgaacaaaaagtagactttgtaaaagtattcatttaaattctaacactcgtggcacaaaagaatggaaattgtaaacccatgtaatggaaattggctatctttttgaccccacatgtgcccctcaaaaatgtttttggtttgggtcaacacaaggcaagatacattctttaaaatactcccagatgtgtccatacattcatccttcactcagtgcatatgtgagggttgttgctggaagacaggaggctcatctttcctttccttggtgcattgagatcagtatcaacagcagatgaaatagaatccagcaaagagttgacatgttctgcctccggccaactctagaatctttttaagcaggtcagccagtatttgcaacttccacaggatgaattgcttgccaagtttctggcactcttgtctggttggaagagtacatccaaagggtacttagtgatcctttgctaagaagttttttgctgtttccgggttacagatttggccatatatttctaaacagcccctgtaaagttgaaagaaaaagtttataacagtgaacttctgaggtttagttactgcaggctttgttgagaagagattgttacagtgtgatttatggatgatcagggatgactttcccctagcaaatatttggatgcctcctgtttgtcaaatagaatgaatggtgatggtgatgggagggatagttaaacgttttctctgctaggttaacttcttacaggtataattacaatgcctgaaattctgtagtttcatttctttggattagtcgttgtcttttccagattgtacacaatctgatcaacacaaaggtagttagtagatcattaacctcaattgcaaggttataatttctcaaacattaagcatattatcagtcatgtggattcaaacacagtataagaaaatcctcaaggctgggtgtgatggcttatgcctgtaatcccagctacttagcaggctgaggcaggagtattgtttgaacccaggaggcagagttgcagtgagccaagatcgtgccactactccagcctgggcaaaatagcaagacccgaccccccatctctactaaaaagaaatttaaaaaaataaaatcctagaaaattagaaaaagcaacaatagttacttgtgggccaggcgcggtggttcacgcctgtaatcccagcactttgagaggctgaggcacgtggatcacaaggtcaggagttcaagaccagcctggccaagatggtgaaaccccgtttctactaaaaatacaaaaactagctggccgtggtggcatgctcctgtagtcccagctactcaggaggctgaggcaggaaaatcacttgaacccaggaggtggaggttgcagtgaactgagaccgtgccactgcactccagcctgggtggcagagcgagactgtctcaaaaaaaaaagaaagttgtgaatttgatgtaagcttaggaaatgaataaaatttataggcatctgtataatgtacaacttgacacggactttcttttatccttagtttctttcacggactctagaacttttatcagaatatactggtaaaacattgggggagggatcctgagtaggtgattggtcagaaagatgccttcagttttgtcagtgtctaaaagttaagtctgtttaggccaagcatggtggctcacacctgaaatcccagcactctgggaggccgaggcaagtggatcacaaggtcaggagatgagaccatcttagccaacatggtgaaaccccgtctctactaaaatacaaaaaaattagccaggcgtggtggtgcgtgcctataatcccagctacttgggaggctgaggcaggggaatcgcttgaacccgggaggcagaggtcacgccactgcactccagcctggcaacagagcaagactccgtctcaaaaaaaaaaaaaaaaaaaaagagtaagtctgtgtaacatgaacatctctgcttccacccaaaaccacagcctttgaatattatataaggaacttaatggatagatatgtttattatttttgatagcacaactgctttctctgctattataaggaaaactgagaatagcaggtgggtagggtaggatgaggaaacaagatgcccaaagcctagatgccacagaattcatggtgataatcagggcatattttgagtcctactagaaacaaacattccaaatgaactctgaatgcctgactcaggcgttttggaggtttgggttatccccttgtcattaggcacacaagggttttttgttgtttttgttttttgggtttttgttttgttttgaggcagtctcactctgttgtacaagctggagtgctgtattgtgatcttgactcactgcaacctctgcctcctggttcaagcgattctcctgccttggcctcctgagtagctgggattataagtgcctgccactatgcccggctaatttttgtatttttagtggagatggagttttgccatgttggccaggctggtcttgaactcctgactccaggtgatccaccctcctcagcctcccaaagtgctaggattacaggcgtgagccaccccgtccggcctgtttttaaggcattaattagtattgttaggaaagcagtaacaatgcaaacaccactcttctcttcacaaagatcaccttgagactgtgtctccattccacctgcctgagaagtgggagcatcagcctgttccaggctcttgggtagtagcatagccctttaaaaagagagagccattttccatgtgtttttggataagcacaatttgaaaatcatttcccaaatcctctttttgtttttgattctaaggtaaaattttccctaagccctcccaccatcccctcagccagtattagatgagatttgtatagcagcagaaactgacttataagtagagagctcttcagcaagactgagccttagctgttccatctctttgttcttctgttgctggagttgcaccccatttcttaactgcctctggcgttcttccatttcctccagctgttcctgcatgagatggccaagaacatttctaatgagccaaacaataaaaactcacattgtccactcttacttataaaacacttttttgttcattgtttaatcttgatagcagtattgaggctggtatttatatgataggttatgaaacaggttcaaagaagttgtgtcttggaaaaaaagtgacaatgcttttgaaaatgatgacgaaaaaggcatcttgtctgttaaccacagcttgctttaatagaatcctgggagggtgattgggactttttagtattacaaccttagtgtcattgaggaggattttggtctagttagtgggctgagtttcatatacctctccctccatgtgcaggtttgttaagataattggtagtttttaataatataaaatacttaagttgaaatacaaaagtgtggcaacaattattaaatattggctagaattctaggagagttacacaactagtggaagtccatgtttagaaaataaatggcttgtttaaggaaaagtttttgtgtccaaagctccttaaagtcagagagatttctacctggtacttaacatcatatggaaattgatgctttagtgagggtgttggctatcctattgctaatttcctgcatccttttttcttctttatttttgtatagagacagggtctcgctatgttgcccaggctggtcttgttcctgggctcaagcagtcctcccgcctcggtctcccaaagtgctgggattacaggtgtgagccactgtgcccagcttatccttttttcattacacaaaaagactgaatttggttagttctaagttggaagataaagatggtatgcacaggaggcccttgggagccctcagataactttctcattcttccagaatcaggctgggatgcattctgtaaattttccctgcctaggatgtatacctgaggaataaggtaaggaagatgtcagcaagtcagtctctggtttacctgctagctggcatggatccttaaggaagcaggagggagttgggaagagaggaaggggtgaagttggtatcttttaaagcgagagtgattttacctcagattttgaagaatactaaggaatccagttgttggggtacatgctattattagaaggatctagataatttgtcctctgagtcatacttgacattgtacctgtggcacatcaatccgcactgtttgatactctggctgaatctcagctttcaccaacattgtcaaaggaccttttttagtgcccagccatgcctaagagtgtgtcatctgaagagggaagcatctgcatactgctgtcctgattgctcagtcctcactacctaccagacccgttggtaaggtacaaaagtacatgcttggaaaagcagtctgcaccaccagtgataagctgtgacagagtggaacagcctcaatgaaatgaaggaaggattgctacagtggcattaaggatggtctcttaatcctgtgttaaccactagattaactttacaatcaactcaaaatccttcaaaggctttccactttctttagtggcattcagaccccctctagtttgacccctacctccaacttgaacctctgttactcttccgtatgaacattttcctctagccctggactactagtaccgaagtcactagtcacataggactcatttgaaatatgactagtctcaattgagatgtaatgtaagtgtaaaatacacagcagatttctaagacagcacacaaaatgtaaaatatgtcaaaaatatttgatactgattacatgttgaaatatatgtgttgggttaaataaaatgcattaaagttaa

SEQ ID NO: 175306 - DNA, 580 bp, Homo sapiens
  Payload ID: 14434
  Gene Symbol: RBBP4
  Gene Name: retinoblastoma binding protein 4
  ENST ID: ENST00000445722
  CDS Start-End: 319-580
ttccctgggaccgatttcggtcgcagctggcgaagccagcggtggggcccccggccagtgtttgtttctcttcctgcctccgatatcggtttctcggcctctgtcccgagcgtggggacaccgcttcctacccacaaggctcggagctcgggcctcctcgtcgggcttgtgagtttcggcgcgcacgagcgtgctccgaaggcctggctggccccttggcctggaacggcagccttcgacgacgcagtggaagaacgagtgatcaacgaggaatacaaaatatggaaaaagaacaccccttttctttatgatttggtgatgacccatgctctggagtggcccagcctaactgcccagtggcttccagatgtaaccagaccagaagggaaagatttcagcattcatcgacttgtcctggggacacacacatcggatgaacaaaaccatcttgttatagccagtgtgcagctccctaatgatgatgctcagtttgatgcgtcacactacgacagtgagaaaggagaatttggaggttttggttcagttagtggaaaaattgaaatagaaatcaagatcaacc

SEQ ID NO: 175307 - DNA, 1674 bp, Homo sapiens
  Payload ID: 14434
  Gene Symbol: RBBP4
  Gene Name: retinoblastoma binding protein 4
  Uniprot ID: Q09028
  ENST ID: ENST00000458695
  CDS Start-End: 167-1339
gggtgcctgggctgagccgcggcctcgacatggcctaacagtgagggcaggcccgagtttgccgagtgcagtccccgcagccttcgacgacgcagtggaagaacgagtgatcaacgaggaatacaaaatatggaaaaagaacaccccttttctttatgatttggtgatgacccatgctctggagtggcccagcctaactgcccagtggcttccagatgtaaccagaccagaagggaaagatttcagcattcatcgacttgtcctggggacacacacatcggatgaacaaaaccatcttgttatagccagtgtgcagctccctaatgatgatgctcagtttgatgcgtcacactacgacagtgagaaaggagaatttggaggttttggttcagttagtggaaaaattgaaatagaaatcaagatcaaccatgaaggagaagtaaacagggcccgttatatgccccagaacccttgtatcatcgcaacaaagactccttccagtgatgttcttgtttttgactatacaaaacatccttctaaaccagatccttctggagagtgcaacccagacttgcgtctccgtggacatcagaaggaaggctatgggctttcttggaacccaaatctcagtgggcacttacttagtgcttcagatgaccataccatctgcctgtgggacatcagtgccgttccaaaggagggaaaagtggtagatgcgaagaccatctttacagggcatacggcagtagtagaagatgtttcctggcatctactccatgagtctctgtttgggtcagttgctgatgatcagaaacttatgatttgggatactcgttcaaacaatacttccaaaccaagccactcagttgatgctcacactgctgaagtgaactgcctttctttcaatccttatagtgagttcattcttgccacaggatcagctgacaagactgttgccttgtgggatctgagaaatctgaaacttaagttgcattcctttgagtcacataaggatgaaatattccaggttcagtggtcacctcacaatgagactattttagcttccagtggtactgatcgcagactgaatgtctgggatttaagtaaaattggagaggaacaatccccagaagatgcagaagacgggccaccagagttgttgtttattcatggtggtcatactgccaagatatctgatttctcctggaatcccaatgaaccttgggtgatttgttctgtatcagaagacaatatcatgcaagtgtggcaaatggcagagaacatttataatgatgaagaccctgaaggaagcgtggatccagaaggacaagggtcctagatatgtctttacttgttgtgattttagactccccttttttcttctcaaccctgagagtgatttaacactggttttgagacagactttattcagctatccctctatataataggtaccaccgataatgctattagcccaaaccgtgggtgttttctaaatattaataggggggcttgattcaacaaagccacagacttaacgttgaaattttcttcaggaattttctagtaacccaggtctaaagtagctacagaaaggggaatattatgtgtgattatttttcttcttatgctatatccccaagtttttcagactcatttaagtaaaggctagag

SEQ ID NO: 175308 - DNA, 1788 bp, Homo sapiens
  Payload ID: 14434
  Gene Symbol: RBBP4
  Gene Name: retinoblastoma binding protein 4
  Uniprot ID: Q09028
  ENST ID: ENST00000414241
  CDS Start-End: 166-1440
aggagcgctcccattggctgatgttggcgcgaaggtgcgcgagtcagccctcgcgctgggggcgcaggaaacaatagaggccgcgcgcacagagcgagctcttgcagcctccccgcccctcccgcaacgctcgaccccaggattcccccggctcgcctgcccgccatggccgacaaggaagccttcgacgacgcagtggaagaacgagtgatcaacgaggaatacaaaatatggaaaaagaacaccccttttctttatgatttggtgatgacccatgctctggagtggcccagcctaactgcccagtggcttccagatgtaaccagaccagaagggaaagatttcagcattcatcgacttgtcctggggacacacacatcggatgaacaaaaccatcttgttatagccagtgtgcagctccctaatgatgatgctcagtttgatgcgtcacactacgacagtgagaaaggagaatttggaggttttggttcagttagtggaaaaattgaaatagaaatcaagatcaaccatgaaggagaagtaaacagggcccgttatatgccccagaacccttgtatcatcgcaacaaagactccttccagtgatgttcttgtttttgactatacaaaacatccttctaaaccagatccttctggagagtgcaacccagacttgcgtctccgtggacatcagaaggaaggctatgggctttcttggaacccaaatctcagtgggcacttacttagtgcttcagatgaccataccatctgcctgtgggacatcagtgccgttccaaaggagggaaaagtggtagatgcgaagaccatctttacagggcatacggcagtagtagaagatgtttcctggcatctactccatgagtctctgtttgggtcagttgctgatgatcagaaacttatgatttgggatactcgttcaaacaatacttccaaaccaagccactcagttgatgctcacactgctgaagtgaactgcctttctttcaatccttatagtgagttcattcttgccacaggatcagctgacaagactgttgccttgtgggatctgagaaatctgaaacttaagttgcattcctttgagtcacataaggatgaaatattccaggttcagtggtcacctcacaatgagactattttagcttccagtggtactgatcgcagactgaatgtctgggatttaagtaaaattggagaggaacaatccccagaagatgcagaagacgggccaccagagttgttgtttattcatggtggtcatactgccaagatatctgatttctcctggaatcccaatgaaccttgggtgatttgttctgtatcagaagacaatatcatgcaagtgtggcaaatggcagagaacatttataatgatgaagaccctgaaggaagcgtggatccagaaggacaagggtcctagatatgtctttacttgttgtgattttagactccccttttttcttctcaaccctgagagtgatttaacactggttttgagacagactttattcagctatccctctatataataggtaccaccgataatgctattagcccaaaccgtgggtgttttctaaatattaataggggggcttgattcaacaaagccacagacttaacgttgaaattttcttcaggaattttctagtaacccaggtctaaagtagctacagaaaggggaatattatgtgtgattatttttcttcttatgctatatccccaagtttttcagactcatttaagtaaaggctagagtgagtaaggaata

SEQ ID NO: 175309 - DNA, 783 bp, Homo sapiens
  Payload ID: 14434
  Gene Symbol: RBBP4
  Gene Name: retinoblastoma binding protein 4
  ENST ID: ENST00000460669
  CDS Start-End: 1-543
gttgctgatgatcagaaacttatgatttgggatactcgttcaaacaatacttccaaaccaagccactcagttgatgctcacactgctgaagtgaactgcctttctttcaatccttatagtgagttcattcttgccacaggatcagctgacaagactgttgccttgtgggatctgagaaatctgaaacttaagttgcattcctttgagtcacataaggatgaaatattccaggttcagtggtcacctcacaatgagactattttagcttccagtggtactgatcgcagactgaatgtctgggatttaagtaaaattggagaggaacaatccccagaagatgcagaagacgggccaccagagttgttgtttattcatggtggtcatactgccaagatatctgatttctcctggaatcccaatgaaccttgggtgatttgttctgtatcagaagacaatatcatgcaagtgtggcaaatggcagagaacatttataatgatgaagaccctgaaggaagcgtggatccagaaggacaagggtcctagatatgtctttacttgttgtgattttagactccccttttttcttctcaaccctgagagtgatttaacactggttttgagacagactttattcagctatccctctatataataggagttagtccttgaccactagtttgatgccatctccattttgggtgacctgtttcaccagcaggcctgttactctccatgactaactgtgtaagtgcttaaaatggaataaattgcttttctacataa

SEQ ID NO: 175310 - DNA, 544 bp, Homo sapiens
  Payload ID: 14434
  Gene Symbol: RBBP4
  Gene Name: retinoblastoma binding protein 4
  ENST ID: ENST00000477563
  CDS Start-End: 30-344
ccaggattcccccggctcgcctgcccgccatggccgacaaggaagcagccttcgacgacgcagtggaagaacgagtgatcaacgaggaatacaaaatatggaaaaagaacaccccttttctttatgatttggtgatgacccatgctctggagtggcccagcctaactgcccagtggcttccagatgtaaccagaccagaagggaaagatttcagcattcatcgacttgtcctggggacacacacatcggatgaacaaaaccatcttgttatagccagtgtgcagctccctaatgatgatgctcagtttgatgcgtcacactacgacagtgagaaaggaggctgagtgcagtggtgcgatctcactgcagcctccgcctcctgggttcaagtgattctcctgcctcagcctcctgagtagctgggattacagaatttggaggttttggttcagttagtggaaaaattgaaatagaaatcaagatcaaccatgaaggagaagtaaacagggcccgttatatgccccagaacccttgtatcatcgca

SEQ ID NO: 175311 - DNA, 700 bp, Homo sapiens
  Payload ID: 14434
  Gene Symbol: RBBP4
  Gene Name: retinoblastoma binding protein 4
  ENST ID: ENST00000527118
  CDS Start-End: 130-318
gcgcgagtcagccctcgcgctgggggcgcaggaaacaatagaggccgcgcgcacagagcgagctcttgcagcctccccgcccctcccgcaacgctcgaccccaggattcccccggctcgcctgcccgccatggccgacaaggaagcagccttcgacgacgcagtggaagaacgagtgatcaacgaggaatacaaaatatggaaaaagaacaccccttttctttatgatttggtgatgacccatgctctggagtggcccagcctaactgcccagtggcttccagatgtaaccagaatttggaggttttggttcagttagtggaaaaattgaaatagaaatcaagatcaaccatgaaggagaagtaaacagggcccgttatatgccccagaacccttgtatcatcgcaacaaagactccttccagtgatgttcttgtttttgactatacaaaacatccttctaaaccagatccttctggagagtgcaacccagacttgcgtctccgtggacatcagaaggaaggctatgggctttcttggaacccaaatctcagtgggcacttacttagtgcttcagatgaccataccatctgcctgtgggacatcagtgccgttccaaaggagggaaaagtggtagatgcgaagaccatctttacagggcatacggcagtagtagaagatgtttcctggcatctactccat

SEQ ID NO: 175312 - DNA, 882 bp, Homo sapiens
  Payload ID: 14434
  Gene Symbol: RBBP4
  Gene Name: retinoblastoma binding protein 4
  ENST ID: ENST00000463378
  CDS Start-End: 1-788
ctctgtttgggtcagttgctgatgatcagaaacttatgatttgggatactcgttcaaacaatacttccaaaccaagccactcagttgatgctcacactgctgaagtgaactgcctttctttcaatccttatagtgagttcattcttgccacaggatcagctgacaagactgttgccttgtgggatctgagaaatctgaaacttaagttgcattcctttgagtcacataaggatgaaatattccaggttcagtggtcacctcacaatgagactattttagcttccagtggtactgatcgcagactgaatgtctgggatttaagtaaaattggagaggaacaatccccagaagatgcagaagacgggccaccagagttgttgtttattcatggtggtcatactgccaagatatctgatttctcctggaatcccaatgaaccttgggtgatttgttctgtatcagaagacaatatcatgcaagtgtggcaaatgatggtctctcactttttcacccaggctggagtgcaatggtgcaatctcggctcactgcaacttccacctcccaggttcgatcgattctcctgcctcagccttctgagtagctgggactataggcagagaacatttataatgatgaagaccctgaaggaagcgtggatccagaaggacaagggtcctagatatgtctttacttgttgtgattttagactccccttttttcttctcaaccctgagagtgatttaacactggttttgagacagactttattcagctatccctctatataataggtaccaccgataatgctattagcccaaaccgtgggtgttttctaaatattaataggggggcttgattcaacaaagccacagacttaacgtt

SEQ ID NO: 175313 - DNA, 568 bp, Homo sapiens
  Payload ID: 14434
  Gene Symbol: RBBP4
  Gene Name: retinoblastoma binding protein 4
  ENST ID: ENST00000526193
  CDS Start-End: 91-354
agaggccgcgcgcacagagcgagctcttgcagcctccccgcccctcccgcaacgctcgaccccaggattcccccggctcgcctgcccgccatggccgacaaggaagcagccttcgacgacgcagtggaagaacgagtgatcaacgaggaatacaaaatatggaaaaagaacaccccttttctttatgatttggtgatgacccatgctctggagtggcccagcctaactgcccagtggcttccagatgtaaccagatccttctggagagtgcaacccagacttgcgtctccgtggacatcagaaggaaggctatgggctttcttggaacccaaatctcagtgggcacttacttagtgcttcagatgaccataccatctgcctgtgggacatcagtgccgttccaaaggagggaaaagtggtagatgcgaagaccatctttacagggcatacggcagtagtagaagatgtttcctggcatctactccatgagtctctgtttgggtcagttgctgatgatcagaaacttatgatttgggatactcgttcaaacaatacttccaaaccaagc

SEQ ID NO: 175314 - DNA, 616 bp, Homo sapiens
  Payload ID: 14434
  Gene Symbol: RBBP4
  Gene Name: retinoblastoma binding protein 4
  ENST ID: ENST00000482190
  CDS Start-End: 1-504
tccaaaccaagccactcagttgatgctcacactgctgaagtgaactgcctttctttcaatccttatagtgagttcattcttgccacaggatcagctgacaagactgttgccttgtgggatctgagaaatctgaaacttaagttgcattcctttgagtcacataaggatgaaatattccaggttcagtggtcacctcacaatgagactattttagcttccagtggtactgatcgcagactgaatgtctgggatttaagtaaaattggagaggaacaatccccagaagatgcagaagacgggccaccagagttgttgtttattcatggtggtcatactgccaagatatctgatttctcctggaatcccaatgaaccttgggtgatttgttctgtatcagaagacaatatcatgcaagtgtggcaaatgggcaggcagagaacatttataatgatgaagaccctgaaggaagcgtggatccagaaggacaagggagttagtccttgaccactagtttgatgccatctccattttgggtgacctgtttcaccagcaggcctgttactctccatgactaactgtgtaagtgcttaaaatggaataaattgcttttctacat

SEQ ID NO: 175315 - DNA, 1547 bp, Homo sapiens
  Payload ID: 14434
  Gene Symbol: RBBP4
  Gene Name: retinoblastoma binding protein 4
  ENST ID: ENST00000492348
  CDS Start-End: 91-354
agaggccgcgcgcacagagcgagctcttgcagcctccccgcccctcccgcaacgctcgaccccaggattcccccggctcgcctgcccgccatggccgacaaggaagcagccttcgacgacgcagtggaagaacgagtgatcaacgaggaatacaaaatatggaaaaagaacaccccttttctttatgatttggtgatgacccatgctctggagtggcccagcctaactgcccagtggcttccagatgtaaccagatccttctggagagtgcaacccagacttgcgtctccgtggacatcagaaggaaggctatgggctttcttggaacccaaatctcagtgggcacttacttagtgcttcagatgaccataccatctgcctgtgggacatcagtgccgttccaaaggagggaaaagtggtagatgcgaagaccatctttacagggcatacggcagtagtagaagatgtttcctggcatctactccatgagtctctgtttgggtcagttgctgatgatcagaaacttatgatttgggatactcgttcaaacaatacttccaaaccaagccactcagttgatgctcacactgctgaagtgaactgcctttctttcaatccttatagtgagttcattcttgccacaggatcagctgacaagactgttgccttgtgggatctgagaaatctgaaacttaagttgcattcctttgagtcacataaggatgaaatattccaggttcagtggtcacctcacaatgagactattttagcttccagtggtactgatcgcagactgaatgtctgggatttaagtaaaattggagaggaacaatccccagaagatgcagaagacgggccaccagagttgttgtttattcatggtggtcatactgccaagatatctgatttctcctggaatcccaatgaaccttgggtgatttgttctgtatcagaagacaatatcatgcaagtgtggcaaatggcagagaacatttataatgatgaagaccctgaaggaagcgtggatccagaaggacaagggtcctagatatgtctttacttgttgtgattttagactccccttttttcttctcaaccctgagagtgatttaacactggttttgagacagactttattcagctatccctctatataataggtaccaccgataatgctattagcccaaaccgtgggtgttttctaaatattaataggggggcttgattcaacaaagccacagacttaacgttgaaattttcttcaggaattttctagtaacccaggtctaaagtagctacagaaaggggaatattatgtgtgattatttttcttcttatgctatatccccaagtttttcagactcatttaagtaaaggctagagtgagtaaggaatagagccaaatgaggtaggtgtctgagccatgaagtataaatactgaaagatgtcacttttattcaggaaatagggggagattcaagtcatatagattcctactcgaaaatcttgacacctgactttccaggatgcacattttcatacgtaga

SEQ ID NO: 175316 - DNA, 619 bp, Homo sapiens
  Payload ID: 14434
  Gene Symbol: RBBP4
  Gene Name: retinoblastoma binding protein 4
  ENST ID: ENST00000475321
  CDS Start-End: 1-619
gaacccttgtatcatcgcaacaaagactccttccagtgatgttcttgtttttgactatacaaaacatccttctaaaccagggcatacggcagtagtagaagatgtttcctggcatctactccatgagtctctgtttgggtcagttgctgatgatcagaaacttatgatttgggatactcgttcaaacaatacttccaaaccaagccactcagttgatgctcacactgctgaagtgaactgcctttctttcaatccttatagtgagttcattcttgccacaggatcagctgacaagactgttgccttgtgggatctgagaaatctgaaacttaagttgcattcctttgagtcacataaggatgaaatattccaggttcagtggtcacctcacaatgagactattttagcttccagtggtactgatcgcagactgaatgtctgggatttaagtaaaattggagaggaacaatccccagaagatgcagaagacgggccaccagagttgttgtttattcatggtggtcatactgccaagatatctgatttctcctggaatcccaatgaaccttgggtgatttgttctgtatcagaagacaatatcatgcaagtgtggcaaatg

SEQ ID NO: 175317 - DNA, 632 bp, Homo sapiens
  Payload ID: 14434
  Gene Symbol: RBBP4
  Gene Name: retinoblastoma binding protein 4
  ENST ID: ENST00000490500
  CDS Start-End: 428-632
agttccctgggaccgatttcggtcgcagctggcgaagccagcggtggggcccccggccagtgtttgtttctcttcctgcctccgatatcggtttctcggcctctgtcccgagcgtggggacaccgcttcctacccacaaggctcggagctcgggcctcctcgtcgggcttgtgagtttcggcgcgcacgagcgtgctccgaaggcctggctggccccttggcctggaacgggtaacggagtgtttggcggggatggcccgaggagtttcggcgccgcgaaagtggagagtgtggatgcctctgccgtggggatttagacaaatcacctccatttcatgcagccttcgacgacgcagtggaagaacgagtgatcaacgaggaatacaaaatatggaaaaagaacaccccttttctttatgatttggtgatgacccatgctctggagtggcccagcctaactgcccagtggcttccagatgtaaccagaccagaagggaaagatttcagcattcatcgacttgtcctggggacacacacatcggatgaacaaaaccatcttgttatagccagtgtgcagctccctaatgatgatgctcagtttgatgcgtcacactacgacagtgagaaaggag

SEQ ID NO: 175318 - DNA, 4404 bp, Homo sapiens
  Payload ID: 14435
  Gene Symbol: RBBP5
  Gene Name: retinoblastoma binding protein 5
  Uniprot ID: Q15291
  ENST ID: ENST00000264515
  CDS Start-End: 143-1759
gcggggccttctaaggccgaaagtcttcggagcttgcgccagtctcttcgcggcgtccaccacttagacgcaagttgctgaagccggccggggagaaggtgttgttgccggagctgagaccgggcggccacagtccgcagggatgaacctcgagttgctggagtcctttgggcagaactatccagaggaagctgatggaactttggattgtatcagcatggctttgacttgcacctttaacaggtggggcacactgcttgcagttggctgtaatgatggccgaattgtcatctgggatttcttgacaagaggcattgctaaaataattagtgcacacatccatccagtgtgttctttatgctggagccgagatggtcataaactcgtgagtgcttccactgataacatagtgtcacagtgggatgttctttcaggcgactgtgaccagaggtttcgattcccttcacccatcttaaaagtccaatatcatccacgagatcagaacaaggttctcgtgtgtcccatgaaatctgctcctgtcatgttgaccctttcagattccaaacatgttgttctgccggtggacgatgactccgatttgaacgttgtggcatcttttgataggcgaggggaatatatttatacgggaaacgcaaaaggcaagattttggtcctaaaaacagattctcaggatcttgttgcttccttcagagtgacaactggaacaagcaataccacagccattaagtcaattgagtttgcccggaaggggagttgctttttaattaacacggcagatcgaataatcagagtttatgatggcagagaaatcttaacatgtggaagagatggagagcctgaacctatgcagaaattgcaggatttggtgaataggaccccatggaagaaatgttgtttctctggggatggggaatacatcgtggcaggttctgcccggcagcatgccctgtacatctgggagaagagcattggcaacctggtgaagattctccatgggacgagaggagaactcctcttggatgtagcttggcatcctgttcgacccatcatagcatccatttccagtggagtggtatctatctgggcacagaatcaagtagaaaactggagtgcatttgcaccagacttcaaagaattggatgaaaatgtagaatacgaagaaagggaatcagagtttgatattgaagatgaagataagagtgagcctgagcagacaggggctgatgctgcagaagatgaggaagtggatgtcaccagcgtggaccctattgctgccttctgtagcagtgatgaagagctggaagattcaaaggctctattgtatttacccattgcccctgaggtagaagacccagaagaaaatccttacggccccccaccggatgcagtccaaacctccttgatggatgaaggggctagttcagagaagaagaggcagtcctcagcagatgggtcccagccacctaagaagaaacccaaaacaaccaatatagaacttcaaggagtaccaaatgatgaagtccatccactactgggtgtgaagggggatggcaaatccaagaagaagcaagcaggccggcctaaaggatcaaaaggtaaagagaaagattctccatttaaaccgaaactctacaaaggggacagaggtttacctctggaaggatcagcgaagggtaaagtgcaggcggaactcagccagcccttgacagcaggaggagcaatctcagaactgttatgaagaccttcgaagttcttcattctttctcactttgccatcatgtggcctctggacactgtggtcagtcatttgaaaattgactttaatttaaaacaaaggcctgtgcctcccacccaggaggtgggagggtgaattttatgtttaaatgaagaagtgaattatggaagaagagtatacgaccttcccttccctttcaagcataagtccaaatagactctcaggaatgaagatttgtgaagacatcagataggaattttgactcatttaaactttgatgcttagttatgttgctggagaaaagatacttatgttttgctcatctaacttcattgtacccagcgtcattttgacatgtcatttcctatctcccatttgccttcggtcctcaatgcatgtctttgagtgacttcttatctgaaattttgctactggtatcctaggaaagcttttgttggatactctcattttaaacttctcctctccccagatacctcctatatttccatattgtgtgcaaaggatgggcagaaaagaaagtgcttgaaagatttcaaattttcagaaagggaacaacgaaggccctctcttcctctcataccacgttttgctcaagaagctgggctgtaacaattcagggttttcccttgttttcctctcattgcatgtttccctccaatattggttcattgtcatcaatcatggtttttgaagatagctagttttatccatctccagcaaagaatcatcaatagtttatattgctttacctgtgctggcttccagagatggaaacaaacccaggtgtctctcaacaagctacttttttactggggtgggggaatctatgcaaggagtaaagtaaaaccatccagaatcaaagcagcaaccacatagttcaaatcaaagatcaaggtgaattttttgtatcactgcctgtggaaatctatcctcatcagtcattgcatttttccctgcctatacctgtgctcctttttcttactgtgttttcagtcacttcctttctgtgaaaggttgcttagctttttttttgacatttgttgttctttataaaaataacagattggatagatgtgtacatttggtgtttgaaattctctgaaaatcccattaggaaaccaggtgtgaaaagggctcagtagcttctctgagtggcgtttttagctgactggaagtgcttaatctggatcgtcttttttttttttttttttttttcaatattttaaaaggagaatttaaatactgtgcttactgtgaaatatatcagttggtgagccgggcgtggtgggtcacgcctgtaatcccagcactttgggaggccaaggcgggttgatcacccgaggtcaggagttcaagaccagcctggccaacgtggtgaaagcctgtatctattaaaagacaaaaattagctgggcgtggtagtacatgcctgtaatcccagctacactggaggctgagtcaggagaatcacttgaacgtgggaggcagaggttgcagtgagtggagatcgcaccactgccctccagcctaggtgacagaatgagactctatctcaaaaaaaaaaaaaaaatgatatcagttggtggatgctcctataggtagccaaacacattgattacctgttagattttaggatagaaatcaaagtagagcacgtcagcaagagcctctttgtctcactccatcatttaaaaccagtatattcagtagttgaagaaagagctctccctgagtcagttgcaaaacgtctatatttttagatgccactacttttttcttaaatattcattttgagactgtcatgagttagaccagtggttgagattagtagatggctcactagacatgtttttgttttgcagacattatatccattccagtcctctgcactgtacactgcagcagtgtgcaaactatgggacttagagggtttctgccatctttccacgtgtgaagtagcttggtttcctctgcctgtgcatttggatgtttgtgctatgtccacctcctaaactggctactgagaaaatcatcttcagccctgtcagattgtctctggcagtagctcctaataattatttatgtttttggaatttttttttcaacttttaaaaaaccttctatccatttcaatttgaattatttgatttgtacaatatatgtatattctcttcttcctttttgtcatccctgccctgccacccccaaaattttgtttttaaaaatattctgggctgggcatggtggctcacacctgtaatcccagcacttggggaggccgaggctggtggatcatctgaggtcaggtgtttgagaccagcctggtcaacatggtgaaaccccgtctctactaaaaatacaaaaattagctgggcgtggtggcgggcacctgtaatcctagctactcgggaggctgaggcaggagaattgcttgaatccaggaggcagaggttgcagtgagctgagattgcgccactgcactccagcctgggtgacagagcaagactccatctcaaaaaaaaaaaaaaaaaaaaatctgtagttttgtacaagatgagacttagccttgggtacttcttgctgaagctttaatgctttgtaaataaaatcggatgtttattaaagaa

SEQ ID NO: 175319 - DNA, 4290 bp, Homo sapiens
  Payload ID: 14435
  Gene Symbol: RBBP5
  Gene Name: retinoblastoma binding protein 5
  Uniprot ID: Q15291
  ENST ID: ENST00000367164
  CDS Start-End: 143-1645
gcggggccttctaaggccgaaagtcttcggagcttgcgccagtctcttcgcggcgtccaccacttagacgcaagttgctgaagccggccggggagaaggtgttgttgccggagctgagaccgggcggccacagtccgcagggatgaacctcgagttgctggagtcctttgggcagaactatccagaggaagctgatggaactttggattgtatcagcatggctttgacttgcacctttaacaggtggggcacactgcttgcagttggctgtaatgatggccgaattgtcatctgggatttcttgacaagaggcattgctaaaataattagtgcacacatccatccagtgtgttctttatgctggagccgagatggtcataaactcgtgagtgcttccactgataacatagtgtcacagtgggatgttctttcaggcgactgtgaccagaggtttcgattcccttcacccatcttaaaagtccaatatcatccacgagatcagaacaaggttctcgtgtgtcccatgaaatctgctcctgtcatgttgaccctttcagattccaaacatgttgttctgccggtggacgatgactccgatttgaacgttgtggcatcttttgataggcgaggggaatatatttatacgggaaacgcaaaaggcaagattttggtcctaaaaacagattctcaggatcttgttgcttccttcagagtgacaactggaacaagcaataccacagccattaagtcaattgagtttgcccggaaggggagttgctttttaattaacacggcagatcgaataatcagagtttatgatggcagagaaatcttaacatgtggaagagatggagagcctgaacctatgcagaaattgcaggatttggtgaataggaccccatggaagaaatgttgtttctctggggatggggaatacatcgtggcaggttctgcccggcagcatgccctgtacatctgggagaagagcattggcaacctggtgaagattctccatgggacgagaggagaactcctcttggatgtagcttggcatcctgttcgacccatcatagcatccatttccagtggagtggtatctatctgggcacagaatcaagtagaaaactggagtgcatttgcaccagacttcaaagaattggatgaaaatgtagaatacgaagaaagggaatcagagtttgatattgaagatgaagataagagtgagcctgagcagacaggggctgatgctgcagaagatgaggaagtggatgtcaccagcgtggaccctattgctgccttctgtagcagtgatgaagagctggaagattcaaaggctctattgtatttacccattgcccctgaggtagaagacccagaagaaaatccttacggccccccaccggatgcagtccaaacctccttgatggatgaaggggctagttcagagaagaagaggcagtcctcagcagatgggtcccagccacctaagaagaaacccaaaacaaccaatatagaacttcaaggagtaccaaatgatgaagtccatccactactgggtgtgaagggggatggcaaatccaagaagaagcaagcaggccggcctaaaggatcaaaagcaggaggagcaatctcagaactgttatgaagaccttcgaagttcttcattctttctcactttgccatcatgtggcctctggacactgtggtcagtcatttgaaaattgactttaatttaaaacaaaggcctgtgcctcccacccaggaggtgggagggtgaattttatgtttaaatgaagaagtgaattatggaagaagagtatacgaccttcccttccctttcaagcataagtccaaatagactctcaggaatgaagatttgtgaagacatcagataggaattttgactcatttaaactttgatgcttagttatgttgctggagaaaagatacttatgttttgctcatctaacttcattgtacccagcgtcattttgacatgtcatttcctatctcccatttgccttcggtcctcaatgcatgtctttgagtgacttcttatctgaaattttgctactggtatcctaggaaagcttttgttggatactctcattttaaacttctcctctccccagatacctcctatatttccatattgtgtgcaaaggatgggcagaaaagaaagtgcttgaaagatttcaaattttcagaaagggaacaacgaaggccctctcttcctctcataccacgttttgctcaagaagctgggctgtaacaattcagggttttcccttgttttcctctcattgcatgtttccctccaatattggttcattgtcatcaatcatggtttttgaagatagctagttttatccatctccagcaaagaatcatcaatagtttatattgctttacctgtgctggcttccagagatggaaacaaacccaggtgtctctcaacaagctacttttttactggggtgggggaatctatgcaaggagtaaagtaaaaccatccagaatcaaagcagcaaccacatagttcaaatcaaagatcaaggtgaattttttgtatcactgcctgtggaaatctatcctcatcagtcattgcatttttccctgcctatacctgtgctcctttttcttactgtgttttcagtcacttcctttctgtgaaaggttgcttagctttttttttgacatttgttgttctttataaaaataacagattggatagatgtgtacatttggtgtttgaaattctctgaaaatcccattaggaaaccaggtgtgaaaagggctcagtagcttctctgagtggcgtttttagctgactggaagtgcttaatctggatcgtcttttttttttttttttttttttcaatattttaaaaggagaatttaaatactgtgcttactgtgaaatatatcagttggtgagccgggcgtggtgggtcacgcctgtaatcccagcactttgggaggccaaggcgggttgatcacccgaggtcaggagttcaagaccagcctggccaacgtggtgaaagcctgtatctattaaaagacaaaaattagctgggcgtggtagtacatgcctgtaatcccagctacactggaggctgagtcaggagaatcacttgaacgtgggaggcagaggttgcagtgagtggagatcgcaccactgccctccagcctaggtgacagaatgagactctatctcaaaaaaaaaaaaaaaatgatatcagttggtggatgctcctataggtagccaaacacattgattacctgttagattttaggatagaaatcaaagtagagcacgtcagcaagagcctctttgtctcactccatcatttaaaaccagtatattcagtagttgaagaaagagctctccctgagtcagttgcaaaacgtctatatttttagatgccactacttttttcttaaatattcattttgagactgtcatgagttagaccagtggttgagattagtagatggctcactagacatgtttttgttttgcagacattatatccattccagtcctctgcactgtacactgcagcagtgtgcaaactatgggacttagagggtttctgccatctttccacgtgtgaagtagcttggtttcctctgcctgtgcatttggatgtttgtgctatgtccacctcctaaactggctactgagaaaatcatcttcagccctgtcagattgtctctggcagtagctcctaataattatttatgtttttggaatttttttttcaacttttaaaaaaccttctatccatttcaatttgaattatttgatttgtacaatatatgtatattctcttcttcctttttgtcatccctgccctgccacccccaaaattttgtttttaaaaatattctgggctgggcatggtggctcacacctgtaatcccagcacttggggaggccgaggctggtggatcatctgaggtcaggtgtttgagaccagcctggtcaacatggtgaaaccccgtctctactaaaaatacaaaaattagctgggcgtggtggcgggcacctgtaatcctagctactcgggaggctgaggcaggagaattgcttgaatccaggaggcagaggttgcagtgagctgagattgcgccactgcactccagcctgggtgacagagcaagactccatctcaaaaaaaaaaaaaaaaaaaaatctgtagttttgtacaagatgagacttagccttgggtacttcttgctgaagctttaatgctttgtaaataaaatcggatgtttattaaagaa

SEQ ID NO: 175320 - DNA, 5739 bp, Homo sapiens
  Payload ID: 14436
  Gene Symbol: RBBP6
  Gene Name: retinoblastoma binding protein 6
  Uniprot ID: Q7Z6E9
  ENST ID: ENST00000348022
  CDS Start-End: 45-5321
agtgtccacgtctcctcgctgaaccttaggaatcccttggcaccatgtcctgtgtgcattataaattttcctctaaactcaactatgataccgtcacctttgatgggctccacatctccctctgcgacttaaagaagcagattatggggagagagaagctgaaagctgccgactgcgacctgcagatcaccaatgcgcagacgaaagaagaatatactgatgataatgctctgattcctaagaattcttctgtaattgttagaagaattcctattggaggtgttaaatctacaagcaagacatatgttataagtcgaactgaaccagcgatggcaactacaaaagcaattgatgactcttccgcgtctatttctctggcccagcttacaaagactgccaatctggctgaagccaatgcttctgaagaagataaaattaaagcaatgatgtcgcaatctggccatgaatacgacccaatcaattacatgaagaaacctctaggtccaccacctccatcttacacgtgtttccgttgtggtaaacctggacattatattaagaattgcccaacaaatggggataaaaactttgaatctggtcctaggattaaaaagagcactggaattcccagaagtttcatgatggaagtgaaagatcctaatatgaaaggtgcaatgcttaccaacactggaaaatatgcaataccaactatagatgcagaagcatatgcaattgggaagaaagagaaacctcccttcttaccagaggagccatcttcttcctcagaagaagatgatcctatcccagatgaattgttgtgtctcatctgcaaggatattatgactgatgctgttgtgattccctgctgtggaaacagttactgtgatgaatgtataagaacagcactcctggaatcagatgagcacacatgtccgacgtgtcatcaaaatgatgtttctcctgatgctttaattgccaataaatttttacgacaggctgtaaataacttcaaaaatgaaactggctatacaaaaagactacgaaaacagttacctcctccaccacccccaataccacctccgagaccactgattcagaggaacctacaacctctgatgagatctccgatatcaagacaacaagatcctcttatgattccagtgacatcttcatcaactcacccagctccgtctatatcttcattaacttctaatcagtcttccttggcccctcctgtgtctggaaatccgtcttctgctccagctcctgtacctgatataactgcaacagtatccatatcagttcattcagaaaaatcagatggaccttttcgggattctgataataaaatattgccagctgcagctcttgcatcagagcactcaaagggaacctcctcaattgcaattaccgctcttatggaagagaagggttaccaggtgcctgttcttggaaccccatctttgcttggacagtcattattgcatggacagttgatccccacaactggtccagtaagaataaatactgctcgtccaggtggtggtcgaccaggctgggaacattccaacaaacttggctatctggtttctccaccacaacaaattagaagaggggagaggagctgctacagaagtataaaccgtgggcgacaccacagcgaaagatcacagaggactcaaggcccgtcactaccagcaactccagtctttgtacctgttccaccacctcctttgtatccgcctcctccccatacacttcctctccctccgggtgttcctcctccacagttttctcctcagtttcctcctggccagccaccacccgctgggtatagtgtccctcctccagggtttcctccagctcctgccaatttatcaacaccttgggtatcatcaggagtgcagacagctcattcaaataccatcccaacaacacaagcaccacctttgtccagggaagaattctatagagagcagcgacgactaaaagaagagtctaaatctccctatagtggttcttcgtattcaagaagttcatatacttattctaaatcaagatctggttcaacacgttcacgctcttattctcgatcattcagccgctcacattctcgttcctattcacggtcacctccataccccagaagaggcagaggcaagagccgcaattaccgttcacggtctagatctcatggatatcatcgatctaggtcaaggtcacccccttacagacgctatcattcacgatcaagatctcctcaagcgtttaggggacagtctcctaataaacgtaatgtacctcaaggggaaacagaacgtgaatattttaatagatacagagaagttccaccaccatatgacatgaaagcatattatgggagaagtgttgactttagagacccatttgaaaaagaacgctaccgagaatgggagagaaaatatagagagtggtatgaaaaatattataaaggttatgctgctggagcacagcctagaccctcagcaaatagagagaacttttctccagagagatttttgccacttaacatcaggaattctcccttcacaagaggccgcagagaagactatgttggtgggcaaagtcatagaagtcgaaacataggtagcaactatccagaaaagctttcagcaagagatggtcacaatcagaaggataatacaaagtcaaaagagaaggagagtgaaaacgctccaggagatggtaaaggaaataagcataagaaacacagaaaaagaagaaaaggggaggaaagtgagggttttctgaacccagagttattagagacttctaggaaatcaagagaacctacaggtgttgaagaaaataaaacagactcattgtttgttctcccaagtagagatgatgccacacctgttagagatgaaccaatggatgcagaatcaatcacttttaaatcagtgtctgaaaaagacaagagagaaagggataaaccaaaagcaaagggtgataaaaccaaacggaagaatgatggatctgctgtgtccaaaaaagaaaatattgtaaaacctgctaaaggaccccaagaaaaagtagatggagaacgtgagagatctcctcgatctgaacctccaattaaaaaagccaaagaggagactccgaagactgacaatactaaatcatcatcttcctctcagaaggatgaaaaaatcactggaacccccagaaaagctcactctaaatcagcaaaagaacaccaagaaacaaaaccagtcaaagaggaaaaagtgaagaaggactattccaaagatgtcaaatcagaaaagctaacaactaaggaagaaaaggccaagaagcctaatgagaaaaacaaaccacttgataataagggagaaaaaagaaaaagaaaaactgaagaaaaaggcgtagataaagattttgagtcttcttcaatgaaaatctcgaaactagaagtgactgaaatagtgaaaccatcaccaaagcgcaaaatggaacctgatactgaaaaaatggataggacccctgaaaaggacaaaatttctttaagtgcgccagccaaaaaaatcaaactcaacagagaaactgggaagaaaattggaagtacagaaaatatatcaaacacaaaagaaccctctgaaaaattggagtcaacatctagcaaagttaaacaagaaaaagtcaaaggaaaggtcagacgaaaagtgactggaactgaaggatccagctcaactctggtggattacaccagtacgagctcaactggaggcagtcctgtgcggaaatctgaagaaaaaacagatacaaagcgaactgtgattaaaacgatggaagaatataataatgacaataccgcgccagctgaagatgttatcattatgattcaggttcctcaatccaaatgggataaagatgactttgaatctgaagaagaagatgttaaatccacacagcctatatcaagtgtaggaaaacctgctagtgttataaaaaatgttagtacaaagccatcaaatatagtcaagtatcctgagaaagaaagtgagccatccgagaaaattcagaaattcaccaaggacgtgagccatgaaatcatacaacatgaggttaaaagttcaaaaaactctgcatctagtgaaaaagggaaaaccaaagatcgagattattcagtgttggaaaaggagaaccctgaaaagaggaagaacagcactcagccagagaaagagagtaatttggaccgtctgaatgaacaaggaaattttaaaagtctgtctcaatcttccaaagaggctagaacgtcagataaacatgattccactcgtgcttcctcaaataaagacttcactcccaatagagacaaaaaaactgactatgacaccagagagtattcaagttccaaacgtagagatgaaaagaatgaattaacaagacgaaaagactctccttctcggaataaagattctgcatctggacagaaaaataaaccaagggaagagagagatttgcctaaaaaaggaacaggagattccaaaaaaagtaattctagtccctcaagagacagaaaacctcatgatcacaaagccacttatgatactaaacggccaaatgaagagacaaaatctgtagataaaaatccttgtaaggatcgtgagaagcatgtattagaagcaaggaacaataaagagtcaagtggcaataaactactttatatacttaacccaccagagacacaggttgaaaaagagcaaattactgggcaaattgacaagagtactgtcaagcctaaaccccagttaagtcattcctctagactttcctctgacttaactagagaaactgatgaagctgcttttgaaccagactataatgaaagtgacagtgaaagtaatgtttctgtaaaagaagaggaatcttcaggaaacatttctaaggacctgaaagataaaatagtggagaaagcaaaagagagcctggacacagcagcagttgtccaggtgggcataagcaggaatcagagccacagcagccccagcgtcagccccagcagaagccacagtccttctggaagccagacccgaagccacagtagcagtgccagctcagcagaaagtcaggacagcaagaagaagaagaaaaagaaggaaaagaaaaaacacaagaaacataaaaagcataagaagcataagaaacatgcaggcactgaagtggaattggaaaaaagccaaaaacacaaacacaagaaaaagaagtcaaagaagaacaaagataaagagaaggagaaggagaaagatgaccaaaaagtgaaatctgtcactgtgtaaaaagacagattttttaaattgacttaattactaagtcatctgtattaaattttgttataatgtaaagagattcaagccttgtaaataatgacatggaagaccctgtgctgcacttaaaatattgctgcttgattatttgatttttacatcagagctttataacacgaacttttgtacagaattgtgagttgtgaccatgtaacatgagaggttttgctagggcctattatttttaaccaccattaattagttggggtggagtttactgtaatgtgaaattttcacatttgaattttttaattgcctggcaaaagctgatataagttctaaaatatcagcagaatgatttgctgaattcattacaaccctgttatgtcactttttgattacaataaaagttttcagtaaacttttcaaa

SEQ ID NO: 175321 - DNA, 6229 bp, Homo sapiens
  Payload ID: 14436
  Gene Symbol: RBBP6
  Gene Name: retinoblastoma binding protein 6
  Uniprot ID: Q7Z6E9
  ENST ID: ENST00000319715
  CDS Start-End: 433-5811
gagagagagacccgccgggaggtgcggccgcgctatggacccctgaccccgtggggtcgctcggactcttaacgtgtggactgaccgctactgactgcaccgccaatccccccgtctctgccggccccttagcatgagcgagggggacccagccgggtgacattgtgcccgttggcggattctcgatttcccctcttccccgtcctcgtcctcctcctcccccatgaagtgattctgagtatcggggggtctctggattattgttctgacgaacccctgcttgtggttggggggtatttaatctgaggccttagggtccttcggtgtctttgagtgttttgtgtgtacatattttgctcttaaagtttataaatatacgtatattgagagtgtccacgtctcctcgctgaaccttaggaatcccttggcaccatgtcctgtgtgcattataaattttcctctaaactcaactatgataccgtcacctttgatgggctccacatctccctctgcgacttaaagaagcagattatggggagagagaagctgaaagctgccgactgcgacctgcagatcaccaatgcgcagacgaaagaagaatatactgatgataatgctctgattcctaagaattcttctgtaattgttagaagaattcctattggaggtgttaaatctacaagcaagacatatgttataagtcgaactgaaccagcgatggcaactacaaaagcaattgatgactcttccgcgtctatttctctggcccagcttacaaagactgccaatctggctgaagccaatgcttctgaagaagataaaattaaagcaatgatgtcgcaatctggccatgaatacgacccaatcaattacatgaagaaacctctaggtccaccacctccatcttacacgtgtttccgttgtggtaaacctggacattatattaagaattgcccaacaaatggggataaaaactttgaatctggtcctaggattaaaaagagcactggaattcccagaagtttcatgatggaagtgaaagatcctaatatgaaaggtgcaatgcttaccaacactggaaaatatgcaataccaactatagatgcagaagcatatgcaattgggaagaaagagaaacctcccttcttaccagaggagccatcttcttcctcagaagaagatgatcctatcccagatgaattgttgtgtctcatctgcaaggatattatgactgatgctgttgtgattccctgctgtggaaacagttactgtgatgaatgtataagaacagcactcctggaatcagatgagcacacatgtccgacgtgtcatcaaaatgatgtttctcctgatgctttaattgccaataaatttttacgacaggctgtaaataacttcaaaaatgaaactggctatacaaaaagactacgaaaacagttacctcctccaccacccccaataccacctccgagaccactgattcagaggaacctacaacctctgatgagatctccgatatcaagacaacaagatcctcttatgattccagtgacatcttcatcaactcacccagctccgtctatatcttcattaacttctaatcagtcttccttggcccctcctgtgtctggaaatccgtcttctgctccagctcctgtacctgatataactgcaacagtatccatatcagttcattcagaaaaatcagatggaccttttcgggattctgataataaaatattgccagctgcagctcttgcatcagagcactcaaagggaacctcctcaattgcaattaccgctcttatggaagagaagggttaccaggtgcctgttcttggaaccccatctttgcttggacagtcattattgcatggacagttgatccccacaactggtccagtaagaataaatactgctcgtccaggtggtggtcgaccaggctgggaacattccaacaaacttggctatctggtttctccaccacaacaaattagaagaggggagaggagctgctacagaagtataaaccgtgggcgacaccacagcgaaagatcacagaggactcaaggcccgtcactaccagcaactccagtctttgtacctgttccaccacctcctttgtatccgcctcctccccatacacttcctctccctccgggtgttcctcctccacagttttctcctcagtttcctcctggccagccaccacccgctgggtatagtgtccctcctccagggtttcctccagctcctgccaatttatcaacaccttgggtatcatcaggagtgcagacagctcattcaaataccatcccaacaacacaagcaccacctttgtccagggaagaattctatagagagcagcgacgactaaaagaagaggaaaagaaaaagtccaagctagatgagtttacaaatgattttgctaaggaattgatggaatacaaaaagattcaaaaggagcgtaggcgctcattttccaggtctaaatctccctatagtggttcttcgtattcaagaagttcatatacttattctaaatcaagatctggttcaacacgttcacgctcttattctcgatcattcagccgctcacattctcgttcctattcacggtcacctccataccccagaagaggcagaggcaagagccgcaattaccgttcacggtctagatctcatggatatcatcgatctaggtcaaggtcacccccttacagacgctatcattcacgatcaagatctcctcaagcgtttaggggacagtctcctaataaacgtaatgtacctcaaggggaaacagaacgtgaatattttaatagatacagagaagttccaccaccatatgacatgaaagcatattatgggagaagtgttgactttagagacccatttgaaaaagaacgctaccgagaatgggagagaaaatatagagagtggtatgaaaaatattataaaggttatgctgctggagcacagcctagaccctcagcaaatagagagaacttttctccagagagatttttgccacttaacatcaggaattctcccttcacaagaggccgcagagaagactatgttggtgggcaaagtcatagaagtcgaaacataggtagcaactatccagaaaagctttcagcaagagatggtcacaatcagaaggataatacaaagtcaaaagagaaggagagtgaaaacgctccaggagatggtaaaggaaataagcataagaaacacagaaaaagaagaaaaggggaggaaagtgagggttttctgaacccagagttattagagacttctaggaaatcaagagaacctacaggtgttgaagaaaataaaacagactcattgtttgttctcccaagtagagatgatgccacacctgttagagatgaaccaatggatgcagaatcaatcacttttaaatcagtgtctgaaaaagacaagagagaaagggataaaccaaaagcaaagggtgataaaaccaaacggaagaatgatggatctgctgtgtccaaaaaagaaaatattgtaaaacctgctaaaggaccccaagaaaaagtagatggagaacgtgagagatctcctcgatctgaacctccaattaaaaaagccaaagaggagactccgaagactgacaatactaaatcatcatcttcctctcagaaggatgaaaaaatcactggaacccccagaaaagctcactctaaatcagcaaaagaacaccaagaaacaaaaccagtcaaagaggaaaaagtgaagaaggactattccaaagatgtcaaatcagaaaagctaacaactaaggaagaaaaggccaagaagcctaatgagaaaaacaaaccacttgataataagggagaaaaaagaaaaagaaaaactgaagaaaaaggcgtagataaagattttgagtcttcttcaatgaaaatctcgaaactagaagtgactgaaatagtgaaaccatcaccaaagcgcaaaatggaacctgatactgaaaaaatggataggacccctgaaaaggacaaaatttctttaagtgcgccagccaaaaaaatcaaactcaacagagaaactgggaagaaaattggaagtacagaaaatatatcaaacacaaaagaaccctctgaaaaattggagtcaacatctagcaaagttaaacaagaaaaagtcaaaggaaaggtcagacgaaaagtgactggaactgaaggatccagctcaactctggtggattacaccagtacgagctcaactggaggcagtcctgtgcggaaatctgaagaaaaaacagatacaaagcgaactgtgattaaaacgatggaagaatataataatgacaataccgcgccagctgaagatgttatcattatgattcaggttcctcaatccaaatgggataaagatgactttgaatctgaagaagaagatgttaaatccacacagcctatatcaagtgtaggaaaacctgctagtgttataaaaaatgttagtacaaagccatcaaatatagtcaagtatcctgagaaagaaagtgagccatccgagaaaattcagaaattcaccaaggacgtgagccatgaaatcatacaacatgaggttaaaagttcaaaaaactctgcatctagtgaaaaagggaaaaccaaagatcgagattattcagtgttggaaaaggagaaccctgaaaagaggaagaacagcactcagccagagaaagagagtaatttggaccgtctgaatgaacaaggaaattttaaaagtctgtctcaatcttccaaagaggctagaacgtcagataaacatgattccactcgtgcttcctcaaataaagacttcactcccaatagagacaaaaaaactgactatgacaccagagagtattcaagttccaaacgtagagatgaaaagaatgaattaacaagacgaaaagactctccttctcggaataaagattctgcatctggacagaaaaataaaccaagggaagagagagatttgcctaaaaaaggaacaggagattccaaaaaaagtaattctagtccctcaagagacagaaaacctcatgatcacaaagccacttatgatactaaacggccaaatgaagagacaaaatctgtagataaaaatccttgtaaggatcgtgagaagcatgtattagaagcaaggaacaataaagagtcaagtggcaataaactactttatatacttaacccaccagagacacaggttgaaaaagagcaaattactgggcaaattgacaagagtactgtcaagcctaaaccccagttaagtcattcctctagactttcctctgacttaactagagaaactgatgaagctgcttttgaaccagactataatgaaagtgacagtgaaagtaatgtttctgtaaaagaagaggaatcttcaggaaacatttctaaggacctgaaagataaaatagtggagaaagcaaaagagagcctggacacagcagcagttgtccaggtgggcataagcaggaatcagagccacagcagccccagcgtcagccccagcagaagccacagtccttctggaagccagacccgaagccacagtagcagtgccagctcagcagaaagtcaggacagcaagaagaagaagaaaaagaaggaaaagaaaaaacacaagaaacataaaaagcataagaagcataagaaacatgcaggcactgaagtggaattggaaaaaagccaaaaacacaaacacaagaaaaagaagtcaaagaagaacaaagataaagagaaggagaaggagaaagatgaccaaaaagtgaaatctgtcactgtgtaaaaagacagattttttaaattgacttaattactaagtcatctgtattaaattttgttataatgtaaagagattcaagccttgtaaataatgacatggaagaccctgtgctgcacttaaaatattgctgcttgattatttgatttttacatcagagctttataacacgaacttttgtacagaattgtgagttgtgaccatgtaacatgagaggttttgctagggcctattatttttaaccaccattaattagttggggtggagtttactgtaatgtgaaattttcacatttgaattttttaattgcctggcaaaagctgatataagttctaaaatatcagcagaatgatttgctgaattcattacaaccctgttatgtcactttttgattacaataaaagttttcagtaaacttttcaaa

SEQ ID NO: 175322 - DNA, 3384 bp, Homo sapiens
  Payload ID: 14436
  Gene Symbol: RBBP6
  Gene Name: retinoblastoma binding protein 6
  Uniprot ID: Q7Z6E9
  ENST ID: ENST00000381039
  CDS Start-End: 108-2966
gtctttgagtgttttgtgtgtacatattttgctcttaaagtttataaatatacgtatattgagagtgtccacgtctcctcgctgaaccttaggaatcccttggcaccatgtcctgtgtgcattataaattttcctctaaactcaactatgataccgtcacctttgatgggctccacatctccctctgcgacttaaagaagcagattatggggagagagaagctgaaagctgccgactgcgacctgcagatcaccaatgcgcagacgaaagaagaatatactgatgataatgctctgattcctaagaattcttctgtaattgttagaagaattcctattggaggtgttaaatctacaagcaagacatatgttataagtcgaactgaaccagcgatggcaactacaaaagcaattgatgactcttccgcgtctatttctctggcccagcttacaaagactgccaatctggctgaagccaatgcttctgaagaagataaaattaaagcaatgatgtcgcaatctggccatgaatacgacccaatcaattacatgaagaaacctctaggtccaccacctccatcttacacgtgtttccgttgtggtaaacctggacattatattaagaattgcccaacaaatggggataaaaactttgaatctggtcctaggattaaaaagagcactggaattcccagaagtttcatgatggaagtgaaagatcctaatatgaaaggtgcaatgcttaccaacactggaaaatatgcaataccaactatagatgcagaagcatatgcaattgggaagaaagagaaacctcccttcttaccagaggagccatcttcttcctcagaagaagatgatcctatcccagatgaattgttgtgtctcatctgcaaggatattatgactgatgctgttgtgattccctgctgtggaaacagttactgtgatgaatgtataagaacagcactcctggaatcagatgagcacacatgtccgacgtgtcatcaaaatgatgtttctcctgatgctttaattgccaataaatttttacgacaggctgtaaataacttcaaaaatgaaactggctatacaaaaagactacgaaaacagttacctcctccaccacccccaataccacctccgagaccactgattcagaggaacctacaacctctgatgagatctccgatatcaagacaacaagatcctcttatgattccagtgacatcttcatcaactcacccagctccgtctatatcttcattaacttctaatcagtcttccttggcccctcctgtgtctggaaatccgtcttctgctccagctcctgtacctgatataactgcaacagtatccatatcagttcattcagaaaaatcagatggaccttttcgtacgagctcaactggaggcagtcctgtgcggaaatctgaagaaaaaacagatacaaagcgaactgtgattaaaacgatggaagaatataataatgacaataccgcgccagctgaagatgttatcattatgattcaggttcctcaatccaaatgggataaagatgactttgaatctgaagaagaagatgttaaatccacacagcctatatcaagtgtaggaaaacctgctagtgttataaaaaatgttagtacaaagccatcaaatatagtcaagtatcctgagaaagaaagtgagccatccgagaaaattcagaaattcaccaaggacgtgagccatgaaatcatacaacatgaggttaaaagttcaaaaaactctgcatctagtgaaaaagggaaaaccaaagatcgagattattcagtgttggaaaaggagaaccctgaaaagaggaagaacagcactcagccagagaaagagagtaatttggaccgtctgaatgaacaaggaaattttaaaagtctgtctcaatcttccaaagaggctagaacgtcagataaacatgattccactcgtgcttcctcaaataaagacttcactcccaatagagacaaaaaaactgactatgacaccagagagtattcaagttccaaacgtagagatgaaaagaatgaattaacaagacgaaaagactctccttctcggaataaagattctgcatctggacagaaaaataaaccaagggaagagagagatttgcctaaaaaaggaacaggagattccaaaaaaagtaattctagtccctcaagagacagaaaacctcatgatcacaaagccacttatgatactaaacggccaaatgaagagacaaaatctgtagataaaaatccttgtaaggatcgtgagaagcatgtattagaagcaaggaacaataaagagtcaagtggcaataaactactttatatacttaacccaccagagacacaggttgaaaaagagcaaattactgggcaaattgacaagagtactgtcaagcctaaaccccagttaagtcattcctctagactttcctctgacttaactagagaaactgatgaagctgcttttgaaccagactataatgaaagtgacagtgaaagtaatgtttctgtaaaagaagaggaatcttcaggaaacatttctaaggacctgaaagataaaatagtggagaaagcaaaagagagcctggacacagcagcagttgtccaggtgggcataagcaggaatcagagccacagcagccccagcgtcagccccagcagaagccacagtccttctggaagccagacccgaagccacagtagcagtgccagctcagcagaaagtcaggacagcaagaagaagaagaaaaagaaggaaaagaaaaaacacaagaaacataaaaagcataagaagcataagaaacatgcaggcactgaagtggaattggaaaaaagccaaaaacacaaacacaagaaaaagaagtcaaagaagaacaaagataaagagaaggagaaggagaaagatgaccaaaaagtgaaatctgtcactgtgtaaaaagacagattttttaaattgacttaattactaagtcatctgtattaaattttgttataatgtaaagagattcaagccttgtaaataatgacatggaagaccctgtgctgcacttaaaatattgctgcttgattatttgatttttacatcagagctttataacacgaacttttgtacagaattgtgagttgtgaccatgtaacatgagaggttttgctagggcctattatttttaaccaccattaattagttggggtggagtttactgtaatgtgaaattttcacatttgaattttttaattgcctggcaaaagctgatataagttctaaaatatcagcagaatgatttgctgaattcattacaaccctgttatgtcactttttgattacaataaaagttttcagtaaacttttcaaa

SEQ ID NO: 175323 - DNA, 854 bp, Homo sapiens
  Payload ID: 14436
  Gene Symbol: RBBP6
  Gene Name: retinoblastoma binding protein 6
  Uniprot ID: Q7Z6E9
  ENST ID: ENST00000452655
  CDS Start-End: 132-488
tctgaggccttagggtccttcggtgtctttgagtgttttgtgtgtacatattttgctcttaaagtttataaatatacgtatattgagagtgtccacgtctcctcgctgaaccttaggaatcccttggcaccatgtcctgtgtgcattataaattttcctctaaactcaactatgataccgtcacctttgatgggctccacatctccctctgcgacttaaagaagcagattatggggagagagaagctgaaagctgccgactgcgacctgcagatcaccaatgcgcagacgaaagaagaatatactgatgataatgctctgattcctaagaattcttctgtaattgttagaagaattcctattggaggtgttaaatctacaagcaagacatatgttataagtcgaactgaaccagcgatggcaactacaaaagcagtatgtaaaaacacaatctcacactttttctacacattgcttttacctttataatgtagcagtgaagtaaatcattttagaacttaatatccaactgatcatagtacatattgtaaataaaatgtattttgatgacagctcagttgaatatggataatatgtggcatcacttgcacacttattttgtagaaatgggtaatttgtgcccgtaacactgtttcatattaaatatgatagcattatccctgtatgacactgtgttgtacagttaatgtatgatcctttttagatcgtttaggttttacactaaggaacatgatgacatgttctacatttgtctgtctatagttagtattttgtatgtatgtacaggctgttgtgtgctttttgtttcttgcaataaaaaatgtttggagtgta

SEQ ID NO: 175324 - DNA, 3361 bp, Homo sapiens
  Payload ID: 14436
  Gene Symbol: RBBP6
  Gene Name: retinoblastoma binding protein 6
  ENST ID: ENST00000564314
  CDS Start-End: 338-3361
atgatgcaccacgctgattaaattaggcattcagtatataaaggggtcggccacagacgggcaaaaggaacagattcaccgcttcggagtgaattccatgacggcttgcaattttctcgtcgagtttttctttcactagagatagccctcgccctttcattcacacagaggcttttaagaaaaaagcaaccaacctgaagaggacctggcagcaataagtttttggtgaaataacaaagagattgatgactcttccgcgtctatttctctggcccagcttacaaagactgccaatctggctgaagccaatgcttctgaagaagataaaattaaagcaatgatgtcgcaatctggccatgaatacgacccaatcaattacatgaagaaacctctaggtccaccacctccatcttacacgtgtttccgttgtggtaaacctggacattatattaagaattgcccaacaaatggggataaaaactttgaatctggtcctaggattaaaaagagcactggaattcccagaagtttcatgatggaagtgaaagatcctaatatgaaaggtgcaatgcttaccaacactggaaaatatgcaataccaactatagatgcagaagcatatgcaattgggaagaaagagaaacctcccttcttaccagaggagccatcttcttcctcagaagaagatgatcctatcccagatgaattgttgtgtctcatctgcaaggatattatgactgatgctgttgtgattccctgctgtggaaacagttactgtgatgaatgtataagaacagcactcctggaatcagatgagcacacatgtccgacgtgtcatcaaaatgatgtttctcctgatgctttaattgccaataaatttttacgacaggctgtaaataacttcaaaaatgaaactggctatacaaaaagactacgaaaacagttacctcctccaccacccccaataccacctccgagaccactgattcagaggaacctacaacctctgatgagatctccgatatcaagacaacaagatcctcttatgattccagtgacatcttcatcaactcacccagctccgtctatatcttcattaacttctaatcagtcttccttggcccctcctgtgtctggaaatccgtcttctgctccagctcctgtacctgatataactgcaacagtatccatatcagttcattcagaaaaatcagatggaccttttcgggattctgataataaaatattgccagctgcagctcttgcatcagagcactcaaagggaacctcctcaattgcaattaccgctcttatggaagagaagggttaccaggtgcctgttcttggaaccccatctttgcttggacagtcattattgcatggacagttgatccccacaactggtccagtaagaataaatactgctcgtccaggtggtggtcgaccaggctgggaacattccaacaaacttggctatctggtttctccaccacaacaaattagaagaggggagaggagctgctacagaagtataaaccgtgggcgacaccacagcgaaagatcacagaggactcaaggcccgtcactaccagcaactccagtctttgtacctgttccaccacctcctttgtatccgcctcctccccatacacttcctctccctccgggtgttcctcctccacagttttctcctcagtttcctcctggccagccaccacccgctgggtatagtgtccctcctccagggtttcctccagctcctgccaatttatcaacaccttgggtatcatcaggagtgcagacagctcattcaaataccatcccaacaacacaagcaccacctttgtccagggaagaattctatagagagcagcgacgactaaaagaagaggaaaagaaaaagtccaagctagatgagtttacaaatgattttgctaaggaattgatggaatacaaaaagattcaaaaggagcgtaggcgctcattttccaggtctaaatctccctatagtggttcttcgtattcaagaagttcatatacttattctaaatcaagatctggttcaacacgttcacgctcttattctcgatcattcagccgctcacattctcgttcctattcacggtcacctccataccccagaagaggcagaggcaagagccgcaattaccgttcacggtctagatctcatggatatcatcgatctaggtcaaggtcacccccttacagacgctatcattcacgatcaagatctcctcaagcgtttaggggacagtctcctaataaacgtaatgtacctcaaggggaaacagaacgtgaatattttaatagatacagagaagttccaccaccatatgacatgaaagcatattatgggagaagtgttgactttagagacccatttgaaaaagaacgctaccgagaatgggagagaaaatatagagagtggtatgaaaaatattataaaggttatgctgctggagcacagcctagaccctcagcaaatagagagaacttttctccagagagatttttgccacttaacatcaggaattctcccttcacaagaggccgcagagaagactatgttggtgggcaaagtcatagaagtcgaaacataggtagcaactatccagaaaagctttcagcaagagatggtcacaatcagaaggataatacaaagtcaaaagagaaggagagtgaaaacgctccaggagatggtaaaggaaataagcataagaaacacagaaaaagaagaaaaggggaggaaagtgagggttttctgaacccagagttattagagacttctaggaaatcaagagaacctacaggtgttgaagaaaataaaacagactcattgtttgttctcccaagtagagatgatgccacacctgttagagatgaaccaatggatgcagaatcaatcacttttaaatcagtgtctgaaaaagacaagagagaaagggataaaccaaaagcaaagggtgataaaaccaaacggaagaatgatggatctgctgtgtccaaaaaagaaaatattgtaaaacctgctaaaggaccccaagaaaaagtagatggagaacgtgagagatctcctcgatctgaacctccaattaaaaaagccaaagaggagactccgaagactgacaatactaaatcatcatcttcctctcagaaggatgaaaaaatcactggaacccccagaaaagctcactctaaatcagcaaaagaacaccaagaaacaaaaccagtcaaagaggaaaaagtgaagaaggactattccaaagatgtcaaatcagaaaagctaacaactaaggaagaaaaggccaagaagcctaatgagaaaaacaaaccacttgat

SEQ ID NO: 175325 - DNA, 1138 bp, Homo sapiens
  Payload ID: 14436
  Gene Symbol: RBBP6
  Gene Name: retinoblastoma binding protein 6
  ENST ID: ENST00000567686
  CDS Start-End: 238-1138
aaattaggcattcagtatataaaggggtcggccacagacgggcaaaaggaacagattcaccgcttcggagtgaattccatgacggcttgcaattttctcgtcgagtttttctttcactagagatagccctcgccctttcattcacacagaggcttttaagaaaaaagcaaccaacctgaagaggacctggcagcaataagtttttggtgaaataacaaagaggaatcccttggcaccatgtcctgtgtgcattataaattttcctctaaactcaactatgataccgtcacctttgatgggctccacatctccctctgcgacttaaagaagcagattatggggagagagaagctgaaagctgccgactgcgacctgcagatcaccaatgcgcagacgaaagaagaatatactgatgataatgctctgattcctaagaattcttctgtaattgttagaagaattcctattggaggtgttaaatctacaagcaagacatatgttataagtcgaactgaaccagcgatggcaactacaaaagcaattgatgactcttccgcgtctatttctctggcccagcttacaaagactgccaatctggctgaagccaatgcttctgaagaagataaaattaaagcaatgatgtcgcaatctggccatgaatacgacccaatcaattacatgaagaaacctctaggtccaccacctccatcttacacgtgtttccgttgtggtaaacctggacattatattaagaattgcccaacaaatggggataaaaactttgaatctggtcctaggattaaaaagagcactggaattcccagaagtttcatgatggaagtgaaagatcctaatatgaaaggtgcaatgcttaccaacactggaaaatatgcaataccaactatagatgcagaagcatatgcaattgggaagaaagagaaacctcccttcttaccagaggagccatcttcttcctcagaagaagatgatcctatcccagatgaattgttgtgtctcatctgcaaggatattatgactgatgctgttgtgattccctgctgtggaaacagttactgtgatgaatgtataagaacagcactcctggaatcagatgagcacacatgtccgacgtgtcatc

SEQ ID NO: 175326 - DNA, 695 bp, Homo sapiens
  Payload ID: 14436
  Gene Symbol: RBBP6
  Gene Name: retinoblastoma binding protein 6
  ENST ID: ENST00000568015
  CDS Start-End: 220-695
aagagaccccgcagtggggcgctcgtccgaagccaggccgcgtccgccatagtacctggcttggaggtgtcgccgccgctcggtgagagcccccgagcggcagggggccaacacaaaaagggagccggagaagccctagccgctgcccagcagcttgcgggcgtgttctcgcggttccgggcctcaaggcgacggaaacgaaaggaatcccttggcaccatgtcctgtgtgcattataaattttcctctaaactcaactatgataccgtcacctttgatgggctccacatctccctctgcgacttaaagaagcagattatggggagagagaagctgaaagctgccgactgcgacctgcagatcaccaatgcgcagacgaaagaagaatatactgatgataatgctctgattcctaagaattcttctgtaattgttagaagaattcctattggaggtgttaaatctacaagcaagacatatgttataagtcgaactgaaccagcgatggcaactacaaaagcaattgatgactcttccgcgtctatttctctggcccagcttacaaagactgccaatctggctgaagccaatgcttctgaagaagataaaattaaagcaatgatgtcgcaatctggccatgaatacgacccaatcaattacatgaagaaacctctaggtccaccacctccatctta

SEQ ID NO: 175327 - DNA, 529 bp, Homo sapiens
  Payload ID: 14436
  Gene Symbol: RBBP6
  Gene Name: retinoblastoma binding protein 6
  ENST ID: ENST00000562683
  CDS Start-End: 1-415
gaaacctctaggtccaccacctccatcttacacgtgtttccgttgtggtaaacctggacattatattaagaattgcccaacaaatggggataaaaactttgaatctggtcctaggattaaaaagagcactggaattcccagaagtttcatgatggaagtgaaagatcctaatatgaaaggtgcaatgcttaccaacactggaaaatatgcaataccaactatagatgcagaagcatatgcaattgggaagaaagagaaacctcccttcttaccagaggagccatcttcttcctcagaagaagatgatcctatcccagatgaattgttgtgtctcatctgcaaggatattatgactgatgctgttgtgattccctgctgtggaaacagttactgtgatgaatgtaagaagtgctgaatcttggaagatgtatattttagaatatttgtatttacttggaatggctcttcccaacctcatatgttttaataataaaataaataatgttgatgacaagtgttgatcaatgag

SEQ ID NO: 175328 - DNA, 2036 bp, Homo sapiens
  Payload ID: 14437
  Gene Symbol: RBBP7
  Gene Name: retinoblastoma binding protein 7
  Uniprot ID: Q16576
  ENST ID: ENST00000380084
  CDS Start-End: 246-1655
gcgggacgggaccgccgcgccgagggctccgagcacttccggagccgggcgcggggccgagggctgggcccccctcttcccttccctcctccagcggctgcgctccctccggcgccctcggccccggggcggaggcggcccccgccgctgggaagcgagcgccgcggctctttctacgcgcgcgcgcgcgttgaccgcctcggggtcgcggcccttgtccgggggttgctggggtcctcaggcctatggctgccgaggcgggcgtcgtgggagctggggcctcccctgatggggattggagagaccaggcctgtgggcttctgctacacgtgcatttgtcttcccgactgggtcgcgcagcccctgtacgtacaggtcgtcatcttagaacagtgtttgaagatactgtggaggagcgtgtcatcaatgaagaatataaaatctggaagaagaatacaccgtttctatatgacctggttatgacccatgctcttcagtggcccagtcttaccgttcagtggcttcctgaagtgactaaacctgaaggaaaagattatgcccttcattggctagtgctggggactcatacgtctgatgagcagaatcatctggtggttgctcgagtacatattcccaatgatgatgcacagtttgatgcttcccattgtgacagtgacaagggtgaatttggtggctttggttctgtaacaggaaaaattgaatgtgaaattaaaatcaatcacgaaggagaagtaaaccgtgctcgttacatgccgcagaatcctcacatcattgctacaaaaacaccatcttctgatgtgttggtttttgactatacaaaacaccctgctaaaccagacccaagtggagaatgtaatcctgatctcagattaagaggtcaccagaaggaaggctatggtctctcctggaattcaaatttgagtggacatctcctaagtgcatctgatgaccatactgtttgtctgtgggatataaacgcaggaccaaaagaaggcaaaattgtggatgctaaagccatctttactggccactcagctgttgtagaggatgtggcctggcacctgctgcacgagtcattgtttggatctgttgctgatgatcagaaacttatgatatgggacaccaggtccaataccacctccaagccgagtcacttggtggatgcgcacactgccgaagtcaactgcctctcattcaatccctacagcgaatttattctagccaccggctctgcggataagaccgtagctttatgggatctgcgtaacttaaaattaaaactccataccttcgaatctcataaagatgaaattttccaggtccactggtctccacataatgaaactattctggcttcaagtggtactgaccgccgcctgaatgtgtgggatttaagtaaaattggggaagaacaatcagcagaagatgcagaagatgggcctccagaactcctgtttattcatggaggacacactgctaagatttcagattttagctggaaccccaatgagccttgggtcatttgctcagtgtctgaggataacatcatgcagatatggcaaatggctgaaaatatttacaatgatgaagagtcagatgtcacgacatccgaactggagggacaaggatcttaaacccaaagtacgagaaatgtttctgttgaatgtaatgctacatgaatgcttgatttatcaagcgccaaaaaggcattgtatagtaggaaatgtaagtggggtggcttatggcttctttatcctctgattctagcactttcaagtgagctgttgcgtactgtatcatattgtagctattagggaagagaagaatgttgcttaagaaagaacatcaccattgattttaaatacaagtagcagggtattgcctttgattcaactgttttaagtcctcattttctcaaactaagtgcttgctgttcccaaatatgcaagaataacttttacactttttccttccaacacttcttgattggctttgcagaaataaagttttaaaat

SEQ ID NO: 175329 - DNA, 2333 bp, Homo sapiens
  Payload ID: 14437
  Gene Symbol: RBBP7
  Gene Name: retinoblastoma binding protein 7
  Uniprot ID: Q16576
  ENST ID: ENST00000380087
  CDS Start-End: 362-1639
ggtctcggcgccggagccgttggctcccagacccgcctctccgcctcctctcacttttcccagggcggatgcgcctgcgctcagctgcctgggcgggctgggaggcgcgggttgaaaagtctcgttccaagtttggagagagagagaagagcgcctcagacctcggtacccgcgagcggggaggaggcaggaaagaaggacgcggcgtctggggagcacccaggcagcaagacggggcccgggctttcgacagtggggagtgtgacgcgcttgggaaaggcaggagcgccagcggtcgggctgctcttggctaacgagaggagtccgaggcggcggcgaggggcgaacgacccgacgcaagatggcgagtaaagagatgtttgaagatactgtggaggagcgtgtcatcaatgaagaatataaaatctggaagaagaatacaccgtttctatatgacctggttatgacccatgctcttcagtggcccagtcttaccgttcagtggcttcctgaagtgactaaacctgaaggaaaagattatgcccttcattggctagtgctggggactcatacgtctgatgagcagaatcatctggtggttgctcgagtacatattcccaatgatgatgcacagtttgatgcttcccattgtgacagtgacaagggtgaatttggtggctttggttctgtaacaggaaaaattgaatgtgaaattaaaatcaatcacgaaggagaagtaaaccgtgctcgttacatgccgcagaatcctcacatcattgctacaaaaacaccatcttctgatgtgttggtttttgactatacaaaacaccctgctaaaccagacccaagtggagaatgtaatcctgatctcagattaagaggtcaccagaaggaaggctatggtctctcctggaattcaaatttgagtggacatctcctaagtgcatctgatgaccatactgtttgtctgtgggatataaacgcaggaccaaaagaaggcaaaattgtggatgctaaagccatctttactggccactcagctgttgtagaggatgtggcctggcacctgctgcacgagtcattgtttggatctgttgctgatgatcagaaacttatgatatgggacaccaggtccaataccacctccaagccgagtcacttggtggatgcgcacactgccgaagtcaactgcctctcattcaatccctacagcgaatttattctagccaccggctctgcggataagaccgtagctttatgggatctgcgtaacttaaaattaaaactccataccttcgaatctcataaagatgaaattttccaggtccactggtctccacataatgaaactattctggcttcaagtggtactgaccgccgcctgaatgtgtgggatttaagtaaaattggggaagaacaatcagcagaagatgcagaagatgggcctccagaactcctgtttattcatggaggacacactgctaagatttcagattttagctggaaccccaatgagccttgggtcatttgctcagtgtctgaggataacatcatgcagatatggcaaatggctgaaaatatttacaatgatgaagagtcagatgtcacgacatccgaactggagggacaaggatcttaaacccaaagtacgagaaatgtttctgttgaatgtaatgctacatgaatgcttgatttatcaagcgccaaaaaggcattgtatagtaggaaatgtaagtggggtggcttatggcttctttatcctctgattctagcactttcaagtgagctgttgcgtactgtatcatattgtagctattagggaagagaagaatgttgcttaagaaagaacatcaccattgattttaaatacaagtagcagggtattgcctttgattcaactgttttaagtcctcattttctcaaactaagtgcttgctgttcccaaatatgcaagaataacttttacactttttccttccaacacttcttgattggctttgcagaaataaagttttaaaataaaacttgtgtttttttaaaagcttagtgggggggggcgggggagtctactttttgagtagaaatgggtaaaatggtacctttggactcctacagttaaggtcacatggataatgaaagaatacacagaagctgttaagtttatcatacatatttacttaatctatacagaatcaagtagataaaatcagattcacattagtgaaaaatctctacaaaatgtctttgaaaagcaaaacgagactgcctcttaacaattcgtatcctcatgaaagacgtgggctgtaaaaataaagcagtgtgtttagcacaaa

SEQ ID NO: 175330 - DNA, 1904 bp, Homo sapiens
  Payload ID: 14437
  Gene Symbol: RBBP7
  Gene Name: retinoblastoma binding protein 7
  ENST ID: ENST00000404022
  CDS Start-End: 309-1559
cttttcccagggcggatgcgcctgcgctcagctgcctgggcgggctgggaggcgcgggttgaaaagtctcgttccaagtttggagagagagagaagagcgcctcagacctcggtacccgcgagcggggaggaggcaggaaagaaggacgcggcgtctggggagcacccaggcagcaagacggggcccgggctttcgacagtggggagtgtgacgcgcttgggaaaggcaggagcgccagcggtcgggctgctcttggctaacgagaggagtccgaggcggcggcgaggggcgaacgacccgacgcaagatggcgagtaaagagatgtttgaagatactgtggaggagcgtgtcatcaatgaagaatataaaatctggaagaagaatacaccgtttctatatgacctggttatgacccatgctcttcagtggcccagtcttaccgttcagtggcttcctgaagtgactaaacctgaaggaaaagattatgcccttcattggctagtgctggggactcatacgtctgatgagcagaatcatctggtggttgctcgagtacatattcccaatgatgatgcacagtttgatgcttcccattgtgacagtgacaagggtggaaaaattgaatgtgaaattaaaatcaatcacgaaggagaagtaaaccgtgctcgttacatgccgcagaatcctcacatcattgctacaaaaacaccatcttctgatgtgttggtttttgactatacaaaacaccctgctaaaccagacccaagtggagaatgtaatcctgatctcagattaagaggtcaccagaaggaaggctatggtctctcctggaattcaaatttgagtggacatctcctaagtgcatctgatgaccatactgtttgtctgtgggatataaacgcaggaccaaaagaaggcaaaattgtggatgctaaagccatctttactggccactcagctgttgtagaggatgtggcctggcacctgctgcacgagtcattgtttggatctgttgctgatgatcagaaacttatgatatgggacaccaggtccaataccacctccaagccgagtcacttggtggatgcgcacactgccgaagtcaactgcctctcattcaatccctacagcgaatttattctagccaccggctctgcggataagaccgtagctttatgggatctgcgtaacttaaaattaaaactccataccttcgaatctcataaagatgaaattttccaggtccactggtctccacataatgaaactattctggcttcaagtggtactgaccgccgcctgaatgtgtgggatttaagtaaaattggggaagaacaatcagcagaagatgcagaagatgggcctccagaactcctgtttattcatggaggacacactgctaagatttcagattttagctggaaccccaatgagccttgggtcatttgctcagtgtctgaggataacatcatgcagatatggcaaatggctgaaaatatttacaatgatgaagagtcagatgtcacgacatccgaactggagggacaaggatcttaaacccaaagtacgagaaatgtttctgttgaatgtaatgctacatgaatgcttgatttatcaagcgccaaaaaggcattgtatagtaggaaatgtaagtggggtggcttatggcttctttatcctctgattctagcactttcaagtgagctgttgcgtactgtatcatattgtagctattagggaagagaagaatgttgcttaagaaagaacatcaccattgattttaaatacaagtagcagggtattgcctttgattcaactgttttaagtcctcattttctcaaactaagtgcttgctgttcccaaatatgcaagaataacttttacactttttccttccaacac

SEQ ID NO: 175331 - DNA, 857 bp, Homo sapiens
  Payload ID: 14437
  Gene Symbol: RBBP7
  Gene Name: retinoblastoma binding protein 7
  ENST ID: ENST00000416035
  CDS Start-End: 1-857
gctcgagtacatattcccaatgatgatgcacagtttgatgcttcccattgtgacagtgacaagggtgaatttggtggctttggttctgtaacaggaaaaattgaatgtgaaattaaaatcaatcacgaaggagaagtaaaccgtgctcgttacatgccgcagaatcctcacatcattgctacaaaaacaccatcttctgatgtgttggtttttgactatacaaaacaccctgctaaaccagacccaagtggagaatgtaatcctgatctcagattaagaggtcaccagaaggaaggctatggtctctcctggaattcaaatttgagtggacatctcctaagtgcatctgatgaccatactgtttgtctgtgggatataaacgcaggaccaaaagaaggcaaaattgtggatgctaaagccatctttactggccactcagctgttgtagaggatgtggcctggcacctgctgcacgagtcattgtttggatctgttgctgatgatcagaaacttatgatatgggacaccaggtccaataccacctccaagccgagtcacttggtggatgcgcacactgccgaagtcaactgcctctcattcaatccctacagcgaatttattctagccaccggctctgcggataaggtatgtgacagttttctggtgtctgtatgtcaggaaatgaaatccagggattcatcagttaagctataccagactcgtgggtccactattgaaaaaaatgtcttgtacgtggtgttacatggagatgctcatagggtccactggtctccacataatgaaactattctggcttcaagtggtactgaccgccgcctgaatgtgtgggatttaag

SEQ ID NO: 175332 - DNA, 763 bp, Homo sapiens
  Payload ID: 14437
  Gene Symbol: RBBP7
  Gene Name: retinoblastoma binding protein 7
  ENST ID: ENST00000444437
  CDS Start-End: 1-528
gatgaccatactgtttgtctgtgggatataaacgcaggaccaaaagaaggcaaaattgtggatgctaaagccatctttactggccactcagctgttgtagaggatgtggcctggcacctgctgcacgagtcattgtttggatctgttgctgatgatcagaaacttatgatatgggacaccaggtccaataccacctccaagccgagtcacttggtggatgcgcacactgccgaagtcaactgcctctcattcaatccctacagcgaatttattctagccaccggctctgcggataagaccgtagctttatgggatctgcgtaacttaaaattaaaactccataccttcgaatctcataaagatgaaattttccaggtccactggtctccacataatgaaactattctggcttcaagtggtactgaccgccgcctgaatgtgtgggatttaagtaaaattggggaagaacaatcagcagaagatgcagaagatgggcctccagaactcctggtacgcattggcttatagaagatgaaatgtcatatgcagattggattgtcattgatctctttatttcgagaatgggtcagaacttcgaattctagctcttgcagatggtttcaaaatggaggccctgaaggttattgcaactgggctttgacatttatcaaaaatagtaaatggagcccagtaggtttttatgaatgtttcactgagaatggtttgaggtcctggaaaatagtatatagtaatttctcactga

SEQ ID NO: 175333 - DNA, 373 bp, Homo sapiens
  Payload ID: 14437
  Gene Symbol: RBBP7
  Gene Name: retinoblastoma binding protein 7
  ENST ID: ENST00000425696
  CDS Start-End: 1-258
ctgaatgtgtgggatttaagtaaaattggggaagaacaatcagcagaagatgcagaagatgggcctccagaactcctgtttattcatggaggacacactgctaagatttcagattttagctggaaccccaatgagccttgggtcatttgctcagtgtctgaggataacatcatgcagatatggcaaatggctgaaaatatttacaatgatgaagagtcagatgtcacgacatccgaactggagggacaaggatcttaaacccaaaattcttgggaggacagcgatcttcagccccacaagacattaagaactgacactccaccacaacctccaagaacacatcagtttcagaactcaaggcagcatgattcag

SEQ ID NO: 175334 - DNA, 212 bp, Homo sapiens
  Payload ID: 14437
  Gene Symbol: RBBP7
  Gene Name: retinoblastoma binding protein 7
  ENST ID: ENST00000493145
  CDS Start-End: 101-212
gtgacgcgcttgggaaaggcaggagcgccagcggtcgggctgctcttggctaacgagaggagtccgaggcggcggcgaggggcgaacgacccgacgcaagatggcgatgtttgaagatactgtggaggagcgtgtcatcaatgaagaatataaaatctggaagaagaatacaccgtttctatatgacctggttatgacccatgctcttcagt

SEQ ID NO: 175335 - DNA, 630 bp, Homo sapiens
  Payload ID: 14437
  Gene Symbol: RBBP7
  Gene Name: retinoblastoma binding protein 7
  ENST ID: ENST00000468092
  CDS Start-End: 428-630
gcgcctgcgctcagctgcctgggcgggctgggaggcgcgggttgaaaagtctcgttccaagtttggagagagagagaagagcgcctcagacctcggtacccgcgagcggggaggaggcaggaaagaaggacgcggcgtctggggagcacccaggcagcaagacggggcccgggctttcgacagtggggagtgtgacgcgcttgggaaaggcaggagcgccagcggtcgggctgctcttggctaacgagaggagtccgaggcggcggcgaggggcgaacgacccgacgcaagatggcgagtaaagagaccacttaatcgtgtgggctttctccaaatttcagtgtttgaagatactgtggaggagcgtgtcatcaatgaagaatataaaatctggaagaagaatacaccgtttctatatgacctggttatgacccatgctcttcagtggcccagtcttaccgttcagtggcttcctgaagtgactaaacctgaaggaaaagattatgcccttcattggctagtgctggggactcatacgtctgatgagcagaatcatctggtggttgctcgagtacatattcccaatgatgatgcacagtttgatgcttcccattgtgacagtgacaaggg

SEQ ID NO: 175336 - DNA, 3288 bp, Homo sapiens
  Payload ID: 14438
  Gene Symbol: RBBP8
  Gene Name: retinoblastoma binding protein 8
  Uniprot ID: Q99708
  ENST ID: ENST00000327155
  CDS Start-End: 349-3042
aagtggaactcccgcgtgacgtcgcgcgggctcccgggcggggcgggtccggccgcctccgagcccggccggcagcccccggccttaaagcgcgggctgtccggaggggtcggctttcccaccgaggatttggcactctggtgagggaaaagggcgaaagagaaaagcgagcagccgtcctttcacagcctcagaaagtgctcgcttcccttcgggggctttcgcgaatcccgaggcaatctcggaggcggtatttgacctgtccaaagacgacttgatacctctataatgtaacagaaaaggtcagaaaatattaagcaagtagaagtgtggagcatattaagcaagatgaacatctcgggaagcagctgtggaagccctaactctgcagatacatctagtgactttaaggacctttggacaaaactaaaagaatgtcatgatagagaagtacaaggtttacaagtaaaagtaaccaagctaaaacaggaacgaatcttagatgcacaaagactagaagaattcttcaccaaaaatcaacagctgagggaacagcagaaagtccttcatgaaaccattaaagttttagaagatcggttaagagcaggcttatgtgatcgctgtgcagtaactgaagaacatatgcggaaaaaacagcaagagtttgaaaatatccggcagcagaatcttaaacttattacagaacttatgaatgaaaggaatactctacaggaagaaaataaaaagctttctgaacaactccagcagaaaattgagaatgatcaacagcatcaagcagctgagcttgaatgtgaggaagacgttattccagattcaccgataacagccttctcattttctggcgttaaccggctacgaagaaaggagaacccccatgtccgatacatagaacaaacacatactaaattggagcactctgtgtgtgcaaatgaaatgagaaaagtttccaagtcttcaactcatccacaacataatcctaatgaaaatgaaattctagtagctgacacttatgaccaaagtcaatctccaatggccaaagcacatggaacaagcagctatacccctgataagtcatcttttaatttagctacagttgttgctgaaacacttggacttggtgttcaagaagaatctgaaactcaaggtcccatgagcccccttggtgatgagctctaccactgtctggaaggaaatcacaagaaacagccttttgaggaatctacaagaaatactgaagatagtttaagattttcagattctacttcaaagactcctcctcaagaagaattacctactcgagtgtcatctcctgtatttggagctacctctagtatcaaaagtggtttagatttgaatacaagtttgtccccttctcttttacagcctgggaaaaaaaaacatctgaaaacactcccttttagcaacacttgtatatctagattagaaaaaactagatcaaaatctgaagatagtgcccttttcacacatcacagtcttgggtctgaagtgaacaagatcattatccagtcatctaataaacagatacttataaataaaaatataagtgaatccctaggtgaacagaataggactgagtacggtaaagattctaacactgataaacatttggagcccctgaaatcattgggaggccgaacatccaaaaggaagaaaactgaggaagaaagtgaacatgaagtaagctgcccccaagcttcttttgataaagaaaatgctttcccttttccaatggataatcagttttccatgaatggagactgtgtgatggataaacctctggatctgtctgatcgattttcagctattcagcgtcaagagaaaagccaaggaagtgagacttctaaaaacaaatttaggcaagtgactctttatgaggctttgaagaccattccaaagggcttttcctcaagccgtaaggcctcagatggcaactgcacgttgcccaaagattccccaggggagccctgttcacaggaatgcatcatccttcagcccttgaataaatgctctccagacaataaaccatcattacaaataaaagaagaaaatgctgtctttaaaattcctctacgtccacgtgaaagtttggagactgagaatgttttagatgacataaagagtgctggttctcatgagccaataaaaatacaaaccaggtcagaccatggaggatgtgaacttgcatcagttcttcagttaaatccatgtagaactggtaaaataaagtctctacaaaacaaccaagatgtatcctttgaaaatatccagtggagtatagatccgggagcagacctttctcagtataaaatggatgttactgtaatagatacaaaggatggcagtcagtcaaaattaggaggagagacagtggacatggactgtacattggttagtgaaaccgttctcttaaaaatgaagaagcaagagcagaagggagaaaaaagttcaaatgaagaaagaaaaatgaatgatagcttggaagatatgtttgatcggacaacacatgaagagtatgaatcctgtttggcagacagtttctcccaagcagcagatgaagaggaggaattgtctactgccacaaagaaactacacactcatggtgataaacaagacaaagtcaagcagaaagcgtttgtggagccgtattttaaaggtgatgaaagagagactagcttgcaaaattttcctcatattgaggtggttcggaaaaaagaggagagaagaaaactgcttgggcacacgtgtaaggaatgtgaaatttattatgcagatatgccagcagaagaaagagaaaagaaattggcttcctgctcaagacaccgattccgctacattccacccaacacaccagagaatttttgggaagttggttttccttccactcagacttgtatggaaagaggttatattaaggaagatcttgatccttgtcctcgtccaaaaagacgtcagccttacaacgcaatattttctccaaaaggcaaggagcagaagacatagacgttgaaacagaaacagaaggatgaaggacagttttttccttcttagttatttatagttaaagttggtactaaacattgatttttttgatcttctgtaaatggatttataaatcagttttctattgaaaatgtttgtgatattttgcttttgcacctttaaaacaataaggcgctttcattttgcactctaacttaagagtttttactttatgtagtgatacctaatacaattttgaaaatacaa

SEQ ID NO: 175337 - DNA, 2962 bp, Homo sapiens
  Payload ID: 14438
  Gene Symbol: RBBP8
  Gene Name: retinoblastoma binding protein 8
  ENST ID: ENST00000360790
  CDS Start-End: 124-2832
ttgagaacatgcgggctacagagaggtatttgacctgtccaaagacgacttgatacctctataatgtaacagaaaaggtcagaaaatattaagcaagtagaagtgtggagcatattaagcaagatgaacatctcgggaagcagctgtggaagccctaactctgcagatacatctagtgactttaaggacctttggacaaaactaaaagaatgtcatgatagagaagtacaaggtttacaagtaaaagtaaccaagctaaaacaggaacgaatcttagatgcacaaagactagaagaattcttcaccaaaaatcaacagctgagggaacagcagaaagtccttcatgaaaccattaaagttttagaagatcggttaagagcaggcttatgtgatcgctgtgcagtaactgaagaacatatgcggaaaaaacagcaagagtttgaaaatatccggcagcagaatcttaaacttattacagaacttatgaatgaaaggaatactctacaggaagaaaataaaaagctttctgaacaactccagcagaaaattgagaatgatcaacagcatcaagcagctgagcttgaatgtgaggaagacgttattccagattcaccgataacagccttctcattttctggcgttaaccggctacgaagaaaggagaacccccatgtccgatacatagaacaaacacatactaaattggagcactctgtgtgtgcaaatgaaatgagaaaagtttccaagtcttcaactcatccacaacataatcctaatgaaaatgaaattctagtagctgacacttatgaccaaagtcaatctccaatggccaaagcacatggaacaagcagctatacccctgataagtcatcttttaatttagctacagttgttgctgaaacacttggacttggtgttcaagaagaatctgaaactcaaggtcccatgagcccccttggtgatgagctctaccactgtctggaaggaaatcacaagaaacagccttttgaggaatctacaagaaatactgaagatagtttaagattttcagattctacttcaaagactcctcctcaagaagaattacctactcgagtgtcatctcctgtatttggagctacctctagtatcaaaagtggtttagatttgaatacaagtttgtccccttctcttttacagcctgggaaaaaaaaacatctgaaaacactcccttttagcaacacttgtatatctagattagaaaaaactagatcaaaatctgaagatagtgcccttttcacacatcacagtcttgggtctgaagtgaacaagatcattatccagtcatctaataaacagatacttataaataaaaatataagtgaatccctaggtgaacagaataggactgagtacggtaaagattctaacactgataaacatttggagcccctgaaatcattgggaggccgaacatccaaaaggaagaaaactgaggaagaaagtgaacatgaagtaagctgcccccaagcttcttttgataaagaaaatgctttcccttttccaatggataatcagttttccatgaatggagactgtgtgatggataaacctctggatctgtctgatcgattttcagctattcagcgtcaagagaaaagccaaggaagtgagacttctaaaaacaaatttaggcaagtgactctttatgaggctttgaagaccattccaaagggcttttcctcaagccgtaaggcctcagatggcaactgcacgttgcccaaagattccccaggggagccctgttcacaggaatgcatcatccttcagcccttgaataaatgctctccagacaataaaccatcattacaaataaaagaagaaaatgctgtctttaaaattcctctacgtccacgtgaaagtttggagactgagaatgttttagatgacataaagagtgctggttctcatgagccaataaaaatacaaaccaggtcagaccatggaggatgtgaacttgcatcagttcttcagttaaatccatgtagaactggtaaaataaagtctctacaaaacaaccaagatgtatcctttgaaaatatccagtggagtatagatccgggagcagacctttctcagtataaaatggatgttactgtaatagatacaaaggatggcagtcagtcaaaattaggaggagagacagtggacatggactgtacattggttagtgaaaccgttctcttaaaaatgaagaagcaagagcagaagggagaaaaaagttcaatgctcttttacatagatgaagaaagaaaaatgaatgatagcttggaagatatgtttgatcggacaacacatgaagagtatgaatcctgtttggcagacagtttctcccaagcagcagatgaagaggaggaattgtctactgccacaaagaaactacacactcatggtgataaacaagacaaagtcaagcagaaagcgtttgtggagccgtattttaaaggtgatgaaagagagactagcttgcaaaattttcctcatattgaggtggttcggaaaaaagaggagagaagaaaactgcttgggcacacgtgtaaggaatgtgaaatttattatgcagatatgccagcagaagaaagagaaaagaaattggcttcctgctcaagacaccgattccgctacattccacccaacacaccagagaatttttgggaagttggttttccttccactcagacttgtatggaaagaggttatattaaggaagatcttgatccttgtcctcgtccaaaaagacgtcagccttacaacgcaatattttctccaaaaggcaaggagcagaagacatagacgttgaaacagaaacagaaggatgaaggacagttttttccttcttagttatttatagttaaagttggtactaaacattgatttttttgatcttctgtaaatggatttataaatcagttttctattgaaa

SEQ ID NO: 175338 - DNA, 2229 bp, Homo sapiens
  Payload ID: 14438
  Gene Symbol: RBBP8
  Gene Name: retinoblastoma binding protein 8
  ENST ID: ENST00000399721
  CDS Start-End: 488-2229
cgcacgcggaaccggcgcgggcacctggggagaaatggatggagaagggacctggctggaaagcctttgccccgctgctctgctccgcccataagaggacccctgaaatgtcccgtgcagtttgttcaagtcccctgtgtgatgaaatgtgcctctcgccttacccgtgtgagaatacctgtggtgtggcagcgagtattttggtgagcacctgcagtgtagtggtttatactaaggaatacacacaaattacaggcctttgagcccagaatgcaacttgggaggtaagacgtgacgttctgagagattgaaaaatgtacattgtcgtcgtgcctcgaataacggttcattgcagagagagatgctaacaaaaagtgccgggcatgcgggtatttgacctgtccaaagacgacttgatacctctataatgtaacagaaaaggtcagaaaatattaagcaagtagaagtgtggagcatattaagcaagatgaacatctcgggaagcagctgtggaagccctaactctgcagatacatctagtgactttaaggacctttggacaaaactaaaagaatgtcatgatagagaagtacaaggtttacaagtaaaagtaaccaagctaaaacaggaacgaatcttagatgcacaaagactagaagaattcttcaccaaaaatcaacagctgagggaacagcagaaagtccttcatgaaaccattaaagttttagaagatcggttaagagcaggcttatgtgatcgctgtgcagtaactgaagaacatatgcggaaaaaacagcaagagtttgaaaatatccggcagcagaatcttaaacttattacagaacttatgaatgaaaggaatactctacaggaagaaaataaaaagctttctgaacaactccagcagaaaattgagaatgatcaacagcatcaagcagctgagcttgaatgtgaggaagacgttattccagattcaccgataacagccttctcattttctggcgttaaccggctacgaagaaaggagaacccccatgtccgatacatagaacaaacacatactaaattggagcactctgtgtgtgcaaatgaaatgagaaaagtttccaagtcttcaactcatccacaacataatcctaatgaaaatgaaattctagtagctgacacttatgaccaaagtcaatctccaatggccaaagcacatggaacaagcagctatacccctgataagtcatcttttaatttagctacagttgttgctgaaacacttggacttggtgttcaagaagaatctgaaactcaaggtcccatgagcccccttggtgatgagctctaccactgtctggaaggaaatcacaagaaacagccttttgaggaatctacaagaaatactgaagatagtttaagattttcagattctacttcaaagactcctcctcaagaagaattacctactcgagtgtcatctcctgtatttggagctacctctagtatcaaaagtggtttagatttgaatacaagtttgtccccttctcttttacagcctgggaaaaaaaaacatctgaaaacactcccttttagcaacacttgtatatctagattagaaaaaactagatcaaaatctgaagatagtgcccttttcacacatcacagtcttgggtctgaagtgaacaagatcattatccagtcatctaataaacagatacttataaataaaaatataagtgaatccctaggtgaacagaataggactgagtacggtaaagattctaacactgataaacatttggagcccctgaaatcattgggaggccgaacatccaaaaggaagaaaactgaggaagaaagtgaacatgaagtaagctgcccccaagcttcttttgataaagaaaatgctttcccttttccaatggataatcagttttccatgaatggagactgtgtgatggataaacctctggatctgtctgatcgattttcagctattcagcgtcaagagaaaagccaaggaagtgagacttctaaaaacaaatttaggcaagtgactctttatgaggctttgaagaccattccaaagggcttttcctcaagccgtaaggcctcagatggcaactgcacgttgcccaaagattccccaggggagccctgttcacaggaatgcatcatccttcagcccttgaataaatgctctccagacaataaaccatcattacaaataaaagaagaaaa

SEQ ID NO: 175339 - DNA, 3293 bp, Homo sapiens
  Payload ID: 14438
  Gene Symbol: RBBP8
  Gene Name: retinoblastoma binding protein 8
  Uniprot ID: Q99708
  ENST ID: ENST00000399722
  CDS Start-End: 352-3045
tgcgccgactgcggctcgcgcgcgcgcttcggaggttttttggccagacccgcacgcggaaccggcgcgggcacctggggagaaatggatggagaagggacctggctggaaagcctttgccccgctgctctgctccgcccataagaggacccctgaaatgtcccgtgcagtttgttcaagtcccctgtgtgatgaaatgtgcctctcgccttacccgtgtgagaatacctgtggtgtggcagcgagtattttggtatttgacctgtccaaagacgacttgatacctctataatgtaacagaaaaggtcagaaaatattaagcaagtagaagtgtggagcatattaagcaagatgaacatctcgggaagcagctgtggaagccctaactctgcagatacatctagtgactttaaggacctttggacaaaactaaaagaatgtcatgatagagaagtacaaggtttacaagtaaaagtaaccaagctaaaacaggaacgaatcttagatgcacaaagactagaagaattcttcaccaaaaatcaacagctgagggaacagcagaaagtccttcatgaaaccattaaagttttagaagatcggttaagagcaggcttatgtgatcgctgtgcagtaactgaagaacatatgcggaaaaaacagcaagagtttgaaaatatccggcagcagaatcttaaacttattacagaacttatgaatgaaaggaatactctacaggaagaaaataaaaagctttctgaacaactccagcagaaaattgagaatgatcaacagcatcaagcagctgagcttgaatgtgaggaagacgttattccagattcaccgataacagccttctcattttctggcgttaaccggctacgaagaaaggagaacccccatgtccgatacatagaacaaacacatactaaattggagcactctgtgtgtgcaaatgaaatgagaaaagtttccaagtcttcaactcatccacaacataatcctaatgaaaatgaaattctagtagctgacacttatgaccaaagtcaatctccaatggccaaagcacatggaacaagcagctatacccctgataagtcatcttttaatttagctacagttgttgctgaaacacttggacttggtgttcaagaagaatctgaaactcaaggtcccatgagcccccttggtgatgagctctaccactgtctggaaggaaatcacaagaaacagccttttgaggaatctacaagaaatactgaagatagtttaagattttcagattctacttcaaagactcctcctcaagaagaattacctactcgagtgtcatctcctgtatttggagctacctctagtatcaaaagtggtttagatttgaatacaagtttgtccccttctcttttacagcctgggaaaaaaaaacatctgaaaacactcccttttagcaacacttgtatatctagattagaaaaaactagatcaaaatctgaagatagtgcccttttcacacatcacagtcttgggtctgaagtgaacaagatcattatccagtcatctaataaacagatacttataaataaaaatataagtgaatccctaggtgaacagaataggactgagtacggtaaagattctaacactgataaacatttggagcccctgaaatcattgggaggccgaacatccaaaaggaagaaaactgaggaagaaagtgaacatgaagtaagctgcccccaagcttcttttgataaagaaaatgctttcccttttccaatggataatcagttttccatgaatggagactgtgtgatggataaacctctggatctgtctgatcgattttcagctattcagcgtcaagagaaaagccaaggaagtgagacttctaaaaacaaatttaggcaagtgactctttatgaggctttgaagaccattccaaagggcttttcctcaagccgtaaggcctcagatggcaactgcacgttgcccaaagattccccaggggagccctgttcacaggaatgcatcatccttcagcccttgaataaatgctctccagacaataaaccatcattacaaataaaagaagaaaatgctgtctttaaaattcctctacgtccacgtgaaagtttggagactgagaatgttttagatgacataaagagtgctggttctcatgagccaataaaaatacaaaccaggtcagaccatggaggatgtgaacttgcatcagttcttcagttaaatccatgtagaactggtaaaataaagtctctacaaaacaaccaagatgtatcctttgaaaatatccagtggagtatagatccgggagcagacctttctcagtataaaatggatgttactgtaatagatacaaaggatggcagtcagtcaaaattaggaggagagacagtggacatggactgtacattggttagtgaaaccgttctcttaaaaatgaagaagcaagagcagaagggagaaaaaagttcaaatgaagaaagaaaaatgaatgatagcttggaagatatgtttgatcggacaacacatgaagagtatgaatcctgtttggcagacagtttctcccaagcagcagatgaagaggaggaattgtctactgccacaaagaaactacacactcatggtgataaacaagacaaagtcaagcagaaagcgtttgtggagccgtattttaaaggtgatgaaagagagactagcttgcaaaattttcctcatattgaggtggttcggaaaaaagaggagagaagaaaactgcttgggcacacgtgtaaggaatgtgaaatttattatgcagatatgccagcagaagaaagagaaaagaaattggcttcctgctcaagacaccgattccgctacattccacccaacacaccagagaatttttgggaagttggttttccttccactcagacttgtatggaaagaggttatattaaggaagatcttgatccttgtcctcgtccaaaaagacgtcagccttacaacgcaatattttctccaaaaggcaaggagcagaagacatagacgttgaaacagaaacagaaggatgaaggacagttttttccttcttagttatttatagttaaagttggtactaaacattgatttttttgatcttctgtaaatggatttataaatcagttttctattgaaaatgtttgtgatattttgcttttgcacctttaaaacaataaggcgctttcattttgcactctaacttaagagtttttactttatgtagtgatacctaatacaattttgaaaatacaata

SEQ ID NO: 175340 - DNA, 3260 bp, Homo sapiens
  Payload ID: 14438
  Gene Symbol: RBBP8
  Gene Name: retinoblastoma binding protein 8
  Uniprot ID: Q99708
  ENST ID: ENST00000399725
  CDS Start-End: 418-3021
tcgcgcgcgcgcttcggaggttttttggccagacccgcacgcggaaccggcgcgggcacctggggagaaatggatggagaagggacctggctggaaagcctttgccccgctgctctgctccgcccataagaggacccctgaaatgtcccgtgcagtttgttcaagtcccctgtgtgatgaaatgtgcctctcgccttacccgtgtgagaatacctgtggtgtggcagcgagtattttggtgagcacctgcagtgtagtggtttatactaaggaatacacacaaattacaggcctttgagcccagaatgcaacttgggaggtatttgacctgtccaaagacgacttgatacctctataatgtaacagaaaaggtcagaaaatattaagcaagtagaagtgtggagcatattaagcaagatgaacatctcgggaagcagctgtggaagccctaactctgcagatacatctagtgactttaaggacctttggacaaaactaaaagaatgtcatgatagagaagtacaaggtttacaagtaaaagtaaccaagctaaaacaggaacgaatcttagatgcacaaagactagaagaattcttcaccaaaaatcaacagctgagggaacagcagaaagtccttcatgaaaccattaaagttttagaagatcggttaagagcaggcttatgtgatcgctgtgcagtaactgaagaacatatgcggaaaaaacagcaagagtttgaaaatatccggcagcagaatcttaaacttattacagaacttatgaatgaaaggaatactctacaggaagaaaataaaaagctttctgaacaactccagcagaaaattgagaatgatcaacagcatcaagcagctgagcttgaatgtgaggaagacgttattccagattcaccgataacagccttctcattttctggcgttaaccggctacgaagaaaggagaacccccatgtccgatacatagaacaaacacatactaaattggagcactctgtgtgtgcaaatgaaatgagaaaagtttccaagtcttcaactcatccacaacataatcctaatgaaaatgaaattctagtagctgacacttatgaccaaagtcaatctccaatggccaaagcacatggaacaagcagctatacccctgataagtcatcttttaatttagctacagttgttgctgaaacacttggacttggtgttcaagaagaatctgaaactcaaggtcccatgagcccccttggtgatgagctctaccactgtctggaaggaaatcacaagaaacagccttttgaggaatctacaagaaatactgaagatagtttaagattttcagattctacttcaaagactcctcctcaagaagaattacctactcgagtgtcatctcctgtatttggagctacctctagtatcaaaagtggtttagatttgaatacaagtttgtccccttctcttttacagcctgggaaaaaaaaacatctgaaaacactcccttttagcaacacttgtatatctagattagaaaaaactagatcaaaatctgaagatagtgcccttttcacacatcacagtcttgggtctgaagtgaacaagatcattatccagtcatctaataaacagatacttataaataaaaatataagtgaatccctaggtgaacagaataggactgagtacggtaaagattctaacactgataaacatttggagcccctgaaatcattgggaggccgaacatccaaaaggaagaaaactgaggaagaaagtgaacatgaagtaagctgcccccaagcttcttttgataaagaaaatgctttcccttttccaatggataatcagttttccatgaatggagactgtgtgatggataaacctctggatctgtctgatcgattttcagctattcagcgtcaagagaaaagccaaggaagtgagacttctaaaaacaaatttaggcaagtgactctttatgaggctttgaagaccattccaaagggcttttcctcaagccgtaaggcctcagatggcaactgcacgttgcccaaagattccccaggggagccctgttcacaggaatgcatcatccttcagcccttgaataaatgctctccagacaataaaccatcattacaaataaaagaagaaaatgctgtctttaaaattcctctacgtccacgtgaaagtttggagactgagaatgttttagatgacataaagagtgctggttctcatgagccaataaaaatacaaaccaggtcagaccatggaggatgtgaacttgcatcagttcttcagttaaatccatgtagaactggtaaaataaagtctctacaaaacaaccaagatgtatcctttgaaaatatccagtggagtatagatccgggagcagacctttctcagtataaaatggatgttactgtaatagatacaaaggatggcagtcagtcaaaattaggaggagagacagtggacatggactgtacattggttagtgaaaccgttctcttaaaaatgaagaagcaagagcagaagggagaaaaaagttcaaatgaagaaagaaaaatgaatgatagcttggaagatatgtttgatcggacaacacatgaagagtatgaatcctgtttggcagacagtttctcccaagcagcagatgaagaggaggaattgtctactgccacaaagaaactacacactcatggtgataaacaagacaaagtcaagcagaaagcgtttgtggagccgtattttaaaggtgatgaaagtattatgcagatatgccagcagaagaaagagaaaagaaattggcttcctgctcaagacaccgattccgctacattccacccaacacaccagagaatttttgggaagttggttttccttccactcagacttgtatggaaagaggttatattaaggaagatcttgatccttgtcctcgtccaaaaagacgtcagccttacaacgcaatattttctccaaaaggcaaggagcagaagacatagacgttgaaacagaaacagaaggatgaaggacagttttttccttcttagttatttatagttaaagttggtactaaacattgatttttttgatcttctgtaaatggatttataaatcagttttctattgaaaatgtttgtgatattttgcttttgcacctttaaaacaataaggcgctttcattttgcactctaacttaagagtttttactttatgtagtgatacctaatacaattttgaaaatacaa

SEQ ID NO: 175341 - DNA, 543 bp, Homo sapiens
  Payload ID: 14438
  Gene Symbol: RBBP8
  Gene Name: retinoblastoma binding protein 8
  ENST ID: ENST00000579124
  CDS Start-End: 351-543
gcactcagtatatagcttagatgcagcagaactcttccacatagcagtagtgtctagcaaaccagtgtggtccagagaggtggtgttcactgatttaatgtttaagttgatagattcagggaaagtgagcagtgaaacaatttctgcttttcaccaagagcagaggttttctaaataagtcgaaggggaaaacccttggatgcttcatagtcctacttctaggcagttctgcatgaatttctggtaatccaggtatttgacctgtccaaagacgacttgatacctctataatgtaacagaaaaggtcagaaaatattaagcaagtagaagtgtggagcatattaagcaagatgaacatctcgggaagcagctgtggaagccctaactctgcagatacatctagtgactttaaggacctttggacaaaactaaaagaatgtcatgatagagaagtacaaggtttacaagtaaaagtaaccaagctaaaacaggaacgaatcttagatgcacaaagactagaagaattcttcaccaaaaatcaac

SEQ ID NO: 175342 - DNA, 480 bp, Homo sapiens
  Payload ID: 14438
  Gene Symbol: RBBP8
  Gene Name: retinoblastoma binding protein 8
  ENST ID: ENST00000577445
  CDS Start-End: 1-480
tgaagaacatatgcggaaaaaacagcaagagtttgaaaatatccggcagcagaatcttaaacttattacagaacttatgaatgaaaggaatactctacaggaagaaaataaaaagctttctgaacaactccagcagaaaattgagaatgatcaacagcatcaagcagctgagcttgaatgtgaggaagacgttattccagattcaccgataacagccttctcattttctggcgttaaccggctacgaagaaaggagaacccccatgtccgatacatagaacaaacacatactaaattggagcactctgtgtgtgcaaatgaaatgagaaaagtttccaagtcttcaactcatccacaacataatcctaatgaaaatgaaattctagtagctgacacttatgaccaaagtcaatctccaatggccactacagttgttgctgaaacacttggacttggtgttcaagaagaatctgaaactca

SEQ ID NO: 175343 - DNA, 574 bp, Homo sapiens
  Payload ID: 14438
  Gene Symbol: RBBP8
  Gene Name: retinoblastoma binding protein 8
  ENST ID: ENST00000581819
  CDS Start-End: 322-574
agatgcagcagaactcttccacatagcagtagtgtctagcaaaccagtgtggtccagagaggtggtgttcactgatttaatgtttaagttgatagattcagggaaagtgagcagtgaaacaatttctgcttttcaccaagagcagaggttttctaaataagtcgaagggaggatattgccgtagaagaggttgatggtagcttgaaccagggtggacacaaaggtatttgacctgtccaaagacgacttgatacctctataatgtaacagaaaaggtcagaaaatattaagcaagtagaagtgtggagcatattaagcaagatgaacatctcgggaagcagctgtggaagccctaactctgcagatacatctagtgactttaaggacctttggacaaaactaaaagaatgtcatgatagagaagtacaaggtttacaagtaaaagtaaccaagctaaaacaggaacgaatcttagatgcacaaagactagaagaattcttcaccaaaaatcaacagctgagggaacagcagaaagtccttcatgaaaccattaaagttttagaagatcggttaa

SEQ ID NO: 175344 - DNA, 617 bp, Homo sapiens
  Payload ID: 14438
  Gene Symbol: RBBP8
  Gene Name: retinoblastoma binding protein 8
  ENST ID: ENST00000581687
  CDS Start-End: 142-369
agctttgttaatttaattcatttttcccccagagagactagcttgcaaaattttcctcatattgaggtggttcggaaaaaagaggagagaagaaaactgcttgggcacacgtgtaaggaatgtgaaatttattatgcagatatgccagcagaagaaagagaaaagaaattggcttcctgctcaagacaccgattccgctacattccacccaacacaccagagaatttttgggaagttggttttccttccactcagacttgtatggaaagaggttatattaaggaagatcttgatccttgtcctcgtccaaaaagacgtcagccttacaacgcaatattttctccaaaaggcaaggagcagaagacatagacgttgaaacagaaacagaaggatgaaggacagttttttccttcttagttatttatagttaaagttggtactaaacattgatttttttgatcttctgtaaatggatttataaatcagttttctattgaaaatgtttgtgatattttgcttttgcacctttaaaacaataaggcgctttcattttgcactctaacttaagagtttttactttatgtagtgatacctaatacaattttgaaaatacaata

SEQ ID NO: 175345 - DNA, 1019 bp, Homo sapiens
  Payload ID: 14438
  Gene Symbol: RBBP8
  Gene Name: retinoblastoma binding protein 8
  ENST ID: ENST00000582354
  CDS Start-End: 404-1019
actcagtatatagcttagatgcagcagaactcttccacatagcagtagtgtctagcaaaccagtgtggtccagagaggtggtgttcactgatttaatgtttaagttgatagattcagggaaagtgagcagtgaaacaatttctgcttttcaccaagagcagaggttttctaaataagtcgaaggggaaaacccttggatgcttcatagtcctacttctaggcagttctgcatgaatttctggtaatccaggaggatattgccgtagaagaggttgatggtagcttgaaccagggtggacacaaaggtatttgacctgtccaaagacgacttgatacctctataatgtaacagaaaaggtcagaaaatattaagcaagtagaagtgtggagcatattaagcaagatgaacatctcgggaagcagctgtggaagccctaactctgcagatacatctagtgactttaaggacctttggacaaaactaaaagaatgtcatgatagagaagtacaaggtttacaagtaaaagtaaccaagctaaaacaggaacgaatcttagatgcacaaagactagaagaattcttcaccaaaaatcaacagctgagggaacagcagaaagtccttcatgaaaccattaaagttttagaagatcggttaagagcaggcttatgtgatcgctgtgcagtaactgaagaacatatgcggaaaaaacagcaagagtttgaaaatatccggcagcagaatcttaaacttattacagaacttatgaatgaaaggaatactctacaggaagaaaataaaaagctttctgaacaactccagcagaaaattgagaatgatcaacagcatcaagcagctgagcttgaatgtgaggaagacgttattccagattcaccgataacagccttctcattttctggcgttaaccggctacgaagaaaggagaacccccatgtccgatacatagaacaaacacatactaaattggagcactctgtgtgtgcaaatgaaatgagaaaag

SEQ ID NO: 175346 - DNA, 578 bp, Homo sapiens
  Payload ID: 14438
  Gene Symbol: RBBP8
  Gene Name: retinoblastoma binding protein 8
  ENST ID: ENST00000577588
  CDS Start-End: 490-578
actcagtatatagcttagatgcagcagaactcttccacatagcagtagtgtctagcaaaccagtgtggtccagagaggtggtgttcactgatttaatgtttaagttgatagattcagggaaagtgagcagtgaaacaatttctgcttttcaccaagagcagaggttttctaaataagtcgaaggggaaaacccttggatgcttcatagtcctacttctaggcagttctgcatgaatttctggtaatccagaactgacaggaaaattttgttatgaagacagaaattgcaggacttaaaaacccatcttagaggtgatagaagctgttattgaaggggaggatattgccgtagaagaggttgatggtagcttgaaccagggtggacacaaaggtatttgacctgtccaaagacgacttgatacctctataatgtaacagaaaaggtcagaaaatattaagcaagtagaagtgtggagcatattaagcaagatgaacatctcgggaagcagctgtggaagccctaactctgcagatacatctagtgactttaaggacctttggacaaaactaaaagaatg

SEQ ID NO: 175347 - DNA, 564 bp, Homo sapiens
  Payload ID: 14438
  Gene Symbol: RBBP8
  Gene Name: retinoblastoma binding protein 8
  ENST ID: ENST00000583700
  CDS Start-End: 533-564
agtgcaatggcgagatctcggctcactgcaacctccgccccccaagttcaaacggttccccttttgaagagagcaattcagagggccattaactatataagcacaagaaaagtccaaagatcctggagctacctagggaacagagctccaaagaaagcctcctgcgtggaagcttccctgaggaagagctgataacaccttaaacctcctctggattcaagttaaagaattaacacagaagacttctgcagccaaatgtgtggagattttcccctaccaacaagcaagtaatgaattctgcagcagataccagggaaaacccttggatgcttcatagtcctacttctaggcagttctgcatgaatttctggtaatccaggaggatattgccgtagaagaggttgatggtagcttgaaccagggtggacacaaaggtatttgacctgtccaaagacgacttgatacctctataatgtaacagaaaaggtcagaaaatattaagcaagtagaagtgtggagcatattaagcaagatgaacatctcgggaagcagctgtggaagccc

SEQ ID NO: 175348 - DNA, 1195 bp, Homo sapiens
  Payload ID: 14438
  Gene Symbol: RBBP8
  Gene Name: retinoblastoma binding protein 8
  ENST ID: ENST00000583057
  CDS Start-End: 1-975
ccctgttcacaggaatgcatcatccttcagcccttgaataaatgctctccagacaataaaccatcattacaaataaaagaagaaaatgctgtctttaaaattcctctacgtccacgtgaaagtttggagactgagaatgttttagatgacataaagagtgctggttctcatgagccaataaaaatacaaaccaggtcagaccatggaggatgtgaacttgcatcagttcttcagttaaatccatgtagaactggtaaaataaagtctctacaaaacaaccaagatgtatcctttgaaaatatccagtggagtatagatccgggagcagacctttctcagtataaaatggatgttactgtaatagatacaaaggatggcagtcagtcaaaattaggaggagagacagtggacatggactgtacattggttagtgaaaccgttctcttaaaaatgaagaagcaagagcagaagggagaaaaaagttcaaatgaagaaagaaaaatgaatgatagcttggaagatatgtttgatcggacaacacatgaagagtatgaatcctgtttggcagacagtttctcccaagcagcagatgaagaggaggaattgtctactgccacaaagaaactacacaagagactagcttgcaaaattttcctcatattgaggtggttcggaaaaaagaggagagaagaaaactgcttgggcacacgtgtaaggaatgtgaaatttattatgcagatatgccagcagaagaaagagaaaagaaattggcttcctgctcaagacaccgattccgctacattccacccaacacaccagagaatttttgggaagttggttttccttccactcagacttgtatggaaagaggttatattaaggaagatcttgatccttgtcctcgtccaaaaagacgtcagccttacaacgcaatattttctccaaaaggcaaggagcagaagacatagacgttgaaacagaaacagaaggatgaaggacagttttttccttcttagttatttatagttaaagttggtactaaacattgatttttttgatcttctgtaaatggatttataaatcagttttctattgaaaatgtttgtgatattttgcttttgcacctttaaaacaataaggcgctttcattttgcactctaacttaagagtttttactttatgtagtgatacctaa

SEQ ID NO: 175349 - DNA, 606 bp, Homo sapiens
  Payload ID: 14438
  Gene Symbol: RBBP8
  Gene Name: retinoblastoma binding protein 8
  ENST ID: ENST00000585177
  CDS Start-End: 1-136
aaataaaaagctttctgaacaactccagcagaaaattgagaccatcttaagcaagtctcttctcctgtgctacttgacgactcttttgatacatgaagacagctatcatggccctcctgagtcttgttttctctagagaatgatcaacagcatcaagcagctgagcttgaatgtgaggaagacgttattccagattcaccgataacagccttctcattttctggcgttaaccggctacgaagaaaggagaacccccatgtccgatacatagaacaaacacatactaaattggagcactctgtgtgtgcaaatgaaatgagaaaagtttccaagtcttcaactcatccacaacataatcctaatgaaaatgaaattctagtagctgacacttatgaccaaagtcaatctccaatggccaaagcacatggaacaagcagctatacccctgataagtcatcttttaatttagctacagttgttgctgaaacacttggacttggtgttcaagaagaatctgaaactcaaggtcccatgagcccccttggtgatgagctctaccactgtctggaaggaaatcacaagaaacagccttttgaggaatctaca

SEQ ID NO: 175350 - DNA, 3861 bp, Homo sapiens
  Payload ID: 14439
  Gene Symbol: RBBP9
  Gene Name: retinoblastoma binding protein 9
  Uniprot ID: O75884
  ENST ID: ENST00000337227
  CDS Start-End: 77-637
cgcaggctccctgcgggagcaggctgggctcagctccgctggacccgcgctggggaactctggcctcgctgcactcatggcttctcctagcaaggcagtgattgttcccgggaacggaggcggggatgtgaccacccacggctggtatggctgggtgaaaaaggagctggagaagatacctggtttccagtgtttggctaaaaacatgcccgacccaattacagcacgagagagcatctggctgcccttcatggagacagagctgcactgtgatgagaagactatcatcattggccacagttctggggccatcgcggccatgaggtatgcagaaacacatcgagtatatgctattgtattagtgtctgcgtacacatcagacttgggggatgaaaatgagcgtgcaagtggatacttcacccgcccctggcagtgggagaagatcaaggccaactgcccttacattgtgcagtttggctctactgacgacccgttccttccctggaaggaacaacaagaagtggccgataggttggaaaccaaattgcacaaattcactgactgtggccactttcagaacacagagtttcatgaactgattactgttgtaaagtctttgctgaaagtaccagcatagactgtatgatttctgctattttgcatcccaatataggagtagaataatatctactatcagctgattactagacacatagaacatccagttaagttccgtaagtgcctgaaaaacaaacacaagtttcaacattcaatctaagttacaaatagcacttccattttccatagactctaaaactccccaaattgctatgaactaccacagtattttcctcatttgataagaaacataaggacagcttaactacccttctctatccgaagtgagtcagaaacagaacccaggtttcttgattcccactcctgagtaaaattaaataggttttatgtatgttgcaggtattgcacacttttcctctttgaaatcaaacttttctatttcactggggaaagaaaacatgactgaaagtccagagtgttagcttagagctcaaaatactagctgctgtttcaagctggccccagacattaaactcagactagggccttcacctctgacacttgcccctaagtccttcagacatgttgagagagactgagacaggagtcttccggagtcaggcaggaaggagaagcacagcaatatacattcataatatacgtacaactgactagatttgtttgagacaagagtggtgggatcagagccatgtggagagctcatggcctgtctaaattgttgccatgtggaaatggggcagagtgttgccaattttctgattttttgtgtggaaaaaaatctccaaattgtagtttttaaatttggggaatgcaaatatatatatatatacacacacacacacacacatacacatacaatccatatacatatggagtatgtaagttggcaataacagtatacatcaaaaaatttacaaacactgcaagacaaataaaatccaagccatccatttgtgaccacagtcataagcattcacttagccaggggcttttagataattgtctgtgaagtctgagaaaagactaagataaccaagatgaacataatgtcaaaggacgaaatcatggggacaatttggattttgttccaaaagacaagtgtttttaaaaagaacctttccatacttcgtgttctgttctatagagttaaaccttttaacttccatggccctttagatctctttcaagcacattccattttcttctgatcatacttcctcagaaaacctttttttggctgggtgtggtggctcatgcctgtaatcccagcactgtgggaggctgaggtggttgtattgcttgaggccaggtgtttgaggccagccagggcaacacagcaagaccccatctctacaaaatattaaaacattagctaggcatggtggtgcacacctgtagtcctagcttcttgggaggctgaggcaggattgcttgagcccaggagtttgagccttcagtgagctatgatcgcgccactgtactccatcctgggtgatggagcgaagaacctgtctcttaaaaaaaaaaatttttttttaattaaaaaaacccaccctttttcatttcccaacattttttggctattatgatcgctatgtgttccttcaaataatttccagtgaatccacacttgatgttgcaaagcctaagtttgctgcagaaatacaatttcctacacttcatacctaaaggagattcagagctatcgctcaaaaccaaaagtcttggtttttaaatgtgcttagacaaaaaaaatcaggaaaggtaccctaatcgttcaacagcaatcatctttggggaatgggcattttggtaggtaaagtgtggtggacgtccttattattatttttgagacagtgtcttgctctgtctcccaggctggaggtcagtggcacaaatctcagctcactctaacctgcacctcccgggttcaagtgattctcatctcagcctcccaagtagtgtgaactaaaggcatgtgccaccacgcctggctaatttttgtatttttagtagagacagggtttcaccatgttggccaggctggtctcgaactcctggcctcaagtgatccacccacctcagccgcccaaagtgttgggattacaggcatgagccaccatgcccggccccttattttactttatcctcctgattatttgaatttgttacactaagcatgtattttataatcaaaaataattaagatttaaaacaatgtatttgactactaaaaagcaaattatataaatcagttgaataataatgttgttaaagaggctgtttagcactaatttgaccaaatctatagtcaaagtttgattctacttgaattttttggaaatttgctgttgtattacttattctttgccttgttctctgtgaagtcctttcctaaaaaagaaacttatacaatttagttcacaaaactttgttgacctctttctctgtagaaatgaaaactaaatatatataattgagaaataattctgatactcttcattcctataaaagtaattaagatagacctataggattgttgaactttgctgccaaatatagtaaccagtaaccacagctagctgtaaaattgaaaattcagttcagtcaaactagccatatttcaagtgctcaacagccactggtggctattggttaccttactgaccagccaatataggctatttccgtcattatagaaagctctattggacaacattggtctaggacatatattttgtattttcccctcacccaccatccaataatgagtaatagcacaaagtaaaagtgacttaatttgaaattacttctgtttggctagtttgcttagctgatcaccaccaacatcataggtctataaatcacccaactaagatcaggggtgtttcatgggaaaatctacacaaactattcattaaaaaccatagagccatggactgtcatttctgatttctgtttgattctttgtggtcatcattgaatatacaggggcctctatacactctggggagtatctattctcaggtgagcaaaataccgaatactgaatggaaatcaactgtaagtattaggacttcatatgcaacttgaatttttggtgctgtccggagtctagagccccacaatctgttttggttacagtttatccctgtaggataaatgatccatttaactattcatcagaggtgctgtaattttaaattgtctcttgtctccttcagttaattttcagaattaaaaacataccatgggaaaaaa

SEQ ID NO: 175351 - DNA, 522 bp, Homo sapiens
  Payload ID: 14439
  Gene Symbol: RBBP9
  Gene Name: retinoblastoma binding protein 9
  ENST ID: ENST00000622282
  CDS Start-End: 1-522
atggcttctcctagcaaggcagtgattgttcccgggaacggaggcggggatgtgaccacccacggctggtatggctgggtgaaaaaggagctggagaagatacctggtttccagtgtttggctaaaaacatgcccgacccaattacagcacgagagagcatctggctgcccttcatggagacagagctgcactgtgatgagaagactatcatcattggccacagttctggggccatcgcggccatgaggtatgcagaaacacatcgagtatatgctattgtattagtgtctgcgtacacatcagacttgggggatgaaaatgagcgtgcaagtggatacttcacccgcccctggcagtgggagaagatcaaggccaactgcccttacattgtgcagtttggctctactgacgacccgttccttccctggaaggaacaacaagaagtggccgataggtggaaaccaaattgcacaaattcactgactgtggccactttcagaacacagagtttcatgaactga

SEQ ID NO: 175352 - DNA, 3225 bp, Homo sapiens
  Payload ID: 14440
  Gene Symbol: RBL1
  Gene Name: retinoblastoma-like 1
  Uniprot ID: P28749
  ENST ID: ENST00000344359
  CDS Start-End: 62-3106
cgcgcctgggagggagaaagaagtcgggggccgtggcgcgcagcccgcggggcctgaagggatgttcgaggacaagccccacgctgagggggcggcggtggtcgccgcagccggggaggcgctacaggccctgtgccaggagctgaacctggacgaggggagcgcggccgaagccctggacgactttactgccatccgaggcaactacagcctagagggagaagttacacactggttggcatgttcattatatgttgcatgccgcaaaagcattattcccacggttggaaagggtatcatggaaggcaactgtgtttcacttaccagaatactacgttcagctaaattaagtttaatacaattttttagtaaaatgaagaaatggatggacatgtcaaatctaccacaagaatttcgtgaacgtatagaaaggctagagagaaattttgaggtgtctactgtaatattcaaaaaatatgagccaatttttttagatatatttcaaaatccatatgaagaaccaccaaagttaccacgaagccggaagcagaggaggattccttgcagtgttaaggatctgtttaatttctgttggacactttttgtttatactaagggtaattttcggatgattggggatgacttagtaaactcttatcatttacttctatgctgcttggatctgatttttgccaatgcgattatgtgcccaaatagacaagacttgctaaatccatcatttaaaggtttaccatctgattttcatactgctgactttacggcttctgaagagccaccctgcatcattgctgtactgtgtgaactgcatgatggacttctcgtagaagcaaaaggaataaaggagcactactttaagccatatatttcaaaactctttgacaggaagatattaaaaggagaatgcctcctggacctttcaagttttactgataatagcaaagcagtgaataaggagtatgaagagtatgttctaactgttggtgattttgatgagaggatctttttgggagcagacgcagaagaggaaattggaacacctcgaaagttcactcgtgacaccccattagggaaactgacagcacaggctaatgtggagtataaccttcaacagcactttgaaaaaaaaaggtcatttgcaccttctaccccactgaccggacggagatatttacgagaaaaagaagcagtcattactcctgttgcatcagccacccaaagtgtgagccggttacagagtattgtggctggtctgaaaaatgcaccaagtgaccaacttataaatatttttgaatcttgtgtgcgtaatcctgtggaaaacattatgaaaatactaaaaggaataggagagactttctgtcaacactatactcaatcaacagatgaacagccaggatctcacatagactttgctgtaaacagactaaagctggcagaaattttgtattataaaatactagagactgtaatggttcaggaaacacgaagacttcatggaatggacatgtcagttcttttagagcaagatatatttcatcgttccttgatggcttgttgtttggaaattgtgctctttgcctatagctcacctcgtacttttccttggattattgaagttctcaacttgcaaccattttacttttataaggttattgaggtggtgatccgctcagaagaggggctctcaagggacatggtgaaacacctaaacagcattgaagaacagattttggagagtttagcatggagtcacgattctgcactgtgggaggctctccaggtttctgcaaacaaagttcctacctgtgaagaagttatattcccaaataactttgaaacaggaaatggaggaaatgtgcagggacatcttcccctgatgccaatgtctcctctaatgcacccaagagtcaaggaagttcgaactgacagtgggagtcttcgaagagatatgcaaccattgtctccaatttctgtccatgaacgctacagttctcctaccgcagggagtgctaagagaagactctttggagaggaccccccaaaggaaatgcttatggacaagatcataacagaaggaacaaaattgaaaatcgctccttcttcaagcattactgctgaaaatgtatcaattttacctggtcaaactcttctaacaatggccacagccccagtaacaggaacaacaggacataaagttacaattccattacatggtgtcgcaaatgatgctggagagatcacactgatacctctttccatgaatacaaatcaggagtccaaagtcaagagtcctgtatcacttactgctcattcattaattggtgcttctccaaaacagaccaatctgactaaagcacaagaggtacattcaactggaataaacaggccaaagagaactgggtccttagcactattttacagaaaggtctatcatttggcaagtgtacgcttacgtgatctatgtctaaaactggatgtttcaaatgagttacgaaggaagatatggacgtgttttgaattcactttagttcactgtcctgatctaatgaaagacaggcatttggatcagctcctcctttgtgccttttatatcatggcaaaggtaacaaaagaagaaagaacttttcaagaaattatgaaaagttataggaatcagccccaagctaatagtcacgtatatagaagtgttctgctgaaaagtattccaagagaagttgtggcatataataaaaatataaatgatgactttgaaatgatagattgtgacttagaagatgctacaaaaacacctgactgttccagtggaccagtgaaagaggaaagaggtgatcttataaaattttacaatacaatatatgtaggaagagtgaagtcatttgcactgaaatacgacttggcgaatcaggaccatatgatggatgctccaccactctctccttttccacatattaaacaacagccaggctcaccacgccgcatttcccagcagcactccatttatatttccccgcacaagaatgggtcaggccttacaccaagaagcgctctgctgtacaagttcaatggcagcccttctaaggtaaggtgaataggctaaaagttggatttcagattaacagtcagtaactgttaatcctgcctctttttttttttttcttttttggccaagttactactatactaataaaatatgaaatgttaactatg

SEQ ID NO: 175353 - DNA, 5684 bp, Homo sapiens
  Payload ID: 14440
  Gene Symbol: RBL1
  Gene Name: retinoblastoma-like 1
  Uniprot ID: P28749
  ENST ID: ENST00000373664
  CDS Start-End: 68-3274
gggtagcgcgcctgggagggagaaagaagtcgggggccgtggcgcgcagcccgcggggcctgaagggatgttcgaggacaagccccacgctgagggggcggcggtggtcgccgcagccggggaggcgctacaggccctgtgccaggagctgaacctggacgaggggagcgcggccgaagccctggacgactttactgccatccgaggcaactacagcctagagggagaagttacacactggttggcatgttcattatatgttgcatgccgcaaaagcattattcccacggttggaaagggtatcatggaaggcaactgtgtttcacttaccagaatactacgttcagctaaattaagtttaatacaattttttagtaaaatgaagaaatggatggacatgtcaaatctaccacaagaatttcgtgaacgtatagaaaggctagagagaaattttgaggtgtctactgtaatattcaaaaaatatgagccaatttttttagatatatttcaaaatccatatgaagaaccaccaaagttaccacgaagccggaagcagaggaggattccttgcagtgttaaggatctgtttaatttctgttggacactttttgtttatactaagggtaattttcggatgattggggatgacttagtaaactcttatcatttacttctatgctgcttggatctgatttttgccaatgcgattatgtgcccaaatagacaagacttgctaaatccatcatttaaaggtttaccatctgattttcatactgctgactttacggcttctgaagagccaccctgcatcattgctgtactgtgtgaactgcatgatggacttctcgtagaagcaaaaggaataaaggagcactactttaagccatatatttcaaaactctttgacaggaagatattaaaaggagaatgcctcctggacctttcaagttttactgataatagcaaagcagtgaataaggagtatgaagagtatgttctaactgttggtgattttgatgagaggatctttttgggagcagacgcagaagaggaaattggaacacctcgaaagttcactcgtgacaccccattagggaaactgacagcacaggctaatgtggagtataaccttcaacagcactttgaaaaaaaaaggtcatttgcaccttctaccccactgaccggacggagatatttacgagaaaaagaagcagtcattactcctgttgcatcagccacccaaagtgtgagccggttacagagtattgtggctggtctgaaaaatgcaccaagtgaccaacttataaatatttttgaatcttgtgtgcgtaatcctgtggaaaacattatgaaaatactaaaaggaataggagagactttctgtcaacactatactcaatcaacagatgaacagccaggatctcacatagactttgctgtaaacagactaaagctggcagaaattttgtattataaaatactagagactgtaatggttcaggaaacacgaagacttcatggaatggacatgtcagttcttttagagcaagatatatttcatcgttccttgatggcttgttgtttggaaattgtgctctttgcctatagctcacctcgtacttttccttggattattgaagttctcaacttgcaaccattttacttttataaggttattgaggtggtgatccgctcagaagaggggctctcaagggacatggtgaaacacctaaacagcattgaagaacagattttggagagtttagcatggagtcacgattctgcactgtgggaggctctccaggtttctgcaaacaaagttcctacctgtgaagaagttatattcccaaataactttgaaacaggaaatggaggaaatgtgcagggacatcttcccctgatgccaatgtctcctctaatgcacccaagagtcaaggaagttcgaactgacagtgggagtcttcgaagagatatgcaaccattgtctccaatttctgtccatgaacgctacagttctcctaccgcagggagtgctaagagaagactctttggagaggaccccccaaaggaaatgcttatggacaagatcataacagaaggaacaaaattgaaaatcgctccttcttcaagcattactgctgaaaatgtatcaattttacctggtcaaactcttctaacaatggccacagccccagtaacaggaacaacaggacataaagttacaattccattacatggtgtcgcaaatgatgctggagagatcacactgatacctctttccatgaatacaaatcaggagtccaaagtcaagagtcctgtatcacttactgctcattcattaattggtgcttctccaaaacagaccaatctgactaaagcacaagaggtacattcaactggaataaacaggccaaagagaactgggtccttagcactattttacagaaaggtctatcatttggcaagtgtacgcttacgtgatctatgtctaaaactggatgtttcaaatgagttacgaaggaagatatggacgtgttttgaattcactttagttcactgtcctgatctaatgaaagacaggcatttggatcagctcctcctttgtgccttttatatcatggcaaaggtaacaaaagaagaaagaacttttcaagaaattatgaaaagttataggaatcagccccaagctaatagtcacgtatatagaagtgttctgctgaaaagtattccaagagaagttgtggcatataataaaaatataaatgatgactttgaaatgatagattgtgacttagaagatgctacaaaaacacctgactgttccagtggaccagtgaaagaggaaagaggtgatcttataaaattttacaatacaatatatgtaggaagagtgaagtcatttgcactgaaatacgacttggcgaatcaggaccatatgatggatgctccaccactctctccttttccacatattaaacaacagccaggctcaccacgccgcatttcccagcagcactccatttatatttccccgcacaagaatgggtcaggccttacaccaagaagcgctctgctgtacaagttcaatggcagcccttctaagagtttgaaagatatcaacaacatgataaggcaaggtgagcagagaaccaagaagcgagtaatagccatcgatagtgatgcagaatcccctgccaaacgcgtctgtcaagaaaatgatgacgttttactgaaacgactacaggatgttgtcagtgaaagagcaaatcattaatgttgttcttgtttctatgataaaagcactttcagattgttctgcagaaagttggagctctgtccttcaaaccttttagccctatagatgataaatatcactgggttataagaaaaaattgcacaaaaattatgtgctttttaaaatatttatccaaaatgtagttgacagagatgtattttgagttggattggaaaggaatattttaagtgccttttaaaaatactaatagtccggccaggcgctgtggctcacgcctgtaatcccaggactttgggaggccaaggcgggcagatcaccggaggtcaggagttcgagaccagcctgaccaacatggagaaaccccatctctactaaaaatacaaaattagccgggtgtggtggcgcatgcctgtaatcccagctacttgggaggctgaggcagaattgcttgaacccaggaagcggaggttgtggtgagccaaggttgcgccactgcactccagcctgggcaacaagagtaaaactccatctcaaaaaatatatatatatatataaatagggaattttttttaatgtttgctccttgagttttcaagatgaaataaggagaaaccccataactttttagctctcttttaaaaataaatgtctccttctgtgttctgtaatatgaggataaataatctacttttgatagcatgctttgagatatttgtattcttaatttaatattgaaggaaggggttggttcccatagtacctggccagagggttatataccatcctgtctctggcccactgtggtaattccacatccaggtaccaccgccattcagagttgtctcaccccttctcgtgccttttctctccttgagctttataaacagatttgtacctgagccccagtgctacactcatccttgctttccagccctaagccatctcagcctgatgtcacaacccaataaatggggcactttcttcttttgtaaactattatcattttggtttctgtgacattaacttaattatatatgatcgtattaactcatgtagttctcaaaataggcagctgcttctgaagccagtaaaataaaattcagttagttattaaaaactaaattcctattagtaaggtaacaccatgattatgtgtgatatactgtttttgagatcatagttatcagtcattctcaatatctaattgagtccctaagaatattttaaaccttttaaaaatcacataaatatcatctcatgcctcataattctaatatatttaatacatcagtaaaatagctgcttattacttcccacactttgttctcagtattgttagtgcatcatgagtttcctgctagtgtttgaccactgggtactcctgaagatgttttttagtactagggatgcttttcagtattagggatgcttttttcagtactagggatgtactagggagtactgagtactcctgaagatgtttttcagtactagggatgcttttttcagtgttagggatgcttttcagtactagggatgcttttttcagtgctagggatgcttttcagtactagggatgctttccaaaatatcacctctttaacgtttactttttctagtgtgtgtctggaatccaaaggacatgaataagccactcataattaattttgagaagttttatcaaatgtttatgtttctaactgcaaaccttaattttggaaaggcacaatgtttaactcacctatgtttaaccatggctaatttaaaatagtctaagatttggccgtcactaattagtattctcaagaatttcatttttcaattttaagaagaaaagggattttggtcacattttgcttgtaaatgaaaattacatcctcattctttgtgtagtatctacacattgttataagccaaaaaacaaagtctgtctggaatctttgtacatatttgtatgttgctataattgttatttttatcttcattattgtgcaaaatataaatgagcatttgtacattgactgtataagaaaccatgggccaggtcctgtggctcatgcctataatcccaacactttgggaggctgaggcaggaggattgcttcagtccaggagttcaagactaacctgggcaacatagccctcatctctacaaaaaataaaaaaattagttgggtgtgatggcatgtgcctgtagtcccagctactcaggagactgacatgagaggatcacttgagactgggagattctgaggctgcagtgagctgtgattgcaccactacactccatcctaggtgagagggcaagaccctttctcagaaaaggaaaaaaagaaattctggacatgtttttatcagttttcaggacttggtatcaatgtacatagaatggctaataaaaattggaattgagattattgaaaaaaaa

SEQ ID NO: 175354 - DNA, 763 bp, Homo sapiens
  Payload ID: 14440
  Gene Symbol: RBL1
  Gene Name: retinoblastoma-like 1
  ENST ID: ENST00000525052
  CDS Start-End: 1-763
caatttttttagatatatttcaaaatccatatgaagaaccaccaaagttaccacgaagccggaagcagagacaagacttgctaaatccatcatttaaaggtttaccatctgattttcatactgctgactttacggcttctgaagagccaccctgcatcattgctgtactgtgtgaactgcatgatggacttctcgtagaagcaaaaggaataaaggagcactactttaagccatatatttcaaaactctttgacaggaagatattaaaaggagaatgcctcctggacctttcaagttttactgataatagcaaagcagtgaataaggagtatgaagagtatgttctaactgttggtgattttgatgagaggatctttttgggagcagacgcagaagaggaaattggaacacctcgaaagttcactcgtgacaccccattagggaaactgacagcacaggctaatgtggagtataaccttcaacagcactttgaaaaaaaaaggtcatttgcaccttctaccccactgaccggacggagatatttacgagaaaaagaagcagtcattactcctgttgcatcagccacccaaagtgtgagccggttacagagtattgtggctggtctgaaaaatgcaccaagtgaccaacttataaatatttttgaatcttgtgtgcgtaatcctgtggaaaacattatgaaaatactaaaaggaataggagagactttctgtcaacactatactcaatcaacagatgaacagcc

SEQ ID NO: 175355 - DNA, 599 bp, Homo sapiens
  Payload ID: 14440
  Gene Symbol: RBL1
  Gene Name: retinoblastoma-like 1
  ENST ID: ENST00000527999
  CDS Start-End: 68-409
gggtagcgcgcctgggagggagaaagaagtcgggggccgtggcgcgcagcccgcggggcctgaagggatgttcgaggacaagccccacgctgagggggcggcggtggtcgccgcagccggggaggcgctacaggccctgtgccaggagctgaacctggacgaggggagcgcggccgaagccctggacgactttactgccatccgaggcaactacagcctagagggagaagttacacactggttggcatgttcattatatgttgcatgccgcaaaagcattattcccacggttggaaagggtatcatggaaggcaactgtgtttcacttaccagaatactacgttcagctaaattaaggggctgctgctgccctatgtctcctggccagttgacattttggcaaccatgaagtgacctgaagcgagcctccatttactgatattataattggagccttggtaccattcacccaatctcgctgagccagcaggggtctctgtttaatacaattttttagtaaaatgaagaaatggatggacatgtcaaatctaccacaagaatttcgtgaacgtatagaaaggctagagagaaattttgag

SEQ ID NO: 175356 - DNA, 4906 bp, Homo sapiens
  Payload ID: 14441
  Gene Symbol: RBL2
  Gene Name: retinoblastoma-like 2
  Uniprot ID: Q08999
  ENST ID: ENST00000262133
  CDS Start-End: 138-3557
gtgcctgcaggcggtcagcgtcgtttgcggcggcgcaggcgcggtgcgggcggcggacgggcgggcgcttcgccgtttgaatggctgcgggcccgggccctcacctcacctgaggtccggccgcccaggggtgcgctatgccgtcgggaggtgaccagtcgccaccgcccccgcctccccctccggcggcggcagcctcggatgaggaggaggaggacgacggcgaggcggaagacgccgcgccgcctgccgagtcgcccacccctcagatccagcagcggttcgacgagctgtgcagccgcctcaacatggacgaggcggcgcgggccgaggcctgggacagctaccgcagcatgagcgaaagctacacgctggagggaaatgatcttcattggttagcatgtgccttatatgtggcttgcagaaaatctgttccaactgtaagcaaagggacagtggaaggaaactatgtatctttaactagaatcctgaaatgttcagagcagagcttaatcgaattttttaataagatgaagaagtgggaagacatggcaaatctacccccacatttcagagaacgtactgagagattagaaagaaacttcactgtttctgctgtaatttttaagaaatatgaacccatttttcaggacatctttaaataccctcaagaggagcaacctcgtcagcagcgaggaaggaaacagcggcgacagccctgtactgtgtctgaaattttccatttttgttgggtgctttttatatatgcaaaaggtaatttccccatgattagtgatgatttggtcaattcttatcacctgctgctgtgtgctttggacttagtttatggaaatgcacttcagtgttctaatcgtaaagaacttgtgaaccctaattttaaaggcttatctgaagattttcatgctaaagattctaaaccttcctctgaccccccttgtatcattgagaaactgtgttccttacatgatggcctagttttggaagcaaaggggataaaggaacatttctggaaaccctatattaggaaactttatgaaaaaaagctccttaagggaaaagaagaaaatctcactgggtttctagaacctgggaactttggagagagttttaaagccatcaataaggcctatgaggagtatgttttatctgttgggaatttagatgagcggatatttcttggagaggatgctgaggaggaaattgggactctctcaaggtgtctgaacgctggttcaggaacagagactgctgaaagggtgcagatgaaaaacatcttacagcagcattttgacaagtccaaagcacttagaatctccacaccactaactggtgttaggtacattaaggagaatagcccttgtgtgactccagtttctacagctacgcatagcttgagtcgtcttcacaccatgctgacaggcctcaggaatgcaccaagtgagaaactggaacagattctcaggacatgttccagagatccaacccaggctattgctaacagactgaaagaaatgtttgaaatatattctcagcatttccagccagacgaggatttcagtaattgtgctaaagaaattgccagcaaacattttcgttttgcggagatgctttactataaagtattagaatctgttattgagcaggaacaaaaaagactaggagacatggatttatctggtattctggaacaagatgcgttccacagatctctcttggcctgctgccttgaggtcgtcactttttcttataagcctcctgggaattttccatttattactgaaatatttgatgtgcctctttatcatttttataaggtgatagaagtattcattagagcagaagatggcctttgtagagaggtggtaaaacaccttaatcagattgaagaacagatcttagatcatttggcatggaaaccagagtctccactctgggaaaaaattagagacaatgaaaacagagttcctacatgtgaagaggtcatgccacctcagaacctggaaagggcagatgaaatttgcattgctggctcccctttgactcccagaagggtgactgaagttcgtgctgatactggaggacttggaaggagcataacatctccaaccacattatacgataggtacagctccccaccagccagcactaccagaaggcggctatttgttgagaatgatagcccctctgatggagggacgcctgggcgcatgcccccacagcccctagtcaatgctgtccctgtgcagaatgtatctggggagactgtttctgtcacaccagttcctggacagactttggtcaccatggcaaccgccactgtcacagccaacaatgggcaaacggtaaccattcctgtgcaaggtattgccaatgaaaatggagggataacattcttccctgtccaagtcaatgttggggggcaggcacaagctgtgacaggctccatccagcccctcagtgctcaggccctggctggaagtctgagctctcaacaggtgacaggaacaactttgcaagtccctggtcaagtggccattcaacagatttccccaggtggccaacagcagaagcaaggccagtctgtaaccagcagtagtaatagacccaggaagaccagctctttatcgcttttctttagaaaggtataccatttagcagctgtccgccttcgggatctctgtgccaaactagatatttcagatgaattgaggaaaaaaatctggacctgctttgaattctccataattcagtgtcctgaacttatgatggacagacatctggaccagttattaatgtgtgccatttatgtgatggcaaaggtcacaaaagaagataagtccttccagaacattatgcgttgttataggactcagccgcaggcccggagccaggtgtatagaagtgttttgataaaagggaaaagaaaaagaagaaattctggcagcagtgatagcagaagccatcagaattctccaacagaactaaacaaagatagaaccagtagagactccagtccagttatgaggtcaagcagcaccttgccagttccacagcccagcagtgctcctcccacacctactcgcctcacaggtgccaacagtgacatggaagaagaggagaggggagacctcattcagttctacaacaacatctacatcaaacagattaagacatttgccatgaagtactcacaggcaaatatggatgctcctccactctctccctatccatttgtaagaacaggctcccctcgccgaatacagttgtctcaaaatcatcctgtctacatttccccacataaaaatgaaacaatgctttctcctcgagaaaagattttctattacttcagcaacagtccttcaaagagactgagagaaattaatagtatgatacgcacaggagaaactcctactaaaaagagaggaattcttttggaagatggaagtgaatcacctgcaaaaagaatttgcccagaaaatcattctgccttattacgccgtctccaagatgtagctaatgaccgtggttcccactgaggttagtctcttgtattaaactcttcacaaaatctgtttagcagcagcctttaatgcatctagattatggagcttttttccttaatccagctgatgagttacagcctgttagtaacatgaggggacattttggtgagaaatgggacttaactccttccagtgtccttagaacattttaattcatcccaactgtctttttttccctaccattcagtgattactgtcaaggctgcttagaatccaaacttggatttttgactctggcaaagcttttagaaatactgcaagaaaatgatgtgtacccaaacgtgagcataggaggcttctgttgacgtactccaacagaagaactgtgtttcaagttcaatcctacctgttttgtggtcagctgtagtcctcataaaaagcaaaacaaaaattaggtattttgtcctaaaacacctggtaggagtgtgtgattttttgcattcctgacaaaggagagcacacccaggtttggaggtcctaggtcattagccctcgtctcccgttccctttgtgcacatcttccctctccccattcggtgtggtgcagtgtgaaaagtccttgattgttcgggtgtgcaatgtctgagtgaacctgtataagtggaggcactttagggctgtaaaatgcatgattttgtaacccagattttgctgtatatttgtgatagcactttctacaatgtgaactttattaaatacaaaacttccaggctaaacatccaatattttctttaatgcttttatatttttttaaaatgttaaaacccctatagccaccttttgggaatgttttaaattctccagttttttgttatatagggatcaaccagctaagaaaagattttaatcaagttgaattgaggggattaatatgaaaacttatgacctcttcctttaggagggagttatctaaaagaaatgtctattaaggtgatatatttaaaaatatttttgggtgttcctggcagtttaaaaaaattggttggagaatttaggtttttattagtaccatagtaccatttatacaaattagaaaatgttatttaacagctgaattatctatacatatctttattaatcactattgttccagcagttttcaagtcaaattaataatcttattagggagaaaattcaattgtaaattgaatcagtataaacaaagttactaggtaacttcatattgctgagagaaatatggaacttacattgttcaattagaatagtgttctgcaaaaatatttataaaacttctcaagatactgctactgtaattttatatgaagataagtgtatttttcaataaagcatttataaattag

SEQ ID NO: 175357 - DNA, 2025 bp, Homo sapiens
  Payload ID: 14441
  Gene Symbol: RBL2
  Gene Name: retinoblastoma-like 2
  ENST ID: ENST00000544405
  CDS Start-End: 109-2025
gtttatcagctgtttgactgtgtgtgtggcatttaaacctgaggccatttgatttctcaagtcgttttataattaatttgtagaaagagtcgggcaaataggtccaggatgcaaagcctaaccaagggaaatgatcttcattggttagcatgtgccttatatgtggcttgcagaaaatctgttccaactgtaagcaaagggacagtggaaggaaactatgtatctttaactagaatcctgaaatgttcagagcagagcttaatcgaattttttaataagatgaagaagtgggaagacatggcaaatctacccccacatttcagagaacgtactgagagattagaaagaaacttcactgtttctgctgtaatttttaagaaatatgaacccatttttcaggacatctttaaataccctcaagaggagcaacctcgtcagcagcgaggaaggaaacagcggcgacagccctgtactgtgtctgaaattttccatttttgttgggtgctttttatatatgcaaaaggtaatttccccatgattagtgatgatttggtcaattcttatcacctgctgctgtgtgctttggacttagtttatggaaatgcacttcagtgttctaatcgtaaagaacttgtgaaccctaattttaaaggcttatctgaagattttcatgctaaagattctaaaccttcctctgaccccccttgtatcattgagaaactgtgttccttacatgatggcctagttttggaagcaaaggggataaaggaacatttctggaaaccctatattaggaaactttatgaaaaaaagctccttaagggaaaagaagaaaatctcactgggtttctagaacctgggaactttggagagagttttaaagccatcaataaggcctatgaggagtatgttttatctgttgggaatttagatgagcggatatttcttggagaggatgctgaggaggaaattgggactctctcaaggtgtctgaacgctggttcaggaacagagactgctgaaagggtgcagatgaaaaacatcttacagcagcattttgacaagtccaaagcacttagaatctccacaccactaactggtgttaggtacattaaggagaatagcccttgtgtgactccagtttctacagctacgcatagcttgagtcgtcttcacaccatgctgacaggcctcaggaatgcaccaagtgagaaactggaacagattctcaggacatgttccagagatccaacccaggctattgctaacagactgaaagaaatgtttgaaatatattctcagcatttccagccagacgaggatttcagtaattgtgctaaagaaattgccagcaaacattttcgttttgcggagatgctttactataaagtattagaatctgttattgagcaggaacaaaaaagactaggagacatggatttatctggtattctggaacaagatgcgttccacagatctctcttggcctgctgccttgaggtcgtcactttttcttataagcctcctgggaattttccatttattactgaaatatttgatgtgcctctttatcatttttataaggtgatagaagtattcattagagcagaagatggcctttgtagagaggtggtaaaacaccttaatcagattgaagaacagatcttagatcatttggcatggaaaccagagtctccactctgggaaaaaattagagacaatgaaaacagagttcctacatgtgaagaggtcatgccacctcagaacctggaaagggcagatgaaatttgcattgctggctcccctttgactcccagaagggtgactgaagttcgtgctgatactggaggacttggaaggagcataacatctccaaccacattatacgataggtacagctccccaccagccagcactaccagaaggcggctatttgttgagaatgatagcccctctgatggagggacgcctgggcgcatgcccccacagcccctagtcaatgctgtccctgtgcagaatgtatct

SEQ ID NO: 175358 - DNA, 3897 bp, Homo sapiens
  Payload ID: 14441
  Gene Symbol: RBL2
  Gene Name: retinoblastoma-like 2
  ENST ID: ENST00000544545
  CDS Start-End: 1-2550
atggagtctcgctgtgtcgcccaggctggaatgcagtggcatgatctcggctcactgcaacctctgcctcccaggttcaagcgattcttctgcctcagcctcctgagtagctgtgaatacagtaaagccatcaataaggcctatgaggagtatgttttatctgttgggaatttagatgagcggatatttcttggagaggatgctgaggaggaaattgggactctctcaaggtgtctgaacgctggttcaggaacagagactgctgaaagggtgcagatgaaaaacatcttacagcagcattttgacaagtccaaagcacttagaatctccacaccactaactggtgttaggtacattaaggagaatagcccttgtgtgactccagtttctacagctacgcatagcttgagtcgtcttcacaccatgctgacaggcctcaggaatgcaccaagtgagaaactggaacagattctcaggacatgttccagagatccaacccaggctattgctaacagactgaaagaaatgtttgaaatatattctcagcatttccagccagacgaggatttcagtaattgtgctaaagaaattgccagcaaacattttcgttttgcggagatgctttactataaagtattagaatctgttattgagcaggaacaaaaaagactaggagacatggatttatctggtattctggaacaagatgcgttccacagatctctcttggcctgctgccttgaggtcgtcactttttcttataagcctcctgggaattttccatttattactgaaatatttgatgtgcctctttatcatttttataaggtgatagaagtattcattagagcagaagatggcctttgtagagaggtggtaaaacaccttaatcagattgaagaacagatcttagatcatttggcatggaaaccagagtctccactctgggaaaaaattagagacaatgaaaacagagttcctacatgtgaagaggtcatgccacctcagaacctggaaagggcagatgaaatttgcattgctggctcccctttgactcccagaagggtgactgaagttcgtgctgatactggaggacttggaaggagcataacatctccaaccacattatacgataggtacagctccccaccagccagcactaccagaaggcggctatttgttgagaatgatagcccctctgatggagggacgcctgggcgcatgcccccacagcccctagtcaatgctgtccctgtgcagaatgtatctggggagactgtttctgtcacaccagttcctggacagactttggtcaccatggcaaccgccactgtcacagccaacaatgggcaaacggtaaccattcctgtgcaaggtattgccaatgaaaatggagggataacattcttccctgtccaagtcaatgttggggggcaggcacaagctgtgacaggctccatccagcccctcagtgctcaggccctggctggaagtctgagctctcaacaggtgacaggaacaactttgcaagtccctggtcaagtggccattcaacagatttccccaggtggccaacagcagaagcaaggccagtctgtaaccagcagtagtaatagacccaggaagaccagctctttatcgcttttctttagaaaggtataccatttagcagctgtccgccttcgggatctctgtgccaaactagatatttcagatgaattgaggaaaaaaatctggacctgctttgaattctccataattcagtgtcctgaacttatgatggacagacatctggaccagttattaatgtgtgccatttatgtgatggcaaaggtcacaaaagaagataagtccttccagaacattatgcgttgttataggactcagccgcaggcccggagccaggtgtatagaagtgttttgataaaagggaaaagaaaaagaagaaattctggcagcagtgatagcagaagccatcagaattctccaacagaactaaacaaagatagaaccagtagagactccagtccagttatgaggtcaagcagcaccttgccagttccacagcccagcagtgctcctcccacacctactcgcctcacaggtgccaacagtgacatggaagaagaggagaggggagacctcattcagttctacaacaacatctacatcaaacagattaagacatttgccatgaagtactcacaggcaaatatggatgctcctccactctctccctatccatttgtaagaacaggctcccctcgccgaatacagttgtctcaaaatcatcctgtctacatttccccacataaaaatgaaacaatgctttctcctcgagaaaagattttctattacttcagcaacagtccttcaaagagactgagagaaattaatagtatgatacgcacaggagaaactcctactaaaaagagaggaattcttttggaagatggaagtgaatcacctgcaaaaagaatttgcccagaaaatcattctgccttattacgccgtctccaagatgtagctaatgaccgtggttcccactgaggttagtctcttgtattaaactcttcacaaaatctgtttagcagcagcctttaatgcatctagattatggagcttttttccttaatccagctgatgagttacagcctgttagtaacatgaggggacattttggtgagaaatgggacttaactccttccagtgtccttagaacattttaattcatcccaactgtctttttttccctaccattcagtgattactgtcaaggctgcttagaatccaaacttggatttttgactctggcaaagcttttagaaatactgcaagaaaatgatgtgtacccaaacgtgagcataggaggcttctgttgacgtactccaacagaagaactgtgtttcaagttcaatcctacctgttttgtggtcagctgtagtcctcataaaaagcaaaacaaaaattaggtattttgtcctaaaacacctggtaggagtgtgtgattttttgcattcctgacaaaggagagcacacccaggtttggaggtcctaggtcattagccctcgtctcccgttccctttgtgcacatcttccctctccccattcggtgtggtgcagtgtgaaaagtccttgattgttcgggtgtgcaatgtctgagtgaacctgtataagtggaggcactttagggctgtaaaatgcatgattttgtaacccagattttgctgtatatttgtgatagcactttctacaatgtgaactttattaaatacaaaacttccaggctaaacatccaatattttctttaatgcttttatatttttttaaaatgttaaaacccctatagccaccttttgggaatgttttaaattctccagttttttgttatatagggatcaaccagctaagaaaagattttaatcaagttgaattgaggggattaatatgaaaacttatgacctcttcctttaggagggagttatctaaaagaaatgtctattaaggtgatatatttaaaaatatttttgggtgttcctggcagtttaaaaaaattggttggagaatttaggtttttattagtaccatagtaccatttatacaaattagaaaatgttatttaacagctgaattatctatacatatctttattaatcactattgttccagcagttttcaagtcaaattaataatcttattagggagaaaattcaattgtaaattgaatcagtataaacaaagttactaggtaacttcatattgctgagagaaatatggaacttacattgttcaattagaatagtgttctgcaaaaatatttataaaacttctcaagatactgctactgtaattttatatgaagataagtgtatttttcaataaagcatttataaatt

SEQ ID NO: 175359 - DNA, 838 bp, Homo sapiens
  Payload ID: 14441
  Gene Symbol: RBL2
  Gene Name: retinoblastoma-like 2
  ENST ID: ENST00000567964
  CDS Start-End: 454-838
ttagttaggtcttcgcccaggaatgaacaagggcagctcggaagtgagaagcgtggagtcatttaggtcagatcccttgcactgtcataactttctcactgttaggatttttgcaaaggcagtttcgtgaacgtacagagacaggcccttgctattatccctattttttagataaggatatccaggcgatgaggaagttttacttctgggaacagcctggatacgaaaccttcacacgtcagtgtcttttggacattttctcgtcagtacagccctgttgaatgttctcacggtggggagggaaatgatcttcattggttagcatgtgccttatatgtggcttgcagaaaatctgttccaactgtaagcaaagggacagtggaaggaaactatgtatctttaactagaatcctgaaatgttcagagcagagcttaatcgaattttttaataagatgaagaagtgggaagacatggcaaatctacccccacatttcagagaacgtactgagagattagaaagaaacttcactgtttctgctgtaatttttaagaaatatgaacccatttttcaggacatctttaaataccctcaagaggagcaacctcgtcagcagcgaggaaggaaacagcggcgacagccctgtactgtgtctgaaattttccatttttgttgggtgctttttatatatgcaaaaggtaatttccccatgattagtgatgatttggtcaattcttatcacctgctgctgtgtgctttggacttagtttatggaaatgcacttcagtgttctaatcgtaaagaacttgtgaaccctaattttaaaggcttatctgaag

SEQ ID NO: 175360 - DNA, 958 bp, Homo sapiens
  Payload ID: 14442
  Gene Symbol: RAET1E
  Gene Name: retinoic acid early transcript 1E
  Uniprot ID: Q8TD07
  ENST ID: ENST00000357183
  CDS Start-End: 134-925
gcctgacctcagttgttccagggtaaagaatttgggcagtgcccacacccacgctgttggataacatttcttcaccataccagtgagggtgaatgtgtacacgcccagcttcctgcctgttactctccacagtatgcgaagaatatccctgacttctagccctgtgcgccttcttttgtttctgctgttgctactaatagccttggagatcatggttggtggtcactctctttgcttcaacttcactataaaatcattgtccagacctggacagccctggtgtgaagcgcaggtcttcttgaataaaaatcttttccttcagtacaacagtgacaacaacatggtcaaacctctgggcctcctggggaagaaggtatatgccaccagcacttggggagaattgacccaaacgctgggagaagtggggcgagacctcaggatgctcctttgtgacatcaaaccccagataaagaccagtgatccttccactctgcaagtcgagatgttttgtcaacgtgaagcagaacggtgcactggtgcatcctggcagttcgccaccaatggagagaaatccctcctctttgacgcaatgaacatgacctggacagtaattaatcatgaagccagtaagatcaaggagacatggaagaaagacagagggctggaaaagtatttcaggaagctctcaaagggagactgcgatcactggctcagggaattcttagggcactgggaggcaatgccagaaccgacagtgtcaccagtaaatgcttcagatatccactggtcttcttctagtctaccagatagatggatcatcctgggggcattcatcctgttagttttaatgggaattgttctcatctgtgtctggtggcaaaatggtgagtggcaggctggtctctggcccttgaggacgtcttagtctggtaaggactcaagagaggtgaatcatggg

SEQ ID NO: 175361 - DNA, 817 bp, Homo sapiens
  Payload ID: 14442
  Gene Symbol: RAET1E
  Gene Name: retinoic acid early transcript 1E
  Uniprot ID: Q8TD07
  ENST ID: ENST00000367363
  CDS Start-End: 134-817
gcctgacctcagttgttccagggtaaagaatttgggcagtgcccacacccacgctgttggataacatttcttcaccataccagtgagggtgaatgtgtacacgcccagcttcctgcctgttactctccacagtatgcgaagaatatccctgacttctagccctgtgcgccttcttttgtttctgctgttgctactaatagccttggagatcatgtacaacagtgacaacaacatggtcaaacctctgggcctcctggggaagaaggtatatgccaccagcacttggggagaattgacccaaacgctgggagaagtggggcgagacctcaggatgctcctttgtgacatcaaaccccagataaagaccagtgatccttccactctgcaagtcgagatgttttgtcaacgtgaagcagaacggtgcactggtgcatcctggcagttcgccaccaatggagagaaatccctcctctttgacgcaatgaacatgacctggacagtaattaatcatgaagccagtaagatcaaggagacatggaagaaagacagagggctggaaaagtatttcaggaagctctcaaagggagactgcgatcactggctcagggaattcttagggcactgggaggcaatgccagaaccgacagtgtcaccagtaaatgcttcagatatccactggtcttcttctagtctaccagatagatggatcatcctgggggcattcatcctgttagttttaatgggaattgttctcatctgtgtctggtggcaaaatggtgagtggcaggctggtctctggcccttgaggacgtcttag

SEQ ID NO: 175362 - DNA, 743 bp, Homo sapiens
  Payload ID: 14442
  Gene Symbol: RAET1E
  Gene Name: retinoic acid early transcript 1E
  ENST ID: ENST00000392270
  CDS Start-End: 32-385
gcccagcttcctgcctgttactctccacagtatgcgaagaatatccctgacttctagccctgtgcgccttcttttgtttctgctgttgctactaatagccttggagatcatggttggtggtcactctctttgcttcaacttcactataaaatcattgtccagacctggacagccctggtgtgaagcgcaggtcttcttgaataaaaatcttttccttcagtacaacagtgacaacaacatggtcaaacctctgggcctcctggggaagaagatccttccactctgcaagtcgagatgttttgtcaacgtgaagcagaacggtgcactggtgcatcctggcagttcgccaccaatggagagaaatccctcctctttgacgcaatgaacatgacctggacagtaattaatcatgaagccagtaagatcaaggagacatggaagaaagacagagggctggaaaagtatttcaggaagctctcaaagggagactgcgatcactggctcagggaattcttagggcactgggaggcaatgccagaaccgacagtgtcaccagtaaatgcttcagatatccactggtcttcttctagtctaccagatagatggatcatcctgggggcattcatcctgttagttttaatgggaattgttctcatctgtgtctggtggcaaaatggtgagtggcaggctggtctctggcccttgaggacgtcttagtctggtaaggactcaagagaggtgaa

SEQ ID NO: 175363 - DNA, 875 bp, Homo sapiens
  Payload ID: 14442
  Gene Symbol: RAET1E
  Gene Name: retinoic acid early transcript 1E
  Uniprot ID: Q8TD07
  ENST ID: ENST00000529948
  CDS Start-End: 1-630
atgcgaagaatatccctgacttctagccctgtgcgccttcttttgtttctgctgttgctactaatagccttggagatcatggttggtggtcactctctttgcttcaacttcactataaaatcattgtccagacctggacagccctggtgtgaagcgcaggtcttcttgaataaaaatcttttccttcagtacaacagtgacaacaacatggtcaaacctctgggcctcctggggaagaaggtatatgccaccagcacttggggagaattgacccaaacgctgggagaagtggggcgagacctcaggatgctcctttgtgacatcaaaccccagataaagaccagtgatccttccactctgcaagtcgagatgttttgtcaacgtgaagcagaacggtgcactggtgcatcctggcagttcgccaccaatggagagaaatccctcctctttgacgcaatgaacatgacctggacagtaattaatcatgaagccagtaagatcaaggagacatggaagaaagacagagggctggaaaagtatttcaggaagctctcaaagggagactgcgatcactggctcagggaattcttagggcactgggaggcaatgccagaaccgacaggtaactgagctgggtgggagaatgtggcagctccctttaaaggtcaaaagccttccctgtgtgggtgtcagtgtgtgtgtgcgatagaaaatttgattgacttctccgtgggcttcctgtctggagagtcagtgatggctataaggatttcccaccatcctccctttcccatcccacctcccactgtttcttcctcagtgtagaaaccccttcccattaaccaatgatccagtcacaatgacccactgctaaa

SEQ ID NO: 175364 - DNA, 643 bp, Homo sapiens
  Payload ID: 14442
  Gene Symbol: RAET1E
  Gene Name: retinoic acid early transcript 1E
  ENST ID: ENST00000531073
  CDS Start-End: 403-643
acagagactctgaggaagcagtcacctcaggcctctccatcctagagacggcagaaggacaaacatctcctgctggcacaaggaagtcataactcatgtgagtggagccatgtgggattaagaagtgataggagagcttgctgtctgtctctgctctccactgtgtgaggatacaacaggaagacagccatctggtgaggaagagagggccctcgccagataccggacctgctgacaccttgatcttggacttcccatcttccaggaaggcctgacctcagttgttccagggtaaagaatttgggcagtgcccacacccacgctgttggataacatttcttcaccataccagtgagggtgaatgtgtacacgcccagcttcctgcctgttactctccacagtatgcgaagaatatccctgacttctagccctgtgcgccttcttttgtttctgctgttgctactaatagccttggagatcatggttggtggtcactctctttgcttcaacttcactataaaatcattgtccagacctggacagccctggtgtgaagcgcaggtcttcttgaataaaaatcttttccttcagtacaacagtgacaacaacatggtcaaacctctgggcctcctggggaagaagg

SEQ ID NO: 175365 - DNA, 2099 bp, Homo sapiens
  Payload ID: 14442
  Gene Symbol: RAET1E
  Gene Name: retinoic acid early transcript 1E
  Uniprot ID: Q8TD07
  ENST ID: ENST00000532335
  CDS Start-End: 348-986
cctaattctcaaggtgatgctatttaggaagtcataactcatgtgagtggagccatgtgggattaagaagtgataggagagcttgctgtctgtctctgctctccactgtgtgaggatacaacaggaagacagccatctggtgaggaagagagggccctcgccagataccggacctgctgacaccttgatcttggacttcccatcttccaggaaggcctgacctcagttgttccagggtaaagaatttgggcagtgcccacacccacgctgttggataacatttcttcaccataccagtgagggtgaatgtgtacacgcccagcttcctgcctgttactctccacagtatgcgaagaatatccctgacttctagccctgtgcgccttcttttgtttctgctgttgctactaatagccttggagatcatggttggtggtcactctctttgcttcaacttcactataaaatcattgtccagacctggacagccctggtgtgaagcgcaggtcttcttgaataaaaatcttttccttcagtacaacagtgacaacaacatggtcaaacctctgggcctcctggggaagaaggtatatgccaccagcacttggggagaattgacccaaacgctgggagaagtggggcgagacctcaggatgctcctttgtgacatcaaaccccagataaagaccagtgatccttccactctgcaagtcgagatgttttgtcaacgtgaagcagaacggtgcactggtgcatcctggcagttcgccaccaatggagagaaatccctcctctttgacgcaatgaacatgacctggacagtaattaatcatgaagccagtaagatcaaggagacatggaagaaagacagagggctggaaaagtatttcaggaagctctcaaagggagactgcgatcactggctcagggaattcttagggcactgggaggcaatgccagaaccgacaggcagaagatccacctagaggtgataccacggcggcgcagagttgttcacctgtggtcctcgatcgctgacagccttggctcccactgctgtgtgttccctgagtcaagtggaggcggagcctgcaatgagcggagatcgcgcctctgcattccagtcttggcaacagagcaagactccgtctcaaaaaaaaaaaattttttttcagtacatattttttaaaagatagggctgggcacagcagctcacatctataatcccaacactttgggaggcctaggcaggaggatcacttgagcccaggaatctgaagctgcagtgagcctttgctcgtgagattgtggacctatgatcctaccaccagcccacctggttctaacaccccctcctctatgtgtgagagggagagaagaaaagtgagggagaaaagagagataagcaaagaacagagaggaaaaatggaaaataagaggaaattgggggaattaaacagaggggagggcatggatccccgggagttagaagagtagcagcttgtggattactacgcagtggaggaagaagagttgttggaaattatttgagaggtagtataatcatttgtgaggcagttttctgcattcaccatttctcacagactaagttactcataagcaaacgtgcaattcacattacactgaaattcttccctaatacatcatttgcattggaataaagtacggttttcaaacaacctgatatagcagaactgactgtataaattatgtgagcacagtgcaagtaattctttgtttgtttgtttgtttttttgagacagagtctcactctatctcccaggctggagtgtagtggtgcgatcccggctcactgcaacctcgatctcccaggctcaagcgattcccctgcctcagcctcctgagtagctgggattacaggcatgagccaccacgcccggctaatttttgtatttttagtagagacggggtttcaccctgttggccaggctggtctcgaactacggacctcaggtgatctgcccccctcagcctctcaaagtgctgggattatagcatgagccactgagcccagacacaagtagttctttctgataaacactttaacactgaatgca

SEQ ID NO: 175366 - DNA, 1107 bp, Homo sapiens
  Payload ID: 14443
  Gene Symbol: RAET1G
  Gene Name: retinoic acid early transcript 1G
  Uniprot ID: Q6H3X3
  ENST ID: ENST00000367360
  CDS Start-End: 69-1073
cctgcgagccgccaggtgatccacgggctgggcttcgcttctgctgtcccctgcgatccaactccccaatggcagcggccgccagccccgcgttccttctacgcctcccgcttctgctcctgctgtccagctggtgcaggaccgggctggccgaccctcactctctttgctatgacatcaccgtcatccctaagttcagacctggaccacggtggtgtgcggttcaaggccaggtggatgaaaagacttttcttcactatgactgtggcagcaagacagtcacacccgtcagtcccctggggaagaaactaaatgtcacaacggcctggaaagcacagaacccagtactgagagaggtggtggacatacttacagagcaactgcttgacattcagctggagaattacatacccaaggaacccctcaccctgcaggccaggatgtcttgtgagcagaaagccgaaggacacggcagtggatcttggcagctcagtttcgatggacagatcttcctcctctttgactcagaaaacagaatgtggacaacggttcatcctggagccagaaagatgaaagaaaagtgggagaatgacaaggatatgaccatgtccttccattacatctcaatgggagactgcacaggatggcttgaggacttcttgatgggcatggacagcaccctggagccaagtgcaggagcaccacccaccatgtcctcaggcacagcccaacccagggccacggccaccaccctcatcctttgctgcctcctcatcatgtgtctcctcatatgctccaggcacagtctgacccaaagccatggccaccaccctcagtccctgcagcctcctcctcatcctcccctgcttcatcctacctggctgctgaggagagtcctttggagtgacagctaccaaatagcgaagcgccccttgtctggtggacacgtgactcgcgtgactttacctatcattggagacgactcacactccttaccctgccctcttgccttgtatacaataaataacggcgcagccaggtattcggagccactacaggtctccatatcttgatggttccctgggcccagctgtcttttcttccgtc

SEQ ID NO: 175367 - DNA, 904 bp, Homo sapiens
  Payload ID: 14443
  Gene Symbol: RAET1G
  Gene Name: retinoic acid early transcript 1G
  Uniprot ID: Q6H3X3
  ENST ID: ENST00000367361
  CDS Start-End: 1-642
atggcagcggccgccagccccgcgttccttctacgcctcccgcttctgctcctgctgtccagctggtgcaggaccgggctggccgaccctcactctctttgctatgacatcaccgtcatccctaagttcagacctggaccacggtggtgtgcggttcaaggccaggtggatgaaaagacttttcttcactatgactgtggcagcaagacagtcacacccgtcagtcccctggggaagaaactaaatgtcacaacggcctggaaagcacagaacccagtactgagagaggtggtggacatacttacagagcaactgcttgacattcagctggagaattacatacccaaggaacccctcaccctgcaggccaggatgtcttgtgagcagaaagccgaaggacacggcagtggatcttggcagctcagtttcgatggacagatcttcctcctctttgactcagaaaacagaatgtggacaacggttcatcctggagccagaaagatgaaagaaaagtgggagaatgacaaggatatgaccatgtccttccattacatctcaatgggagactgcacaggatggcttgaggacttcttgatgggcatggacagcaccctggagccaagtgcaggaggcacagtctgacccaaagccatggccaccaccctcagtccctgcagcctcctcctcatcctcccctgcttcatcctacctggctgctgaggagagtcctttggagtgacagctaccaaatagcgaagcgccccttgtctggtggacacgtgactcgcgtgactttacctatcattggagacgactcacactccttaccctgccctcttgccttgtatacaataaataacggcgcagccaggtattcggagccactacaggtctccatatcttg

SEQ ID NO: 175368 - DNA, 1078 bp, Homo sapiens
  Payload ID: 14443
  Gene Symbol: RAET1G
  Gene Name: retinoic acid early transcript 1G
  ENST ID: ENST00000479265
  CDS Start-End: 112-777
actggagtttagggctgcattcagacgggctgcattcagacagcctgcgagccgccaggtgatccacgggctgggcttcgcttctgctgtcccctgcgatccaactccccaatggcagcggccgccagccccgcgttccttctacgcctcccgcttctgctcctgctgtccagctggtgcaggaccgggctggccgaccctcactctctttgctatgacatcaccgtcatccctaagttcagacctggaccacggtggtgtgcggttcaaggccaggtggatgaaaagacttttcttcactatgactgtggcagcaagacagtcacacccgtcagtcccctggggaagaaactaaatgtcacaacggcctggaaagcacagaacccagtactgagagaggtggtggacatacttacagagcaactgcttgacattcagctggagaattacatacccaaggaacccctcaccctgcaggccaggatgtcttgtgagcagaaagccgaaggacacggcagtggatcttggcagctcagtttcgatggacagatcttcctcctctttgactcagaaaacagaatgtggacaacggttcatcctggagccagaaagatgaaagaaaagtgggagaatgacaaggatatgaccatgtccttccattacatctcaatgggagactgcacaggatggcttgaggacttcttgatgggcatggacagcaccctggagccaagtgcaggaggtaacaggagaaaaagaaatggggatctccaatgagatcagaaatggggatctcaagaaactaattcttgagttcagcttcaatcatcccagtgtacacgtttatgttaaaatgacctcctcgtggggtgctcctcctgggggtgctggcgtgcctgtgctctcccaccctcctcttccttctccctcctgactcctcttcctcactgcacttgcttctgttccccacactgtggatttctcaccagcctcgaaactgcaggtgtcactattttcaggcctttctccttagtgttccctcttgagaatcacttttcctttcctcctctggtctgtt

SEQ ID NO: 175369 - DNA, 802 bp, Homo sapiens
  Payload ID: 14444
  Gene Symbol: RAET1L
  Gene Name: retinoic acid early transcript 1L
  Uniprot ID: Q5VY80
  ENST ID: ENST00000286380
  CDS Start-End: 62-802
gatttcatcttccaggatccaccttgattaaatctcttgtccccagccctcctggtccccaatggcagcagccgccatcccagctttgcttctgtgcctcccgcttctgttcctgctgttcggctggtcccgggctaggcgagacgaccctcactctctttgctatgacatcaccgtcatccctaagttcagacctggaccacggtggtgtgcggttcaaggccaggtggatgaaaagacttttcttcactatgactgtggcaacaagacagtcacacccgtcagtcccctggggaagaaactaaatgtcacaatggcctggaaagcacagaacccagtactgagagaggtggtggacatacttacagagcaactgcttgacattcagctggagaattacacacccaaggaacccctcaccctgcaggcaaggatgtcttgtgagcagaaagctgaaggacacagcagtggatcttggcagttcagtatcgatggacagaccttcctactctttgactcagagaagagaatgtggacaacggttcatcctggagccagaaagatgaaagaaaagtgggagaatgacaaggatgtggccatgtccttccattacatctcaatgggagactgcataggatggcttgaggacttcttgatgggcatggacagcaccctggagccaagtgcaggagcaccactcgccatgtcctcaggcacaacccaactcagggccacagccaccaccctcatcctttgctgcctcctcatcatcctcccctgcttcatcctccctggcatctga

SEQ ID NO: 175370 - DNA, 1285 bp, Homo sapiens
  Payload ID: 14444
  Gene Symbol: RAET1L
  Gene Name: retinoic acid early transcript 1L
  Uniprot ID: Q5VY80
  ENST ID: ENST00000367341
  CDS Start-End: 1-741
atggcagcagccgccatcccagctttgcttctgtgcctcccgcttctgttcctgctgttcggctggtcccgggctaggcgagacgaccctcactctctttgctatgacatcaccgtcatccctaagttcagacctggaccacggtggtgtgcggttcaaggccaggtggatgaaaagacttttcttcactatgactgtggcaacaagacagtcacacccgtcagtcccctggggaagaaactaaatgtcacaatggcctggaaagcacagaacccagtactgagagaggtggtggacatacttacagagcaactgcttgacattcagctggagaattacacacccaaggaacccctcaccctgcaggcaaggatgtcttgtgagcagaaagctgaaggacacagcagtggatcttggcagttcagtatcgatggacagaccttcctactctttgactcagagaagagaatgtggacaacggttcatcctggagccagaaagatgaaagaaaagtgggagaatgacaaggatgtggccatgtccttccattacatctcaatgggagactgcataggatggcttgaggacttcttgatgggcatggacagcaccctggagccaagtgcaggagcaccactcgccatgtcctcaggcacaacccaactcagggccacagccaccaccctcatcctttgctgcctcctcatcatcctcccctgcttcatcctccctggcatctgaggagagtcctttagagtgacaggttaaagatgataccaaaaagcccctgtgagcacggtcttgatcaacctcgcccttctgtctggccagctgcccaccacctacggtgtatgtccagcagcctccagcagatgatgatgacaccatggacccaatagctcattcactgccttgattccttttgccaacaatttaaccagtgattattcctaacatattatgcaattttctcttggtgctacctgatggaattcctgcacttaaagttctggctgactaaacaagatatgtcaacattttctttcttctctttttgtttggaaaatcaagtacttctttgaatgatgatttctttctttcattactgacatgattgtcagtaaaacaatcatgttagacttcagacctccagggattctttccatgtcctgaaagagaattgtttaattatttaataagaaaaaaatttatattaatgattgtttcctttagtaatttattgctgtgtactgatatttaaataaagagttatatttcccaaaaa

SEQ ID NO: 175371 - DNA, 7662 bp, Homo sapiens
  Payload ID: 14445
  Gene Symbol: RAI1
  Gene Name: retinoic acid induced 1
  Uniprot ID: Q7Z5J4
  ENST ID: ENST00000353383
  CDS Start-End: 470-6190
cccgcggacaccaggcaggcccggccgggtgcgcggccaaggcccgctccccgcgtccccgggcgccgcccccgcccgcggctgggctccgagagacgagtgggagagcgagtgcagcgagggcgagaggcgagccgagcaggccgccctgcccgcggccctagcgccggcgcgaggagggggcgccgcggcccaccctccttcctgcctggccgcgggccggccgggccgccgcgccccgacccccatggccacccaggcctccgggccgcgaagtcgcagcgccagacccaaggcccccgagtgagcgcgggcgccgaggatctcatctggccaccgcgttctggaagaggcgagagggagagcgtgcgcgagaggagagagacggcgggggaaagggagacggcgagacgcgcagcgccggcgcccgggagacccaggaggagcccgcagataaccagcccgagtcatgcagtcttttcgagaaaggtgtggtttccatggcaaacaacagaactaccagcagacctcgcaggaaacatcacgcctagagaattacaggcagccgagtcaggccgggctaagctgcgaccggcagcggctgctcgccaaggactattataacccgcagccttacccgagctatgagggtggcgctggcacgccctctggcactgcagccgcggtggccgccgacaagtaccaccgaggcagcaaggccctgcccacacagcaaggcctgcaggggaggccggctttccctggctacggcgtccaggacagcagcccctacccaggccgctatgctggtgaggagagccttcaggcttggggggccccacagccaccacccccacagccgcagccactacctgcaggggtggccaagtatgatgagaacttgatgaaaaagacagcagtgccccccagcaggcagtatgcagagcagggcgcccaggtgccctttcggactcactccctgcacgtccagcagccaccgccgccccagcagcccctggcataccccaagctccaaaggcagaagctgcagaacgacattgcctcccctctgcccttcccccagggtacccactttcctcagcattcccagtccttccccacctcctccacctactcctcctctgtccagggtggtgggcagggggcccactcctataagagttgcacagcaccgactgcccagccccatgacaggccgctgactgccagctccagcctggccccggggcagcgggtccagaatcttcatgcctaccagtcgggccgcctcagctatgaccagcagcagcagcagcagcagcagcagcagcagcagcagcaagcccttcagagccggcaccatgcccaggaaaccctccattaccaaaacctcgccaagtatcagcactacgggcagcaaggccagggctactgccagccggacgcagccgtccggaccccagagcagtactaccagaccttcagccccagctccagccactcacccgcccgctccgtgggccgctcaccttcctacagttccacaccgtcgccgctgatgccaaacctggagaactttccctacagccagcagccgctcagcaccggggccttccccgcagggatcactgaccacagccacttcatgcccctgctcaatccctccccaacggatgccaccagctctgtggacacccaggctggcaactgcaagccccttcagaaggacaagctccctgagaacctgctgtcggatctcagcctgcagagcctcacggcgctgacctcacaggtggagaacatctccaacaccgtccagcagctgctgctctccaaggctgctgtgccgcagaagaaaggtgtcaagaacctcgtgtccaggaccccagagcagcataaaagccagcactgcagccccgaagggagcggctactcagccgagcccgcaggcacaccgctgtcagagccgccgagcagcacgccacagtccacgcatgcggagccgcaggaggccgactacctgagcggctccgaggacccactggagcgcagcttcctctactgcaaccaggcccgtggcagccctgccagggtcaacagcaactcgaaggccaagcccgagtccgtgtccacctgttctgtgacctctcctgacgacatgtccaccaaatctgacgactccttccagagcctacacggcagtctgccgctcgacagcttctccaagttcgtggcgggtgagcgggactgtccgcggctgctgctcagcgccctggcacaggaggacctggcctccgagatcctggggctgcaggaagccatcggtgagaaggccgacaaagcttgggctgaagcacccagcctggtcaaggacagcagcaagccacccttctcgctggagaaccacagcgcctgcctggactctgtggccaagagtgcgtggccccggcctggggagccggaggccctgcccgactccttgcagctggacaagggcggcaatgccaaggacttcagcccagggctgtttgaagacccttccgtggccttcgctacgcctgaccccaaaaagacaactggtcctctctcctttggtaccaagcccacccttggggttcctgctccagaccccactacagcagcttttgactgtttcccggacacaaccgctgccagctcagcggacagcgccaacccctttgcctggccagaggaaaacctgggggatgcttgtcccaggtggggattgcaccctggcgagcttaccaagggcctggagcagggtgggaaggcctcagatggcatcagcaaaggggacacccatgaggcttcggcctgcctgggcttccaggaggaggacccccctggggagaaggtggcctcgttgcccggggacttcaagcaggaggaggtgggtggggtgaaggaggaggcaggtgggctgctgcagtgccccgaggtggccaaggctgaccggtggctggaggacagccggcactgctgttccaccgccgacttcggggacctcccactgctgccacccaccagcaggaaggaggacctggaagctgaggaggagtactcctccctatgtgagctcctgggcagccccgagcagaggcctggcatgcaggacccgctgtcacccaaggccccactcatctgcaccaaggaggaggtggaggaggtgctggactccaaggccggctggggctctccgtgccacctctcaggggagtccgtcatcctgctgggccctacagtgggcaccgagtcaaaggtccagagctggtttgagtcctctctgtcacacatgaagccaggtgaagaggggcctgatggggagcgagctccaggggattccaccacctcggacgcctctctggcccagaagcccaacaagcctgctgtgcccgaggcgcccatcgcaaagaaagagcctgtgccacggggcaaaagcttacggagccgtcgggtgcaccgggggctgcccgaggccgaggactccccatgcagggcaccagtgctgcccaaagacctcttgctccctgaatcctgcacagggcccccccagggacagatggaaggggctggagccccaggccggggggcctcggaagggctccccaggatgtgtactcgttctctcacggccctgagtgagccccgcacgcccggacccccaggcctgaccaccacccctgcacccccagacaaactggggggcaagcagcgagccgccttcaagtcgggcaagcgggtggggaagccctcacccaaggctgcctccagccccagcaacccggccgccctgcctgtggcctccgacagcagcccgatgggctccaagaccaaggagacagactcacccagcacgcctggcaaggaccagcgctccatgatccttcggtcacgcaccaaaacccaggagatcttccactccaagcggcggaggccctctgagggccggctccccaactgccgtgccaccaagaagctcctcgacaacagccacttgcccgccacattcaaggtctccagcagcccccagaaggagggcagggtgagccagcgggcaagggtccccaaacctggtgcaggcagcaagctctctgaccggcccctccatgcgctcaaaaggaagtcggccttcatggcgccggtccccaccaagaagcggaacctggtcttgcggagccgcagcagcagcagcagcaacgccagtggcaatgggggagatgggaaggaggagaggcctgagggttcccccaccctcttcaagaggatgtcttctcccaagaaagccaagcccaccaagggcaatggcgagcctgccacaaagctcccacccccggagacccccgatgcctgcctcaagctcgcctctcgggcagccttccagggggccatgaagaccaaggtgctgccaccccggaagggccggggcctgaagctggaagccatcgtgcagaagatcacctcgcccagcctcaagaagttcgcatgtaaagcgccaggggcctctcctggtaatcctctgagcccatccctttccgacaaagaccgtgggctcaagggtgctgggggcagcccagtgggggtggaagaaggcctggtaaatgtgggcaccgggcagaagctcccaacttctggggctgatccgttatgcagaaatccaaccaacagatccttaaaaggcaaactcatgaacagtaagaaactgtcttctactgactgtttcaaaaccgaggccttcacatccccggaggccctgcagcctggggggactgccctggcgcctaagaagaggagccggaaaggccgggcaggggcccatggactctccaaaggcccgctggagaagcggccctatcttggcccggctctgctcctgactccccgagacagggccagtggcacacaaggggccagtgaggacaactctggtggaggaggcaagaagccaaagatggaggagctgggcctggcctcccagcccccggagggcaggccctgccagccccagacaagggcacagaaacagccaggccacaccaactacagcagctattccaagcggaagcgcctcactcggggccgggccaagaacaccacctcttcaccctgtaaggggcgtgccaagcgacgacgacagcagcaggtgctgcccctggatcccgcagagcctgaaatccgcctcaagtacatttcctcttgcaagcggctgaggtcagacagccggacccccgccttctcacccttcgtgcgggtggagaagcgagacgcgttcaccaccatatgcactgttgtcaactcccctggagatgcgcccaagccccacaggaagccttcctcctctgcctcctcttcctcatcctcgtcctcgttctccttggatgcagccggggcctccctggccacactccctggaggctccatcctgcagccgcggccctccttgcccctctcctccacgatgcacttggggcctgtggtttccaaggccctgagtacctcttgccttgtttgctgcctctgccaaaacccggccaacttcaaggaccttggggacctctgtgggccctactaccctgaacactgcctccccaaaaagaagccaaaactcaaggagaaggtgcggccagaaggcacctgtgaggaggcctcgctgccgcttgagagaacactcaaaggtcccgagtgtgcagctgccgccactgccgggaagccccccaggcctgacggcccagctgacccggccaagcagggcccactgcgcaccagtgcccggggcctgtcccggaggctgcagagctgctactgctgtgatggccgggaggatgggggcgaggaggcagccccagccgacaagggtcgcaaacatgagtgcagcaaggaggctccggcagagcccggcggggaggcccaggagcactgggtgcatgaggcctgtgccgtgtggaccggcggcgtctacctggtggccgggaagctctttgggctgcaggaggccatgaaggtggccgtggacatgatgtgttccagctgccaagaagccggggccaccattgggtgctgccacaaaggatgcctccacacctaccactacccgtgtgccagcgatgcaggttgcatattcatcgaagagaacttttctttgaaatgtcccaaacataagaggctgccgtagtaatccaccccaacggccggaggagccgccggagcccgcctgcccgcccgccgccgaaggagaggagccgcctgcgcagcccccgggcctttgagctgctcccagcgctggtccagagccgatccttgatccgggtcccggatcgtggatccggccgcctagggctcagacttgcggccccgggttgggaggaaaacccgttccggagccgcctgctcccggaaccggacggcacagggcgttcttgcccaccccaggggccaggcttgcggagggggagcccgcggagcggccagactccccggggcgctcagcctccggcgagggtgggagacggctttgtcctggggacactttccctctggaatctcaagacgacgtggcacacattccacgtgggtgctgccgccaccccagtcggtcgtggcgtgcagctgggagccctgggcttgggggtgggggtcgaaacagtactggaagaggcggagggcggctcctagctccgtggactaggcgggggagaaaggaagcctttctgagagcgggctaggccggcactggagaggccggagcctttggaacaaaccgtgcggaacgcgtccaggggccttcccgcccagcctttgccagatctctcgtgcggttcgggcaaagccggggtagacctgggctatgctcagttaggggttgcgggatccccgagtgtgggcgggactgggacaccctttggcctctgtttgtcccctttccagtcctccaccccacccctggagcccagcctgggagcgcaaaacccaagaagcggccagaacgcacctccggctccggcggacgcgcgaccgttgtgcaccaccagggaccgccgcgcctactctgcacgggagcagggacagcgctagatttcgtgtacaaaacctgtgtacccctctatatatatgttacatagaatgtatatatgttgggaacatgctcgcttctcccgtgtgtcgccgccgtgcgtcgtgcgcccgcaacagagccccaaccgggcctttgccgggtaaggggctaccgcgacgccacttgtccacgcagccaccaccggcccgggccagtccctgccagtccgtccgcctgtccgtccgtgtcctcagctctgtccacgcttcgataggcctgacgcagcccccagcccagggccgccctagcaacttcctgtacatatgactgtaaaatggtaaacgtgtgtattatatctggcctcgttatatagtgtatatatatgtatacatatacatatatataatatatatgaagactgtaaatgttaagacgactagtgttcttattagtatattgcttcacactgaagattgtgtgtatcgagctgtttctaaaagatgtttattttccttaagagtaaaaaacagtcattgcattcagaaaaaaaaaaaaaaaaaagtcaataaagatacaacgattgttttggaaaa

SEQ ID NO: 175372 - DNA, 2928 bp, Homo sapiens
  Payload ID: 14445
  Gene Symbol: RAI1
  Gene Name: retinoic acid induced 1
  ENST ID: ENST00000395774
  CDS Start-End: 101-2928
ctgagatttagccgtgcgatgcccgcgcaggggcgggggccgcgggccaggggaggcgctcagagtccggagccgccgagcgagataaccagcccgagtcatgcagtcttttcgagaaaggtgtggtttccatggcaaacaacagaactaccagcagacctcgcaggaaacatcacgcctagagaattacaggcagccgagtcaggccgggctaagctgcgaccggcagcggctgctcgccaaggactattataacccgcagccttacccgagctatgagggtggcgctggcacgccctctggcactgcagccgcggtggccgccgacaagtaccaccgaggcagcaaggccctgcccacacagcaaggcctgcaggggaggccggctttccctggctacggcgtccaggacagcagcccctacccaggccgctatgctggtgaggagagccttcaggcttggggggccccacagccaccacccccacagccgcagccactacctgcaggggtggccaagtatgatgagaacttgatgaaaaagacagcagtgccccccagcaggcagtatgcagagcagggcgcccaggtgccctttcggactcactccctgcacgtccagcagccaccgccgccccagcagcccctggcataccccaagctccaaaggcagaagctgcagaacgacattgcctcccctctgcccttcccccagggtacccactttcctcagcattcccagtccttccccacctcctccacctactcctcctctgtccagggtggtgggcagggggcccactcctataagagttgcacagcaccgactgcccagccccatgacaggccgctgactgccagctccagcctggccccggggcagcgggtccagaatcttcatgcctaccagtcgggccgcctcagctatgaccagcagcagcagcagcagcagcagcagcagcagcagcagcaagcccttcagagccggcaccatgcccaggaaaccctccattaccaaaacctcgccaagtatcagcactacgggcagcaaggccagggctactgccagccggacgcagccgtccggaccccagagcagtactaccagaccttcagccccagctccagccactcacccgcccgctccgtgggccgctcaccttcctacagttccacaccgtcgccgctgatgccaaacctggagaactttccctacagccagcagccgctcagcaccggggccttccccgcagggatcactgaccacagccacttcatgcccctgctcaatccctccccaacggatgccaccagctctgtggacacccaggctggcaactgcaagccccttcagaaggacaagctccctgagaacctgctgtcggatctcagcctgcagagcctcacggcgctgacctcacaggtggagaacatctccaacaccgtccagcagctgctgctctccaaggctgctgtgccgcagaagaaaggtgtcaagaacctcgtgtccaggaccccagagcagcataaaagccagcactgcagccccgaagggagcggctactcagccgagcccgcaggcacaccgctgtcagagccgccgagcagcacgccacagtccacgcatgcggagccgcaggaggccgactacctgagcggctccgaggacccactggagcgcagcttcctctactgcaaccaggcccgtggcagccctgccagggtcaacagcaactcgaaggccaagcccgagtccgtgtccacctgttctgtgacctctcctgacgacatgtccaccaaatctgacgactccttccagagcctacacggcagtctgccgctcgacagcttctccaagttcgtggcgggtgagcgggactgtccgcggctgctgctcagcgccctggcacaggaggacctggcctccgagatcctggggctgcaggaagccatcggtgagaaggccgacaaagcttgggctgaagcacccagcctggtcaaggacagcagcaagccacccttctcgctggagaaccacagcgcctgcctggactctgtggccaagagtgcgtggccccggcctggggagccggaggccctgcccgactccttgcagctggacaagggcggcaatgccaaggacttcagcccagggctgtttgaagacccttccgtggccttcgctacgcctgaccccaaaaagacaactggtcctctctcctttggtaccaagcccacccttggggttcctgctccagaccccactacagcagcttttgactgtttcccggacacaaccgctgccagctcagcggacagcgccaacccctttgcctggccagaggaaaacctgggggatgcttgtcccaggtggggattgcaccctggcgagcttaccaagggcctggagcagggtgggaaggcctcagatggcatcagcaaaggggacacccatgaggcttcggcctgcctgggcttccaggaggaggacccccctggggagaaggtggcctcgttgcccggggacttcaagcaggaggaggtgggtggggtgaaggaggaggcaggtgggctgctgcagtgccccgaggtggccaaggctgaccggtggctggaggacagccggcactgctgttccaccgccgacttcggggacctcccactgctgccacccaccagcaggaaggaggacctggaagctgaggaggagtactcctccctatgtgagctcctgggcagccccgagcagaggcctggcatgcaggacccgctgtcacccaaggccccactcatctgcaccaaggaggaggtggaggaggtgctggactccaaggccggctggggctctccgtgccacctctcaggggagtccgtcatcctgctgggccctacagtgggcaccgagtcaaaggtccagagctggtttga

SEQ ID NO: 175373 - DNA, 570 bp, Homo sapiens
  Payload ID: 14445
  Gene Symbol: RAI1
  Gene Name: retinoic acid induced 1
  ENST ID: ENST00000471135
  CDS Start-End: 376-570
cgccccacagacggcggcgcagcccgccgcccttttcgaggccggccccccctctcacgcgccttgaaggcaagccggtatattcggggcccaggagcaaggaaaagtggccttttgcgtgacacagaagtggacacatcattctgatctcagggcaggctcagccccataactctggcaaaagctctcacaagcaaaagccttggagaggaggagaatgtatcaaggatctcatctggccaccgcgttctggaagaggcgagagggagagcgtgcgcgagaggagagagacggcgggggaaagggagacggcgagacgcgcagcgccggcgcccgggagacccaggaggagcccgcagataaccagcccgagtcatgcagtcttttcgagaaaggtgtggtttccatggcaaacaacagaactaccagcagacctcgcaggaaacatcacgcctagagaattacaggcagccgagtcaggccgggctaagctgcgaccggcagcggctgctcgccaaggactattataacccgcagccttacccgagctatgagggtggcgctggcacg

SEQ ID NO: 175374 - DNA, 489 bp, Homo sapiens
  Payload ID: 14445
  Gene Symbol: RAI1
  Gene Name: retinoic acid induced 1
  ENST ID: ENST00000583166
  CDS Start-End: 1-469
ggcagagcccggcggggaggcccaggagcactgggtgcatgaggcctgtgccgtgtggaccggcggcgtctacctggtggccgggaagctctttgggctgcaggaggccatgaaggtggccgtggacatgatgtgttccagctgccaagaagccggggccaccattgggtgctgccacaaaggatgcctccacacctaccactacccgtgtgccagcgatgcaggtacgagcccgcccaggaacaggagggcattggagcccatccaagcagtccagggggaccctccctgggcacagctccccaaacccaggccccatctcactcttcagtttccctcctctcttgccccagcaattcttttatccttctgtctgcctagacctctgctgggcaatgccagggacatggaaatgaggcattccccaggcacctgcttgaggagtgcccagagcagtgagggaagatagaagcataaattacaatgtgg

SEQ ID NO: 175375 - DNA, 5092 bp, Homo sapiens
  Payload ID: 14446
  Gene Symbol: RAI14
  Gene Name: retinoic acid induced 14
  Uniprot ID: Q9P0K7
  ENST ID: ENST00000265109
  CDS Start-End: 288-3230
atccaggtcggcgggggccggcgcccggcggccacgtggtggtgctgccgctgcccccgccccgccggcctagcccgggagctcggcgcccactgacccccgcagcgggggaggaggagggactgcggcgcaggaagccgagcaggaagcgagcccggcggccgcgttttcctggggaagcggcgggcggggtggagcagccagctgggtccggggagcgccgccgccgcctcgatggggtgttgaaaagtctcctctagagctttggaaggctgaatgcactaaacatgaagagcttgaaagcgaagttcaggaagagtgacaccaatgagtggaacaagaatgatgaccggctactgcaggccgtggagaatggagatgcggagaaggtggcctcactgctcggcaagaagggggccagtgccaccaaacacgacagtgagggcaagaccgctttccatcttgctgctgcaaaaggacacgtggaatgcctcagggtcatgattacacatggtgtggatgtgacagcccaagatactaccggacacagcgccttacatctcgcagccaagaacagccaccatgaatgcatcaggaagctgcttcagtctaaatgcccagccgaaagtgtcgacagctctgggaaaacagctttacattatgcagcggctcagggctgccttcaagctgtgcagattctctgcgaacacaagagccccataaacctcaaagatttggatgggaatataccgctgcttcttgctgtacaaaatggtcacagtgagatctgtcactttctcctggatcatggagcagatgtcaattccaggaacaaaagtggaagaactgctctcatgctggcctgtgagattggcagctctaacgctgtggaagccttaattaaaaagggtgcagacctaaaccttgtagattctcttggatacaatgccttacattattccaaactctcagaaaatgcaggaattcaaagccttctattatcaaaaatctctcaggatgctgatttaaagaccccaacaaaaccaaagcagcatgaccaagtctctaaaataagctcagaaagaagtggaactccaaaaaaacgcaaagctccaccacctcctatcagtcctacccagttgagtgatgtctcttccccaagatcaataacttcgactccactatcgggaaaggaatcggtattttttgctgaaccacccttcaaggctgagatcagttctatacgagaaaacaaagacagactaagtgacagtactacaggtgctgatagcttattggatataagttctgaagctgaccaacaagatcttctctctctattgcaagcaaaagttgcttcccttaccttacacaataaggagttacaagataaattacaggccaaatcacccaaggaggcggaagcagacctaagctttgactcataccattccacccaaactgacttgggcccatccctgggaaaacctggtgaaacctctcccccagactccaaatcatctccatctgtcttaatacattctttaggtaaatccactactgacaatgatgtcagaattcagcaactgcaagagattttgcaagatctacagaagagattagagagctctgaagcagagagaaaacagctacaggtcgaactccaatcccgaagggcagaactggtatgcttaaacaacactgagatttcagagaacagctctgacctcagccagaaacttaaagaaactcagagcaaatacgaggaggctatgaaagaagtccttagtgtgcagaagcagatgaaactcggtcttgtctcacctgaaagcatggataattattcacatttccacgagctgagggtcacggaagaggaaataaatgtgctaaagcaggatctgcagaatgcattagaagaaagtgaaagaaataaagagaaagtgagagagttagaggaaaaactggtagagagggagaaaggtacagtgattaagccacctgtggaagagtacgaggaaatgaaaagttcatattgctctgttattgagaatatgaataaggagaaagcatttttgtttgagaaataccaagaagcccaagaagaaatcatgaaattaaaagacacactaaaaagtcagatgacacaggaagccagtgatgaagctgaggacatgaaagaagccatgaataggatgatagatgaactcaataaacaggtgagcgagctgtcacagctgtacaaagaagcccaggctgagctggaggattacaggaagaggaaatctctagaggatgtcacagctgaatatatccataaagcagagcatgagaaactgatgcaattgacaaacgtgtccagggctaaagcagaagatgcactgtctgaaatgaagtctcagtattcaaaagtgttgaatgagttgacccagctcaaacaactggtggatgcacaaaaagagaactctgtctctatcacagaacatttgcaagtgataaccacgctgcggactgcagcaaaagagatggaagaaaaaataagcaatcttaaggaacaccttgcaagcaaggaagtggaagtagcaaagctggagaaacaactcttagaagagaaagctgctatgactgatgcaatggtacctcggtcttcctatgaaaaactccagtcatccttagagagtgaagtgagtgtgttggcatcgaaattaaaggaatctgtgaaagagaaagagaaggtccattcagaggttgtccagattagaagtgaggtctcacaggtgaaaagagaaaaggaaaatattcagactctcttgaaatccaaagagcaagaagtaaatgaacttctgcaaaaattccagcaagctcaggaagaacttgcagaaatgaaaagatacgctgagagctcttcaaaactggaggaagataaagataaaaagataaatgagatgtcgaaggaagtcaccaaattgaaggaggccttgaacagcctctcccagctctcctactcaacaagctcatccaaaaggcagagtcagcagctggaggcgctgcagcagcaagtcaaacagctccagaaccagctggcggaatgcaagaaacaacaccaggaggtcatatcagtttacagaatgcatcttctgtatgctgtgcagggccagatggatgaagatgtccagaaagtactgaagcaaatccttaccatgtgtaaaaaccagtctcaaaagaagtaaagtggattccttggcaggacactgccccttgtcatctgtctttgtgttagatccagagttgtcggcagccgctgccattgttctcattcgtggtatgcactgtggcctagcgtagcttcttccctttccaaaggtttctgaggacttctcccaggagaagactgcccgcctcagaactgcttagagacttcaaaccagcagaggtgaaagtccctgtcatcccttcagattccagagctgggatcagccatgcccagaggtctggtcctgatgctggcaggggggccccctcctccatccctgactggctgagtggctttatcaccaccgagtgatgtgctgaggcctcctgcagtgaatgctccttccattcctgtactcgggcagtgccattcagcacaggagagctctttttgcctttggctttcaattccaaaacatgatttaatttctaactaaattagtatggcactagttatgaagtatctgcttaaaacccttcatcatgatatcctgtggatttaaaaactctaattccatgttttcttcccatctgccttatatatctcatcaccctgcttatcaatattcagtttgatgagcactattaactaaaatatgaaacttaaaaacaaaagcaagttgtccttaaaagttctttttttaagtaaattgttgacatactgcaaattttctatgcaaacttgcctcctgctgttatctgtgaagctcaggaaatccaaacatttgtgtttcaacaagggacagtaaactgtgtgtttacagccaaaagaaatgcctcatagttcttaacctcaacttttgtagaagtatttttttctctgtaatatttttattggctcataaagatgttttcatatctgaactcctaaataagtgaaattacagtagattatattaacaaaatactttttaggtagccatgcttgagactttttaaaaatataactttttccttaaagttttcagctatagcaaaaggtagttatgtatgccagacctaatatgagctgccaccaacacccctagaactttcagccatggtgtcttcagaattgtagcgcatttctgaatctagcaaatcctccttttacccgttgaatgttttgaatgccctgactctaccagcgcccataaatgatctctagaaggactgttagtaccaatctgtttttcaactttgaagctaaaaaccctgatatggtaatattatggtgcatagcagaggtctcggaaaaaaaatatttctgttcactttactttcaggttaaaaatgtttctaacacgcttgcaacttcccttatggcattaatcttgttgagggagagagacagaatcctggactctccaaagtatttaactgaaagtagggcctgctctgacagggcccatgtcccacaaggctgcttggcctcagtgggtgcttggctgtgctggatgatatgttgatctgtattggataaggaccaatgacagcaaagcaaaaatggctttaaagcttggtgttacttttcttaagttgtttaattatagttaagcaatttcaaaaatgctccaaagaaatgtgaaaggaccttttgtcacagcacttcagaaaatacacaacagccccttctgcccccgcacagaaatgctgcagagtatataaaacttgagacatttttgtaggatgcctgacgaggtgtagccttttatcttgtttccggatgcatatttattacgagtactctggttaaatattgaaaagttatatgctgtagtttttagtattttgtctttgtaatttacagaagttattggagaaaataaacttgtttcattttgcatttctggtgttgatt

SEQ ID NO: 175376 - DNA, 5064 bp, Homo sapiens
  Payload ID: 14446
  Gene Symbol: RAI14
  Gene Name: retinoic acid induced 14
  Uniprot ID: Q9P0K7
  ENST ID: ENST00000428746
  CDS Start-End: 276-3218
gatggggtgagtgcgcggcacggagttgggaggctcccggcgcggggtcccgggctcgtgtccccgcctttgtgtctggagctcgggcgcgggaggcgctggggacggcgcccgggcggagcggctgagcgggctgcagccggggtcccgccacctctccctggtccaccgccggcagcccactgtctgcggagagcagatctggggacaagaggaaggagaggaaggtgttgaaaagtctcctctagagctttggaaggctgaatgcactaaacatgaagagcttgaaagcgaagttcaggaagagtgacaccaatgagtggaacaagaatgatgaccggctactgcaggccgtggagaatggagatgcggagaaggtggcctcactgctcggcaagaagggggccagtgccaccaaacacgacagtgagggcaagaccgctttccatcttgctgctgcaaaaggacacgtggaatgcctcagggtcatgattacacatggtgtggatgtgacagcccaagatactaccggacacagcgccttacatctcgcagccaagaacagccaccatgaatgcatcaggaagctgcttcagtctaaatgcccagccgaaagtgtcgacagctctgggaaaacagctttacattatgcagcggctcagggctgccttcaagctgtgcagattctctgcgaacacaagagccccataaacctcaaagatttggatgggaatataccgctgcttcttgctgtacaaaatggtcacagtgagatctgtcactttctcctggatcatggagcagatgtcaattccaggaacaaaagtggaagaactgctctcatgctggcctgtgagattggcagctctaacgctgtggaagccttaattaaaaagggtgcagacctaaaccttgtagattctcttggatacaatgccttacattattccaaactctcagaaaatgcaggaattcaaagccttctattatcaaaaatctctcaggatgctgatttaaagaccccaacaaaaccaaagcagcatgaccaagtctctaaaataagctcagaaagaagtggaactccaaaaaaacgcaaagctccaccacctcctatcagtcctacccagttgagtgatgtctcttccccaagatcaataacttcgactccactatcgggaaaggaatcggtattttttgctgaaccacccttcaaggctgagatcagttctatacgagaaaacaaagacagactaagtgacagtactacaggtgctgatagcttattggatataagttctgaagctgaccaacaagatcttctctctctattgcaagcaaaagttgcttcccttaccttacacaataaggagttacaagataaattacaggccaaatcacccaaggaggcggaagcagacctaagctttgactcataccattccacccaaactgacttgggcccatccctgggaaaacctggtgaaacctctcccccagactccaaatcatctccatctgtcttaatacattctttaggtaaatccactactgacaatgatgtcagaattcagcaactgcaagagattttgcaagatctacagaagagattagagagctctgaagcagagagaaaacagctacaggtcgaactccaatcccgaagggcagaactggtatgcttaaacaacactgagatttcagagaacagctctgacctcagccagaaacttaaagaaactcagagcaaatacgaggaggctatgaaagaagtccttagtgtgcagaagcagatgaaactcggtcttgtctcacctgaaagcatggataattattcacatttccacgagctgagggtcacggaagaggaaataaatgtgctaaagcaggatctgcagaatgcattagaagaaagtgaaagaaataaagagaaagtgagagagttagaggaaaaactggtagagagggagaaaggtacagtgattaagccacctgtggaagagtacgaggaaatgaaaagttcatattgctctgttattgagaatatgaataaggagaaagcatttttgtttgagaaataccaagaagcccaagaagaaatcatgaaattaaaagacacactaaaaagtcagatgacacaggaagccagtgatgaagctgaggacatgaaagaagccatgaataggatgatagatgaactcaataaacaggtgagcgagctgtcacagctgtacaaagaagcccaggctgagctggaggattacaggaagaggaaatctctagaggatgtcacagctgaatatatccataaagcagagcatgagaaactgatgcaattgacaaacgtgtccagggctaaagcagaagatgcactgtctgaaatgaagtctcagtattcaaaagtgttgaatgagttgacccagctcaaacaactggtggatgcacaaaaagagaactctgtctctatcacagaacatttgcaagtgataaccacgctgcggactgcagcaaaagagatggaagaaaaaataagcaatcttaaggaacaccttgcaagcaaggaagtggaagtagcaaagctggagaaacaactcttagaagagaaagctgctatgactgatgcaatggtacctcggtcttcctatgaaaaactccagtcatccttagagagtgaagtgagtgtgttggcatcgaaattaaaggaatctgtgaaagagaaagagaaggtccattcagaggttgtccagattagaagtgaggtctcacaggtgaaaagagaaaaggaaaatattcagactctcttgaaatccaaagagcaagaagtaaatgaacttctgcaaaaattccagcaagctcaggaagaacttgcagaaatgaaaagatacgctgagagctcttcaaaactggaggaagataaagataaaaagataaatgagatgtcgaaggaagtcaccaaattgaaggaggccttgaacagcctctcccagctctcctactcaacaagctcatccaaaaggcagagtcagcagctggaggcgctgcagcagcaagtcaaacagctccagaaccagctggcggaatgcaagaaacaacaccaggaggtcatatcagtttacagaatgcatcttctgtatgctgtgcagggccagatggatgaagatgtccagaaagtactgaagcaaatccttaccatgtgtaaaaaccagtctcaaaagaagtaaagtggattccttggcaggacactgccccttgtcatctgtctttgtgttagatccagagttgtcggcagccgctgccattgttctcattcgtggtatgcactgtggcctagcgtagcttcttccctttccaaaggtttctgaggacttctcccaggagaagactgcccgcctcagaactgcttagagacttcaaaccagcagaggtgaaagtccctgtcatcccttcagattccagagctgggatcagccatgcccagaggtctggtcctgatgctggcaggggggccccctcctccatccctgactggctgagtggctttatcaccaccgagtgatgtgctgaggcctcctgcagtgaatgctccttccattcctgtactcgggcagtgccattcagcacaggagagctctttttgcctttggctttcaattccaaaacatgatttaatttctaactaaattagtatggcactagttatgaagtatctgcttaaaacccttcatcatgatatcctgtggatttaaaaactctaattccatgttttcttcccatctgccttatatatctcatcaccctgcttatcaatattcagtttgatgagcactattaactaaaatatgaaacttaaaaacaaaagcaagttgtccttaaaagttctttttttaagtaaattgttgacatactgcaaattttctatgcaaacttgcctcctgctgttatctgtgaagctcaggaaatccaaacatttgtgtttcaacaagggacagtaaactgtgtgtttacagccaaaagaaatgcctcatagttcttaacctcaacttttgtagaagtatttttttctctgtaatatttttattggctcataaagatgttttcatatctgaactcctaaataagtgaaattacagtagattatattaacaaaatactttttaggtagccatgcttgagactttttaaaaatataactttttccttaaagttttcagctatagcaaaaggtagttatgtatgccagacctaatatgagctgccaccaacacccctagaactttcagccatggtgtcttcagaattgtagcgcatttctgaatctagcaaatcctccttttacccgttgaatgttttgaatgccctgactctaccagcgcccataaatgatctctagaaggactgttagtaccaatctgtttttcaactttgaagctaaaaaccctgatatggtaatattatggtgcatagcagaggtctcggaaaaaaaatatttctgttcactttactttcaggttaaaaatgtttctaacacgcttgcaacttcccttatggcattaatcttgttgagggagagagacagaatcctggactctccaaagtatttaactgaaagtagggcctgctctgacagggcccatgtcccacaaggctgcttggcctcagtgggtgcttggctgtgctggatgatatgttgatctgtattggataaggaccaatgacagcaaagcaaaaatggctttaaagcttggtgttacttttcttaagttgtttaattatagttaagcaatttcaaaaatgctccaaagaaatgtgaaaggaccttttgtcacagcacttcagaaaatacacaacagccccttctgcccccgcacagaaatgctgcagagtatataaaacttgagacatttttgtaggatgcctgacgaggtgtagccttttatcttgtttccggatgcatatttattacgagtactctggttaaatattgaaaagttatatgctgtagtttttagtattttgtctttgtaatttacagaagttattggagaaaataaacttgtttcattttgc

SEQ ID NO: 175377 - DNA, 542 bp, Homo sapiens
  Payload ID: 14446
  Gene Symbol: RAI14
  Gene Name: retinoic acid induced 14
  ENST ID: ENST00000514873
  CDS Start-End: 164-542
gagatgcaccctggagtctgcgccgggtcccacctgtttcgccccgcgcggcgcctcgctgcccccgcgtcggtgctgctgagcccaatccgcctcccggctgaacttggaggaggtgttgaaaagtctcctctagagctttggaaggctgaatgcactaaacatgaagagcttgaaagcgaagttcaggaagagtgacaccaatgagtggaacaagaatgatgaccggctactgcaggccgtggagaatggagatgcggagaaggtggcctcactgctcggcaagaagggggccagtgccaccaaacacgacagtgagggcaagaccgctttccatcttgctgctgcaaaaggacacgtggaatgcctcagggtcatgattacacatggtgtggatgtgacagcccaagatactaccggacacagcgccttacatctcgcagccaagaacagccaccatgaatgcatcaggaagctgcttcagtctaaatgcccagccgaaagtgtcgacagctctgggaaaacagctttacattatgcag

SEQ ID NO: 175378 - DNA, 548 bp, Homo sapiens
  Payload ID: 14446
  Gene Symbol: RAI14
  Gene Name: retinoic acid induced 14
  ENST ID: ENST00000513974
  CDS Start-End: 170-548
agcagccagctgggtccggggagcgccgccgccgcctcgatggggtaacctctaatgtgaagttagcgcacacagttctcaagcatgtttggaactacactgtatccacaaaaaaatacatgtgttgaaaagtctcctctagagctttggaaggctgaatgcactaaacatgaagagcttgaaagcgaagttcaggaagagtgacaccaatgagtggaacaagaatgatgaccggctactgcaggccgtggagaatggagatgcggagaaggtggcctcactgctcggcaagaagggggccagtgccaccaaacacgacagtgagggcaagaccgctttccatcttgctgctgcaaaaggacacgtggaatgcctcagggtcatgattacacatggtgtggatgtgacagcccaagatactaccggacacagcgccttacatctcgcagccaagaacagccaccatgaatgcatcaggaagctgcttcagtctaaatgcccagccgaaagtgtcgacagctctgggaaaacagctttacattatgcag

SEQ ID NO: 175379 - DNA, 542 bp, Homo sapiens
  Payload ID: 14446
  Gene Symbol: RAI14
  Gene Name: retinoic acid induced 14
  ENST ID: ENST00000512305
  CDS Start-End: 222-542
aaaggggccatggagaggctgcagtcacaatgaggcctccagattcatgtcatcaaagtgcttcatgatgactggattttcacaccatttatccaagggccctagtcaatggcagcagcaagaatgaaagtagacacattggaagctagagagtcactgggtgacttttggaggtgttgaaaagtctcctctagagctttggaaggctgaatgcactaaacatgaagagcttgaaagcgaagttcaggaagagtgacaccaatgagtggaacaagaatgatgaccggctactgcaggccgtggagaatggagatgcggagaaggtggcctcactgctcggcaagaagggggccagtgccaccaaacacgacagtgagggcaagaccgctttccatcttgctgctgcaaaaggacacgtggaatgcctcagggtcatgattacacatggtgtggatgtgacagcccaagatactaccggacacagcgccttacatctcgcagccaagaacagccaccatgaatgcatcaggaagctgcttcag

SEQ ID NO: 175380 - DNA, 2941 bp, Homo sapiens
  Payload ID: 14446
  Gene Symbol: RAI14
  Gene Name: retinoic acid induced 14
  Uniprot ID: Q9P0K7
  ENST ID: ENST00000512629
  CDS Start-End: 86-2941
agctgggtccggggagcgccgccgccgcctcgatggggtgttgaaaagtctcctctagagctttggaaggctgaatgcactaaacatgaagagcttgaaagcgaagttcaggaagagtgacaccaatgagtggaacaagaatgatgaccggctactgcaggccgtggagaatggagatgcggagaaggtggcctcactgctcggcaagaagggggccagtgccaccaaacacgacagtgagggcaagaccgctttccatcttgctgctgcaaaaggacacgtggaatgcctcagggtcatgattacacatggtgtggatgtgacagcccaagatactaccggacacagcgccttacatctcgcagccaagaacagccaccatgaatgcatcaggaagctgcttcagtctaaatgcccagccgaaagtgtcgacagctctgggaaaacagctttacattatgcagcggctcagggctgccttcaagctgtgcagattctctgcgaacacaagagccccataaacctcaaagatttggatgggaatataccgctgcttcttgctgtacaaaatggtcacagtgagatctgtcactttctcctggatcatggagcagatgtcaattccaggaacaaaagtggaagaactgctctcatgctggcctgtgagattggcagctctaacgctgtggaagccttaattaaaaagggtgcagacctaaaccttgtagattctcttggatacaatgccttacattattccaaactctcagaaaatgcaggaattcaaagccttctattatcaaaaatctctcaggatgctgatttaaagaccccaacaaaaccaaagcagttgagtgatgtctcttccccaagatcaataacttcgactccactatcgggaaaggaatcggtattttttgctgaaccacccttcaaggctgagatcagttctatacgagaaaacaaagacagactaagtgacagtactacaggtgctgatagcttattggatataagttctgaagctgaccaacaagatcttctctctctattgcaagcaaaagttgcttcccttaccttacacaataaggagttacaagataaattacaggccaaatcacccaaggaggcggaagcagacctaagctttgactcataccattccacccaaactgacttgggcccatccctgggaaaacctggtgaaacctctcccccagactccaaatcatctccatctgtcttaatacattctttaggtaaatccactactgacaatgatgtcagaattcagcaactgcaagagattttgcaagatctacagaagagattagagagctctgaagcagagagaaaacagctacaggtcgaactccaatcccgaagggcagaactggtatgcttaaacaacactgagatttcagagaacagctctgacctcagccagaaacttaaagaaactcagagcaaatacgaggaggctatgaaagaagtccttagtgtgcagaagcagatgaaactcggtcttgtctcacctgaaagcatggataattattcacatttccacgagctgagggtcacggaagaggaaataaatgtgctaaagcaggatctgcagaatgcattagaagaaagtgaaagaaataaagagaaagtgagagagttagaggaaaaactggtagagagggagaaaggtacagtgattaagccacctgtggaagagtacgaggaaatgaaaagttcatattgctctgttattgagaatatgaataaggagaaagcatttttgtttgagaaataccaagaagcccaagaagaaatcatgaaattaaaagacacactaaaaagtcagatgacacaggaagccagtgatgaagctgaggacatgaaagaagccatgaataggatgatagatgaactcaataaacaggtgagcgagctgtcacagctgtacaaagaagcccaggctgagctggaggattacaggaagaggaaatctctagaggatgtcacagctgaatatatccataaagcagagcatgagaaactgatgcaattgacaaacgtgtccagggctaaagcagaagatgcactgtctgaaatgaagtctcagtattcaaaagtgttgaatgagttgacccagctcaaacaactggtggatgcacaaaaagagaactctgtctctatcacagaacatttgcaagtgataaccacgctgcggactgcagcaaaagagatggaagaaaaaataagcaatcttaaggaacaccttgcaagcaaggaagtggaagtagcaaagctggagaaacaactcttagaagagaaagctgctatgactgatgcaatggtacctcggtcttcctatgaaaaactccagtcatccttagagagtgaagtgagtgtgttggcatcgaaattaaaggaatctgtgaaagagaaagagaaggtccattcagaggttgtccagattagaagtgaggtctcacaggtgaaaagagaaaaggaaaatattcagactctcttgaaatccaaagagcaagaagtaaatgaacttctgcaaaaattccagcaagctcaggaagaacttgcagaaatgaaaagatacgctgagagctcttcaaaactggaggaagataaagataaaaagataaatgagatgtcgaaggaagtcaccaaattgaaggaggccttgaacagcctctcccagctctcctactcaacaagctcatccaaaaggcagagtcagcagctggaggcgctgcagcagcaagtcaaacagctccagaaccagctggcggaatgcaagaaacaacaccaggaggtcatatcagtttacagaatgcatcttctgtatgctgtgcagggccagatggatgaagatgtccagaaagtactgaagcaaatccttaccatgtgtaaaaaccagtctcaaaagaagtaa

SEQ ID NO: 175381 - DNA, 630 bp, Homo sapiens
  Payload ID: 14446
  Gene Symbol: RAI14
  Gene Name: retinoic acid induced 14
  ENST ID: ENST00000504052
  CDS Start-End: 289-630
aagattgaaaggggccatggagaggctgcagtcacaatgaggcctccagattcatgtcatcaaagtgcttcatgatgactggattttcacaccatttatccaagggccctagtcaatggcagcagcaagaatgaaagtagacacattggaagctagagagtcactgggtgacttttggaggtagcaacaagctcatgaagaaggcattcagtggcttgcactccccacccatcctctcaagtgttgaaaagtctcctctagagctttggaaggctgaatgcactaaacatgaagagcttgaaagcgaagttcaggaagagtgacaccaatgagtggaacaagaatgatgaccggctactgcaggccgtggagaatggagatgcggagaaggtggcctcactgctcggcaagaagggggccagtgccaccaaacacgacagtgagggcaagaccgctttccatcttgctgctgcaaaaggacacgtggaatgcctcagggtcatgattacacatggtgtggatgtgacagcccaagatactaccggacacagcgccttacatctcgcagccaagaacagccaccatgaatgcatcaggaagctgcttcagtctaaatgcccagccgaaagt

SEQ ID NO: 175382 - DNA, 3339 bp, Homo sapiens
  Payload ID: 14446
  Gene Symbol: RAI14
  Gene Name: retinoic acid induced 14
  Uniprot ID: Q9P0K7
  ENST ID: ENST00000503673
  CDS Start-End: 357-3299
actcccgctgaggctgggaagattgaaaggggccatggagaggctgcagtcacaatgaggcctccagattcatgtcatcaaagtgcttcatgatgactggattttcacaccatttatccaagggccctagtcaatggcagcagcaagaatgaaagtagacacattggaagctagagagtcactgggtgacttttggaggtagcaacaagctcatgaagaaggcattcagtggcttgcactccccacccatcctctcaactacatgcgaagttttcacatcttgtacatttccaaatttaatgaaaaaggtgttgaaaagtctcctctagagctttggaaggctgaatgcactaaacatgaagagcttgaaagcgaagttcaggaagagtgacaccaatgagtggaacaagaatgatgaccggctactgcaggccgtggagaatggagatgcggagaaggtggcctcactgctcggcaagaagggggccagtgccaccaaacacgacagtgagggcaagaccgctttccatcttgctgctgcaaaaggacacgtggaatgcctcagggtcatgattacacatggtgtggatgtgacagcccaagatactaccggacacagcgccttacatctcgcagccaagaacagccaccatgaatgcatcaggaagctgcttcagtctaaatgcccagccgaaagtgtcgacagctctgggaaaacagctttacattatgcagcggctcagggctgccttcaagctgtgcagattctctgcgaacacaagagccccataaacctcaaagatttggatgggaatataccgctgcttcttgctgtacaaaatggtcacagtgagatctgtcactttctcctggatcatggagcagatgtcaattccaggaacaaaagtggaagaactgctctcatgctggcctgtgagattggcagctctaacgctgtggaagccttaattaaaaagggtgcagacctaaaccttgtagattctcttggatacaatgccttacattattccaaactctcagaaaatgcaggaattcaaagccttctattatcaaaaatctctcaggatgctgatttaaagaccccaacaaaaccaaagcagcatgaccaagtctctaaaataagctcagaaagaagtggaactccaaaaaaacgcaaagctccaccacctcctatcagtcctacccagttgagtgatgtctcttccccaagatcaataacttcgactccactatcgggaaaggaatcggtattttttgctgaaccacccttcaaggctgagatcagttctatacgagaaaacaaagacagactaagtgacagtactacaggtgctgatagcttattggatataagttctgaagctgaccaacaagatcttctctctctattgcaagcaaaagttgcttcccttaccttacacaataaggagttacaagataaattacaggccaaatcacccaaggaggcggaagcagacctaagctttgactcataccattccacccaaactgacttgggcccatccctgggaaaacctggtgaaacctctcccccagactccaaatcatctccatctgtcttaatacattctttaggtaaatccactactgacaatgatgtcagaattcagcaactgcaagagattttgcaagatctacagaagagattagagagctctgaagcagagagaaaacagctacaggtcgaactccaatcccgaagggcagaactggtatgcttaaacaacactgagatttcagagaacagctctgacctcagccagaaacttaaagaaactcagagcaaatacgaggaggctatgaaagaagtccttagtgtgcagaagcagatgaaactcggtcttgtctcacctgaaagcatggataattattcacatttccacgagctgagggtcacggaagaggaaataaatgtgctaaagcaggatctgcagaatgcattagaagaaagtgaaagaaataaagagaaagtgagagagttagaggaaaaactggtagagagggagaaaggtacagtgattaagccacctgtggaagagtacgaggaaatgaaaagttcatattgctctgttattgagaatatgaataaggagaaagcatttttgtttgagaaataccaagaagcccaagaagaaatcatgaaattaaaagacacactaaaaagtcagatgacacaggaagccagtgatgaagctgaggacatgaaagaagccatgaataggatgatagatgaactcaataaacaggtgagcgagctgtcacagctgtacaaagaagcccaggctgagctggaggattacaggaagaggaaatctctagaggatgtcacagctgaatatatccataaagcagagcatgagaaactgatgcaattgacaaacgtgtccagggctaaagcagaagatgcactgtctgaaatgaagtctcagtattcaaaagtgttgaatgagttgacccagctcaaacaactggtggatgcacaaaaagagaactctgtctctatcacagaacatttgcaagtgataaccacgctgcggactgcagcaaaagagatggaagaaaaaataagcaatcttaaggaacaccttgcaagcaaggaagtggaagtagcaaagctggagaaacaactcttagaagagaaagctgctatgactgatgcaatggtacctcggtcttcctatgaaaaactccagtcatccttagagagtgaagtgagtgtgttggcatcgaaattaaaggaatctgtgaaagagaaagagaaggtccattcagaggttgtccagattagaagtgaggtctcacaggtgaaaagagaaaaggaaaatattcagactctcttgaaatccaaagagcaagaagtaaatgaacttctgcaaaaattccagcaagctcaggaagaacttgcagaaatgaaaagatacgctgagagctcttcaaaactggaggaagataaagataaaaagataaatgagatgtcgaaggaagtcaccaaattgaaggaggccttgaacagcctctcccagctctcctactcaacaagctcatccaaaaggcagagtcagcagctggaggcgctgcagcagcaagtcaaacagctccagaaccagctggcggaatgcaagaaacaacaccaggaggtcatatcagtttacagaatgcatcttctgtatgctgtgcagggccagatggatgaagatgtccagaaagtactgaagcaaatccttaccatgtgtaaaaaccagtctcaaaagaagtaaagtggattccttggcaggacactgccccttgtcatctgtc

SEQ ID NO: 175383 - DNA, 3091 bp, Homo sapiens
  Payload ID: 14446
  Gene Symbol: RAI14
  Gene Name: retinoic acid induced 14
  Uniprot ID: Q9P0K7
  ENST ID: ENST00000506376
  CDS Start-End: 153-3071
gggagaaaaacatagcagaggggttgtacacgataatatttttttaaaaggtcaccccataaacccttctatgatcccagtcttgtattagctgcattccagatactttgagcagagttgtggagtgggagaaattaatggaagggaattagatggaagccaagaccaatgagtggaacaagaatgatgaccggctactgcaggccgtggagaatggagatgcggagaaggtggcctcactgctcggcaagaagggggccagtgccaccaaacacgacagtgagggcaagaccgctttccatcttgctgctgcaaaaggacacgtggaatgcctcagggtcatgattacacatggtgtggatgtgacagcccaagatactaccggacacagcgccttacatctcgcagccaagaacagccaccatgaatgcatcaggaagctgcttcagtctaaatgcccagccgaaagtgtcgacagctctgggaaaacagctttacattatgcagcggctcagggctgccttcaagctgtgcagattctctgcgaacacaagagccccataaacctcaaagatttggatgggaatataccgctgcttcttgctgtacaaaatggtcacagtgagatctgtcactttctcctggatcatggagcagatgtcaattccaggaacaaaagtggaagaactgctctcatgctggcctgtgagattggcagctctaacgctgtggaagccttaattaaaaagggtgcagacctaaaccttgtagattctcttggatacaatgccttacattattccaaactctcagaaaatgcaggaattcaaagccttctattatcaaaaatctctcaggatgctgatttaaagaccccaacaaaaccaaagcagcatgaccaagtctctaaaataagctcagaaagaagtggaactccaaaaaaacgcaaagctccaccacctcctatcagtcctacccagttgagtgatgtctcttccccaagatcaataacttcgactccactatcgggaaaggaatcggtattttttgctgaaccacccttcaaggctgagatcagttctatacgagaaaacaaagacagactaagtgacagtactacaggtgctgatagcttattggatataagttctgaagctgaccaacaagatcttctctctctattgcaagcaaaagttgcttcccttaccttacacaataaggagttacaagataaattacaggccaaatcacccaaggaggcggaagcagacctaagctttgactcataccattccacccaaactgacttgggcccatccctgggaaaacctggtgaaacctctcccccagactccaaatcatctccatctgtcttaatacattctttaggtaaatccactactgacaatgatgtcagaattcagcaactgcaagagattttgcaagatctacagaagagattagagagctctgaagcagagagaaaacagctacaggtcgaactccaatcccgaagggcagaactggtatgcttaaacaacactgagatttcagagaacagctctgacctcagccagaaacttaaagaaactcagagcaaatacgaggaggctatgaaagaagtccttagtgtgcagaagcagatgaaactcggtcttgtctcacctgaaagcatggataattattcacatttccacgagctgagggtcacggaagaggaaataaatgtgctaaagcaggatctgcagaatgcattagaagaaagtgaaagaaataaagagaaagtgagagagttagaggaaaaactggtagagagggagaaaggtacagtgattaagccacctgtggaagagtacgaggaaatgaaaagttcatattgctctgttattgagaatatgaataaggagaaagcatttttgtttgagaaataccaagaagcccaagaagaaatcatgaaattaaaagacacactaaaaagtcagatgacacaggaagccagtgatgaagctgaggacatgaaagaagccatgaataggatgatagatgaactcaataaacaggtgagcgagctgtcacagctgtacaaagaagcccaggctgagctggaggattacaggaagaggaaatctctagaggatgtcacagctgaatatatccataaagcagagcatgagaaactgatgcaattgacaaacgtgtccagggctaaagcagaagatgcactgtctgaaatgaagtctcagtattcaaaagtgttgaatgagttgacccagctcaaacaactggtggatgcacaaaaagagaactctgtctctatcacagaacatttgcaagtgataaccacgctgcggactgcagcaaaagagatggaagaaaaaataagcaatcttaaggaacaccttgcaagcaaggaagtggaagtagcaaagctggagaaacaactcttagaagagaaagctgctatgactgatgcaatggtacctcggtcttcctatgaaaaactccagtcatccttagagagtgaagtgagtgtgttggcatcgaaattaaaggaatctgtgaaagagaaagagaaggtccattcagaggttgtccagattagaagtgaggtctcacaggtgaaaagagaaaaggaaaatattcagactctcttgaaatccaaagagcaagaagtaaatgaacttctgcaaaaattccagcaagctcaggaagaacttgcagaaatgaaaagatacgctgagagctcttcaaaactggaggaagataaagataaaaagataaatgagatgtcgaaggaagtcaccaaattgaaggaggccttgaacagcctctcccagctctcctactcaacaagctcatccaaaaggcagagtcagcagctggaggcgctgcagcagcaagtcaaacagctccagaaccagctggcggaatgcaagaaacaacaccaggaggtcatatcagtttacagaatgcatcttctgtatgctgtgcagggccagatggatgaagatgtccagaaagtactgaagcaaatccttaccatgtgtaaaaaccagtctcaaaagaagtaaagtggattccttggcaggac

SEQ ID NO: 175384 - DNA, 1387 bp, Homo sapiens
  Payload ID: 14446
  Gene Symbol: RAI14
  Gene Name: retinoic acid induced 14
  ENST ID: ENST00000508777
  CDS Start-End: 308-508
atgcatctgtcactcccgctgaggctgggaagattgaaaggggccatggagaggctgcagtcacaatgaggcctccagattcatgtcatcaaagtgcttcatgatgactggattttcacaccatttatccaagggccctagtcaatggcagcagcaagaatgaaagtagacacattggaagctagagagtcactgggtgacttttggagctacatgcgaagttttcacatcttgtacatttccaaatttaatgaaaaaggtgttgaaaagtctcctctagagctttggaaggctgaatgcactaaacatgaagagcttgaaagcgaagttcaggaagagtgacaccaatgagtggaacaagaatgatgaccggctactgcaggccgtggagaatggagatgcggagaaggtggcctcactgctcggcaagaagggggccagtgccaccaaacacgacatttccatcttgctgctgcaaaaggacacgtggaatgcctcagggtcatgattacacatggtgtggatgtgacagcccaagatactaccggacacagcgccttacatctcgcagccaagaacagccaccatgaatgcatcaggaagctgcttcagtctaaatgcccagccgaaagtgtcgacagctctgggaaaacagctttacattatgcagcggctcagggctgccttcaagctgtgcagattctctgcgaacacaagagccccataaacctcaaagatttggatgggaatataccgctgcttcttgctgtacaaaatggtcacagtgagatctgtcactttctcctggatcatggagcagatgtcaattccaggaacaaaagtggaagaactgctctcatgctggcctgtgagattggcagctctaacgctgtggaagccttaattaaaaagggtgcagacctaaaccttgtagattctcttggatacaatgccttacattattccaaactctcagaaaatgcaggaattcaaagccttctattatcaaaaatctctcaggatgctgatttaaagaccccaacaaaaccaaagcagcatgaccaagtctctaaaataagctcagaaagaagtggaactccaaaaaaacgcaaagctccaccacctcctatcagtcctacccagttgagtgatgtctcttccccaagatcaataacttcgactccactatcgggaaaggaatcggtattttttgctgaaccacccttcaaggctgagatcagttctatacgagaaaacaaagacagactaagtgacagtactacaggtgctgatagcttattggatataagttctgaagctgaccaacaagatcttctctctctattgcaagcaaaagttgcttcccttaccttacacaataaggagt

SEQ ID NO: 175385 - DNA, 575 bp, Homo sapiens
  Payload ID: 14446
  Gene Symbol: RAI14
  Gene Name: retinoic acid induced 14
  ENST ID: ENST00000514036
  CDS Start-End: 263-575
atggagaggctgcagtcacaatgaggcctccagattcatgtcatcaaagtgcttcatgatgactggattttcacaccatttatccaagggccctagtcaatggcagcagcaagaatgaaagtagacacattggaagctagagagtcactgggtgacttttggagctacatgcgaagttttcacatcttgtacatttccaaatttaatgaaaaaggtgttgaaaagtctcctctagagctttggaaggctgaatgcactaaacatgaagagcttgaaagcgaagttcaggaagagtgacaccaatgagtggaacaagaatgatgaccggctactgcaggccgtggagaatggagatgcggagaaggtggcctcactgctcggcaagaagggggccagtgccaccaaacacgacagtgagggcaagaccgctttccatcttgctgctgcaaaaggacacgtggaatgcctcagggtcatgattacacatggtgtggatgtgacagcccaagatactaccggacacagcgccttacatctcgcagccaagaacagccaccatgaatgcatcaggaagc

SEQ ID NO: 175386 - DNA, 557 bp, Homo sapiens
  Payload ID: 14446
  Gene Symbol: RAI14
  Gene Name: retinoic acid induced 14
  ENST ID: ENST00000510319
  CDS Start-End: 124-294
cgttttcctggggaagcggcgggcggggtggagcagccagctgggtccggggagcgccgccgccgcctcgatggggtgttgaaaagtctcctctagagctttggaaggctgaatgcactaaacatgaagagcttgaaagcgaagttcaggaagagtgacaccaatgagtggaacaagaatgatgaccggctactgcaggccgtggagaatggagatgcggagaaggtggcctcactgctcggcaagaagggggccagtgccaccaaacacgacagtgagggcaagaccgcgtaagctgaaacactgtttccatcttgctgctgcaaaaggacacgtggaatgcctcagggtcatgattacacatggtgtggatgtgacagcccaagatactaccggacacagcgccttacatctcgcagccaagaacagccaccatgaatgcatcaggaagctgcttcagtctaaatgcccagccgaaagtgtcgacagctctgggaaaacagctttacattatgcagcggctcagggctgccttcaagctgtgcagattctctgcg

SEQ ID NO: 175387 - DNA, 660 bp, Homo sapiens
  Payload ID: 14446
  Gene Symbol: RAI14
  Gene Name: retinoic acid induced 14
  ENST ID: ENST00000514527
  CDS Start-End: 243-660
cgcgttttcctggggaagcggcgggcggggtggagcagccagctgggtccggggagcgccgccgccgcctcgatggggatctcgctctgtcccttaggctggagtgcagtggtgcaatcttagctcaccgcagccttgacctcctgggctcaagcagtcctcccaccttagcctccctggagctggcactacaggtgttgaaaagtctcctctagagctttggaaggctgaatgcactaaacatgaagagcttgaaagcgaagttcaggaagagtgacaccaatgagtggaacaagaatgatgaccggctactgcaggccgtggagaatggagatgcggagaaggtggcctcactgctcggcaagaagggggccagtgccaccaaacacgacagtgagggcaagaccgctttccatcttgctgctgcaaaaggacacgtggaatgcctcagggtcatgattacacatggtgtggatgtgacagcccaagatactaccggacacagcgccttacatctcgcagccaagaacagccaccatgaatgcatcaggaagctgcttcagtctaaatgcccagccgaaagtgtcgacagctctgggaaaacagctttacattatgcagcggctcagggctgccttcaagctgtgcagattctctgcg

SEQ ID NO: 175388 - DNA, 554 bp, Homo sapiens
  Payload ID: 14446
  Gene Symbol: RAI14
  Gene Name: retinoic acid induced 14
  ENST ID: ENST00000512625
  CDS Start-End: 105-554
aaggatgcagcgtttcagttaagaggaatagatgaagagatctattgtacaacatggtgttgaaaagtctcctctagagctttggaaggctgaatgcactaaacatgaagagcttgaaagcgaagttcaggaagagtgacaccaatgagtggaacaagaatgatgaccggctactgcaggccgtggagaatggagatgcggagaaggtggcctcactgctcggcaagaagggggccagtgccaccaaacacgacagtgagggcaagaccgctttccatcttgctgctgcaaaaggacacgtggaatgcctcagggtcatgattacacatggtgtggatgtgacagcccaagatactaccggacacagcgccttacatctcgcagccaagaacagccaccatgaatgcatcaggaagctgcttcagtctaaatgcccagccgaaagtgtcgacagctctgggaaaacagctttacattatgcagcggctcagggctgccttcaagctgtgcagattctctgcgaacacaagagccccataaacctcaaagatttg

SEQ ID NO: 175389 - DNA, 522 bp, Homo sapiens
  Payload ID: 14446
  Gene Symbol: RAI14
  Gene Name: retinoic acid induced 14
  ENST ID: ENST00000515448
  CDS Start-End: 160-222
ctacttctgtgaaatgaggcacttagactagatgagcaatcttgacttttgaagggtggcaactaccttgtagaatccagtgaaaactcagaaccttcctccctgaaaaatgtgttgaaaagtctcctctagagctttggaaggctgaatgcactaaacatgaagagcttgaaagcgaagttcaggaagagtgacgaatttgaaatctgtaaagaactctaacattggaaatgcctgataacatacatctgcagttatttgtggcaaaagacaaggcaaataggcaaatattcggtattataaaaaatgcacagatttcaaaggacaagtataggtggatttacatgcctacatcttttgagaccaatgagtggaacaagaatgatgaccggctactgcaggccgtggagaatggagatgcggagaaggtggcctcactgctcggcaagaagggggccagtgccaccaaacacgacagtgagggcaagaccgctttccatcttgctgctgcaaaaggacacg

SEQ ID NO: 175390 - DNA, 562 bp, Homo sapiens
  Payload ID: 14446
  Gene Symbol: RAI14
  Gene Name: retinoic acid induced 14
  ENST ID: ENST00000503222
  CDS Start-End: 131-301
agatgagcaatcttgacttttgaagggtggcaactaccttgtagaatccagtgaaaactcagaaccttcctccctgaaaaatgtgttgaaaagtctcctctagagctttggaaggctgaatgcactaaacatgaagagcttgaaagcgaagttcaggaagagtgacaccaatgagtggaacaagaatgatgaccggctactgcaggccgtggagaatggagatgcggagaaggtggcctcactgctcggcaagaagggggccagtgccaccaaacacgacagtgagggcaagaccgcgtaagctgaaacactgtttccatcttgctgctgcaaaaggacacgtggaatgcctcagggtcatgattacacatggtgtggatgtgacagcccaagatactaccggacacagcgccttacatctcgcagccaagaacagccaccatgaatgcatcaggaagctgcttcagtctaaatgcccagccgaaagtgtcgacagctctgggaaaacagctttacattatgcagcggctcagggctgccttcaagctgtgcagattctctg

SEQ ID NO: 175391 - DNA, 579 bp, Homo sapiens
  Payload ID: 14446
  Gene Symbol: RAI14
  Gene Name: retinoic acid induced 14
  ENST ID: ENST00000508315
  CDS Start-End: 164-539
gttgctacttctgtgaaatgaggcacttagactagatgagcaatcttgacttttgaagggtggcaactaccttgtagaatccagtgaaaactcagaaccttcctccctgaaaaatgtgttgaaaagtctcctctagagctttggaaggctgaatgcactaaacatgaagagcttgaaagcgaagttcaggaagagtgacaccaatgagtggaacaagaatgatgaccggctactgcaggccgtggagaatggagatgcggagaaggtggcctcactgctcggcaagaagggggccagtgccaccaaacacgacagtgagggcaagaccgctttccatcttgctgctgcaaaaggacacgtggaatgcctcagggtcatgattacacatggtgtggatgtgacagcccaagatactaccggacacagcgccttacatctcgcagccaagaacagccaccatgaatgcatcaggaagctgcttcagtctaaatgcccagccgaaagtgtcgacagctctgggaaaacagctttacattatgcagcggctcagggctgccttcaagctgtgcagattctctg

SEQ ID NO: 175392 - DNA, 3486 bp, Homo sapiens
  Payload ID: 14446
  Gene Symbol: RAI14
  Gene Name: retinoic acid induced 14
  Uniprot ID: Q9P0K7
  ENST ID: ENST00000515799
  CDS Start-End: 493-3444
ggagaggctgcagtcacaatgaggcctccagattcatgtcatcaaagtgcttcatgatgactggattttcacaccatttatccaagggccctagtcaatggcagcagcaagaatgaaagtagacacattggaagctagagagtcactgggtgacttttggaggtagcaacaagctcatgaagaaggcattcagtggcttgcactccccacccatcctctcaactacatgcgaagttttcacatcttgtacatttccaaatttaatgaaaaaggtgttgaaaagtctcctctagagctttggaaggctgaatgcactaaacatgaagagcttgaaagcgaagttcaggaagagtgacgtaaattaaataaaactcatagagtgcaaagagacttcgacaaagacagaaaactagctgttggccagagtgaaagtcctggtcatccgacttccgagaaacctccttcaacctcatcgtctgctggctgtatgttatgcagcctacatatctcccgtggctttcagctaaggagaaaaagaccaatgagtggaacaagaatgatgaccggctactgcaggccgtggagaatggagatgcggagaaggtggcctcactgctcggcaagaagggggccagtgccaccaaacacgacagtgagggcaagaccgctttccatcttgctgctgcaaaaggacacgtggaatgcctcagggtcatgattacacatggtgtggatgtgacagcccaagatactaccggacacagcgccttacatctcgcagccaagaacagccaccatgaatgcatcaggaagctgcttcagtctaaatgcccagccgaaagtgtcgacagctctgggaaaacagctttacattatgcagcggctcagggctgccttcaagctgtgcagattctctgcgaacacaagagccccataaacctcaaagatttggatgggaatataccgctgcttcttgctgtacaaaatggtcacagtgagatctgtcactttctcctggatcatggagcagatgtcaattccaggaacaaaagtggaagaactgctctcatgctggcctgtgagattggcagctctaacgctgtggaagccttaattaaaaagggtgcagacctaaaccttgtagattctcttggatacaatgccttacattattccaaactctcagaaaatgcaggaattcaaagccttctattatcaaaaatctctcaggatgctgatttaaagaccccaacaaaaccaaagcagcatgaccaagtctctaaaataagctcagaaagaagtggaactccaaaaaaacgcaaagctccaccacctcctatcagtcctacccagttgagtgatgtctcttccccaagatcaataacttcgactccactatcgggaaaggaatcggtattttttgctgaaccacccttcaaggctgagatcagttctatacgagaaaacaaagacagactaagtgacagtactacaggtgctgatagcttattggatataagttctgaagctgaccaacaagatcttctctctctattgcaagcaaaagttgcttcccttaccttacacaataaggagttacaagataaattacaggccaaatcacccaaggaggcggaagcagacctaagctttgactcataccattccacccaaactgacttgggcccatccctgggaaaacctggtgaaacctctcccccagactccaaatcatctccatctgtcttaatacattctttaggtaaatccactactgacaatgatgtcagaattcagcaactgcaagagattttgcaagatctacagaagagattagagagctctgaagcagagagaaaacagctacaggtcgaactccaatcccgaagggcagaactggtatgcttaaacaacactgagatttcagagaacagctctgacctcagccagaaacttaaagaaactcagagcaaatacgaggaggctatgaaagaagtccttagtgtgcagaagcagatgaaactcggtcttgtctcacctgaaagcatggataattattcacatttccacgagctgagggtcacggaagaggaaataaatgtgctaaagcaggatctgcagaatgcattagaagaaagtgaaagaaataaagagaaagtgagagagttagaggaaaaactggtagagagggagaaaggtacagtgattaagccacctgtggaagagtacgaggaaatgaaaagttcatattgctctgttattgagaatatgaataaggagaaagcatttttgtttgagaaataccaagaagcccaagaagaaatcatgaaattaaaagacacactaaaaagtcagatgacacaggaagccagtgatgaagctgaggacatgaaagaagccatgaataggatgatagatgaactcaataaacaggtgagcgagctgtcacagctgtacaaagaagcccaggctgagctggaggattacaggaagaggaaatctctagaggatgtcacagctgaatatatccataaagcagagcatgagaaactgatgcaattgacaaacgtgtccagggctaaagcagaagatgcactgtctgaaatgaagtctcagtattcaaaagtgttgaatgagttgacccagctcaaacaactggtggatgcacaaaaagagaactctgtctctatcacagaacatttgcaagtgataaccacgctgcggactgcagcaaaagagatggaagaaaaaataagcaatcttaaggaacaccttgcaagcaaggaagtggaagtagcaaagctggagaaacaactcttagaagagaaagctgctatgactgatgcaatggtacctcggtcttcctatgaaaaactccagtcatccttagagagtgaagtgagtgtgttggcatcgaaattaaaggaatctgtgaaagagaaagagaaggtccattcagaggttgtccagattagaagtgaggtctcacaggtgaaaagagaaaaggaaaatattcagactctcttgaaatccaaagagcaagaagtaaatgaacttctgcaaaaattccagcaagctcaggaagaacttgcagaaatgaaaagatacgctgagagctcttcaaaactggaggaagataaagataaaaagataaatgagatgtcgaaggaagtcaccaaattgaaggaggccttgaacagcctctcccagctctcctactcaacaagctcatccaaaaggcagagtcagcagctggaggcgctgcagcagcaagtcaaacagctccagaaccagctggcggaatgcaagaaacaacaccaggaggtcatatcagtttacagaatgcatcttctgtatgctgtgcagggccagatggatgaagatgtccagaaagtactgaagcaaatccttaccatgtgtaaaaaccagtctcaaaagaagtaaagtggattccttggcaggacactgccccttgtcatctgtctt

SEQ ID NO: 175393 - DNA, 2317 bp, Homo sapiens
  Payload ID: 14447
  Gene Symbol: RAI2
  Gene Name: retinoic acid induced 2
  Uniprot ID: Q9Y5P3
  ENST ID: ENST00000331511
  CDS Start-End: 358-1950
agcgactcggtgacagcggcgacggcggctcccaccgcggcgcacccccttcaggcggccggcggcgaggccagaccggagagttccagcacactcgaccaccccgcggcttcctggaggcggcggccgcgattgcgaggcttcccaggaagaatgaagcagtcaacttgcataaggcctgtcttgacttctctcctttgggggaagaggatcacattaagaagggtggcaggcttgcctggacacagaattccactaccaaacagacatcatttctgagaacttcagagtttatgatccaggtttcccagtgattaaattactccttggaaggccaagtggcatcagagctgagtgatggacgacctgcagtcccagaacctctccatggacatgactgactcccctcctgccttggctaataacagactggagaatggcatggctcagctgatcaccaccgaggcctggaacatcaactccactgacctggtaaagaaggccctggtgaccgtgccagccccatccattctgaacccccctgccgagtctcagagtggcatggctctgaaggtggcggccactgtgttgcagcccctgtgcctcggggagagcccagtggtgatgcccattcacatgcaggtggagggaagctccgcaccagagctcaatccgaatggcaatgccacctacgtcatgaccacccagggccccgtgcaactgcccgtggtgctggagcagcacgtctttcagcacctcaactcccctctggtcctgccgcaggaggccccatgctcctccagtaccatccacaacaacctcttccagggagcggaggaccccgaggcccagccccagctcctggacctgaggatccccagccagccgcaggagcccactttgccatttgaagctgtgctccagaatttgtttccctcccagggcactctcgggcccccaccctgtcagcctcctcctggctatgcccctgtgcccccacagccttttagctcccccttgtcccccctggtcccaccagccaccctcttggtgccgtatcctgtaatcgtccccttgcctgtgccagtccctattcccatccccatcccgatgcctcagagttctgaatccaagttcagctccagtttccccaagccaccatcttccttcggcctgcacccctttaaaggcacccagacccctctggaaaaagatgaactgaagccctttgacatcctccagcctaaggagtacttccagctcagccgccacacggtcattaagatgggaagtgagaacgaggccctggatctctccatgaagtcagtgccctggctcaaggctggtgaagtcagtcccccaatcttccaggaagatgcagccctagacctgtcagtggcagcccaccggaaatccgagcctccccctgagacactgtatgacagtggtgcatcagtggacagctcaggtcacacagtgatggagaaacttcccagtggcatggaaatttcttttgcccctgccacgtcccatgaggccccagccatgatggatagtcacatcagcagcagtgatgctgctaccgagatgctcagccagcccaaccaccccagcggcgaagtcaaggctgaaaataacattgagatggtgggcgagtcccaggcggccaaggtcattgtctctgtcgaagatgctgtgcctaccatattctgtggcaagatcaaaggcctctcaggggtgtccaccaaaaacttctccttcaaaagagaagactccgtgcttcagggctatgacatcaacagccaaggggaagagtccatgggaaatgcagagccccttaggaaacccatcaaaaaccggagcataaagttaaagaaagtgaactcccaggaaatacacatgctcccaatcaaaaaacaacggctggccaccttttttccaagaaagtaaataacggctttttaaaatttgtatgattataatatggggaaaggtgcattggttttataaaaaggcatttaaaacaaattatctttgttaattattttggggagtagttgggaaatggaaaggtgaattggctctagaggccctgtatgctagtatcattttcttttttaatttttgacttttcacaaatgagtaaataagagcaacctatttttcaagcagattgcacattttttgcagctttaatggaatattgggtgaattagaggggtaaaaaaagctattttcattgccacaaagtgctttgatgatgtaatacctaataaagggtaggatgaatatttcacaataaatgtttgtttgcact

SEQ ID NO: 175394 - DNA, 2377 bp, Homo sapiens
  Payload ID: 14447
  Gene Symbol: RAI2
  Gene Name: retinoic acid induced 2
  Uniprot ID: Q9Y5P3
  ENST ID: ENST00000360011
  CDS Start-End: 418-2010
ggcaccgcaccgggcagtctccggatctgccgttctgccccggcccggaaaacccggcgccttccaggcccttcgaaagatggattctgttgacgtatctggcggccctggcgagcctggtggaaagttgggttttgccagattgcgccgggctcctctttgtgacgcgcggccagccccgcatcccccccggagccgggcttcccaggaagaatgaagcagtcaacttgcataaggcctgtcttgacttctctcctttgggggaagaggatcacattaagaagggtggcaggcttgcctggacacagaattccactaccaaacagacatcatttctgagaacttcagagtttatgatccaggtttcccagtgattaaattactccttggaaggccaagtggcatcagagctgagtgatggacgacctgcagtcccagaacctctccatggacatgactgactcccctcctgccttggctaataacagactggagaatggcatggctcagctgatcaccaccgaggcctggaacatcaactccactgacctggtaaagaaggccctggtgaccgtgccagccccatccattctgaacccccctgccgagtctcagagtggcatggctctgaaggtggcggccactgtgttgcagcccctgtgcctcggggagagcccagtggtgatgcccattcacatgcaggtggagggaagctccgcaccagagctcaatccgaatggcaatgccacctacgtcatgaccacccagggccccgtgcaactgcccgtggtgctggagcagcacgtctttcagcacctcaactcccctctggtcctgccgcaggaggccccatgctcctccagtaccatccacaacaacctcttccagggagcggaggaccccgaggcccagccccagctcctggacctgaggatccccagccagccgcaggagcccactttgccatttgaagctgtgctccagaatttgtttccctcccagggcactctcgggcccccaccctgtcagcctcctcctggctatgcccctgtgcccccacagccttttagctcccccttgtcccccctggtcccaccagccaccctcttggtgccgtatcctgtaatcgtccccttgcctgtgccagtccctattcccatccccatcccgatgcctcagagttctgaatccaagttcagctccagtttccccaagccaccatcttccttcggcctgcacccctttaaaggcacccagacccctctggaaaaagatgaactgaagccctttgacatcctccagcctaaggagtacttccagctcagccgccacacggtcattaagatgggaagtgagaacgaggccctggatctctccatgaagtcagtgccctggctcaaggctggtgaagtcagtcccccaatcttccaggaagatgcagccctagacctgtcagtggcagcccaccggaaatccgagcctccccctgagacactgtatgacagtggtgcatcagtggacagctcaggtcacacagtgatggagaaacttcccagtggcatggaaatttcttttgcccctgccacgtcccatgaggccccagccatgatggatagtcacatcagcagcagtgatgctgctaccgagatgctcagccagcccaaccaccccagcggcgaagtcaaggctgaaaataacattgagatggtgggcgagtcccaggcggccaaggtcattgtctctgtcgaagatgctgtgcctaccatattctgtggcaagatcaaaggcctctcaggggtgtccaccaaaaacttctccttcaaaagagaagactccgtgcttcagggctatgacatcaacagccaaggggaagagtccatgggaaatgcagagccccttaggaaacccatcaaaaaccggagcataaagttaaagaaagtgaactcccaggaaatacacatgctcccaatcaaaaaacaacggctggccaccttttttccaagaaagtaaataacggctttttaaaatttgtatgattataatatggggaaaggtgcattggttttataaaaaggcatttaaaacaaattatctttgttaattattttggggagtagttgggaaatggaaaggtgaattggctctagaggccctgtatgctagtatcattttcttttttaatttttgacttttcacaaatgagtaaataagagcaacctatttttcaagcagattgcacattttttgcagctttaatggaatattgggtgaattagaggggtaaaaaaagctattttcattgccacaaagtgctttgatgatgtaatacctaataaagggtaggatgaatatttcacaataaatgtttgtttgcact

SEQ ID NO: 175395 - DNA, 2037 bp, Homo sapiens
  Payload ID: 14447
  Gene Symbol: RAI2
  Gene Name: retinoic acid induced 2
  Uniprot ID: Q9Y5P3
  ENST ID: ENST00000415486
  CDS Start-End: 226-1668
acacactcgccaggacacaggcgcacacacgctcacgcacaaccagcagcggcggcggcgacagcgactcggtgacagcggcgacggcggctcccaccgcggcgcacccccttcaggcggccggcggcgaggccagaccggagagttccagcacactcgaccaccccgcggcttcctggaggcggcggccgcgattgcgaggccaagtggcatcagagctgagtgatggacgacctgcagtcccagaacctctccatggacatgactgactcccctcctgccttggctaataacagactggagaatggcatggctcagctgatcaccaccgaggcctggaacatcaactccactgacctggtggagggaagctccgcaccagagctcaatccgaatggcaatgccacctacgtcatgaccacccagggccccgtgcaactgcccgtggtgctggagcagcacgtctttcagcacctcaactcccctctggtcctgccgcaggaggccccatgctcctccagtaccatccacaacaacctcttccagggagcggaggaccccgaggcccagccccagctcctggacctgaggatccccagccagccgcaggagcccactttgccatttgaagctgtgctccagaatttgtttccctcccagggcactctcgggcccccaccctgtcagcctcctcctggctatgcccctgtgcccccacagccttttagctcccccttgtcccccctggtcccaccagccaccctcttggtgccgtatcctgtaatcgtccccttgcctgtgccagtccctattcccatccccatcccgatgcctcagagttctgaatccaagttcagctccagtttccccaagccaccatcttccttcggcctgcacccctttaaaggcacccagacccctctggaaaaagatgaactgaagccctttgacatcctccagcctaaggagtacttccagctcagccgccacacggtcattaagatgggaagtgagaacgaggccctggatctctccatgaagtcagtgccctggctcaaggctggtgaagtcagtcccccaatcttccaggaagatgcagccctagacctgtcagtggcagcccaccggaaatccgagcctccccctgagacactgtatgacagtggtgcatcagtggacagctcaggtcacacagtgatggagaaacttcccagtggcatggaaatttcttttgcccctgccacgtcccatgaggccccagccatgatggatagtcacatcagcagcagtgatgctgctaccgagatgctcagccagcccaaccaccccagcggcgaagtcaaggctgaaaataacattgagatggtgggcgagtcccaggcggccaaggtcattgtctctgtcgaagatgctgtgcctaccatattctgtggcaagatcaaaggcctctcaggggtgtccaccaaaaacttctccttcaaaagagaagactccgtgcttcagggctatgacatcaacagccaaggggaagagtccatgggaaatgcagagccccttaggaaacccatcaaaaaccggagcataaagttaaagaaagtgaactcccaggaaatacacatgctcccaatcaaaaaacaacggctggccaccttttttccaagaaagtaaataacggctttttaaaatttgtatgattataatatggggaaaggtgcattggttttataaaaaggcatttaaaacaaattatctttgttaattattttggggagtagttgggaaatggaaaggtgaattggctctagaggccctgtatgctagtatcattttcttttttaatttttgacttttcacaaatgagtaaataagagcaacctatttttcaagcagattgcacattttttgcagctttaatggaatattgggtgaattagaggggtaaaaaaagctattttcattgccacaaagtgctttgatgatgtaatacctaataaagggtaggatgaatatttcacaataaatgtttgtttgcactaa

SEQ ID NO: 175396 - DNA, 2224 bp, Homo sapiens
  Payload ID: 14447
  Gene Symbol: RAI2
  Gene Name: retinoic acid induced 2
  Uniprot ID: Q9Y5P3
  ENST ID: ENST00000451717
  CDS Start-End: 265-1857
cttggtgtatatagtaaaggccgggcgccgcacgcagacacacactcgccaggacacaggcgcacacacgctcacgcacaaccagcagcggcggcggcgacagcgactcggtgacagcggcgacggcggctcccaccgcggcgcacccccttcaggcggccggcggcgaggccagaccggagagttccagcacactcgaccaccccgcggcttcctggaggcggcggccgcgattgcgaggccaagtggcatcagagctgagtgatggacgacctgcagtcccagaacctctccatggacatgactgactcccctcctgccttggctaataacagactggagaatggcatggctcagctgatcaccaccgaggcctggaacatcaactccactgacctggtaaagaaggccctggtgaccgtgccagccccatccattctgaacccccctgccgagtctcagagtggcatggctctgaaggtggcggccactgtgttgcagcccctgtgcctcggggagagcccagtggtgatgcccattcacatgcaggtggagggaagctccgcaccagagctcaatccgaatggcaatgccacctacgtcatgaccacccagggccccgtgcaactgcccgtggtgctggagcagcacgtctttcagcacctcaactcccctctggtcctgccgcaggaggccccatgctcctccagtaccatccacaacaacctcttccagggagcggaggaccccgaggcccagccccagctcctggacctgaggatccccagccagccgcaggagcccactttgccatttgaagctgtgctccagaatttgtttccctcccagggcactctcgggcccccaccctgtcagcctcctcctggctatgcccctgtgcccccacagccttttagctcccccttgtcccccctggtcccaccagccaccctcttggtgccgtatcctgtaatcgtccccttgcctgtgccagtccctattcccatccccatcccgatgcctcagagttctgaatccaagttcagctccagtttccccaagccaccatcttccttcggcctgcacccctttaaaggcacccagacccctctggaaaaagatgaactgaagccctttgacatcctccagcctaaggagtacttccagctcagccgccacacggtcattaagatgggaagtgagaacgaggccctggatctctccatgaagtcagtgccctggctcaaggctggtgaagtcagtcccccaatcttccaggaagatgcagccctagacctgtcagtggcagcccaccggaaatccgagcctccccctgagacactgtatgacagtggtgcatcagtggacagctcaggtcacacagtgatggagaaacttcccagtggcatggaaatttcttttgcccctgccacgtcccatgaggccccagccatgatggatagtcacatcagcagcagtgatgctgctaccgagatgctcagccagcccaaccaccccagcggcgaagtcaaggctgaaaataacattgagatggtgggcgagtcccaggcggccaaggtcattgtctctgtcgaagatgctgtgcctaccatattctgtggcaagatcaaaggcctctcaggggtgtccaccaaaaacttctccttcaaaagagaagactccgtgcttcagggctatgacatcaacagccaaggggaagagtccatgggaaatgcagagccccttaggaaacccatcaaaaaccggagcataaagttaaagaaagtgaactcccaggaaatacacatgctcccaatcaaaaaacaacggctggccaccttttttccaagaaagtaaataacggctttttaaaatttgtatgattataatatggggaaaggtgcattggttttataaaaaggcatttaaaacaaattatctttgttaattattttggggagtagttgggaaatggaaaggtgaattggctctagaggccctgtatgctagtatcattttcttttttaatttttgacttttcacaaatgagtaaataagagcaacctatttttcaagcagattgcacattttttgcagctttaatggaatattgggtgaattagaggggtaaaaaaagctattttcattgccacaaagtgctttgatgatgtaatacctaataaagggtaggatgaatatttcacaataaatgtttgtttgcact

SEQ ID NO: 175397 - DNA, 2421 bp, Homo sapiens
  Payload ID: 14447
  Gene Symbol: RAI2
  Gene Name: retinoic acid induced 2
  Uniprot ID: Q9Y5P3
  ENST ID: ENST00000545871
  CDS Start-End: 462-2054
cttggtgtatatagtaaaggccgggcgccgcacgcagacacacactcgccaggacacaggcgcacacacgctcacgcacaaccagcagcggcggcggcgacagcgactcggtgacagcggcgacggcggctcccaccgcggcgcacccccttcaggcggccggcggcgaggccagaccggagagttccagcacactcgaccaccccgcggcttcctggaggcggcggccgcgattgcgagcaggcttcccaggaagaatgaagcagtcaacttgcataaggcctgtcttgacttctctcctttgggggaagaggatcacattaagaagggtggcaggcttgcctggacacagaattccactaccaaacagacatcatttctgagaacttcagagtttatgatccaggtttcccagtgattaaattactccttggaaggccaagtggcatcagagctgagtgatggacgacctgcagtcccagaacctctccatggacatgactgactcccctcctgccttggctaataacagactggagaatggcatggctcagctgatcaccaccgaggcctggaacatcaactccactgacctggtaaagaaggccctggtgaccgtgccagccccatccattctgaacccccctgccgagtctcagagtggcatggctctgaaggtggcggccactgtgttgcagcccctgtgcctcggggagagcccagtggtgatgcccattcacatgcaggtggagggaagctccgcaccagagctcaatccgaatggcaatgccacctacgtcatgaccacccagggccccgtgcaactgcccgtggtgctggagcagcacgtctttcagcacctcaactcccctctggtcctgccgcaggaggccccatgctcctccagtaccatccacaacaacctcttccagggagcggaggaccccgaggcccagccccagctcctggacctgaggatccccagccagccgcaggagcccactttgccatttgaagctgtgctccagaatttgtttccctcccagggcactctcgggcccccaccctgtcagcctcctcctggctatgcccctgtgcccccacagccttttagctcccccttgtcccccctggtcccaccagccaccctcttggtgccgtatcctgtaatcgtccccttgcctgtgccagtccctattcccatccccatcccgatgcctcagagttctgaatccaagttcagctccagtttccccaagccaccatcttccttcggcctgcacccctttaaaggcacccagacccctctggaaaaagatgaactgaagccctttgacatcctccagcctaaggagtacttccagctcagccgccacacggtcattaagatgggaagtgagaacgaggccctggatctctccatgaagtcagtgccctggctcaaggctggtgaagtcagtcccccaatcttccaggaagatgcagccctagacctgtcagtggcagcccaccggaaatccgagcctccccctgagacactgtatgacagtggtgcatcagtggacagctcaggtcacacagtgatggagaaacttcccagtggcatggaaatttcttttgcccctgccacgtcccatgaggccccagccatgatggatagtcacatcagcagcagtgatgctgctaccgagatgctcagccagcccaaccaccccagcggcgaagtcaaggctgaaaataacattgagatggtgggcgagtcccaggcggccaaggtcattgtctctgtcgaagatgctgtgcctaccatattctgtggcaagatcaaaggcctctcaggggtgtccaccaaaaacttctccttcaaaagagaagactccgtgcttcagggctatgacatcaacagccaaggggaagagtccatgggaaatgcagagccccttaggaaacccatcaaaaaccggagcataaagttaaagaaagtgaactcccaggaaatacacatgctcccaatcaaaaaacaacggctggccaccttttttccaagaaagtaaataacggctttttaaaatttgtatgattataatatggggaaaggtgcattggttttataaaaaggcatttaaaacaaattatctttgttaattattttggggagtagttgggaaatggaaaggtgaattggctctagaggccctgtatgctagtatcattttcttttttaatttttgacttttcacaaatgagtaaataagagcaacctatttttcaagcagattgcacattttttgcagctttaatggaatattgggtgaattagaggggtaaaaaaagctattttcattgccacaaagtgctttgatgatgtaatacctaataaagggtaggatgaatatttcacaataaatgtttgtttgcact

SEQ ID NO: 175398 - DNA, 463 bp, Homo sapiens
  Payload ID: 14447
  Gene Symbol: RAI2
  Gene Name: retinoic acid induced 2
  ENST ID: ENST00000509491
  CDS Start-End: 219-463
gcttcccaggaagaatgaagcagtcaacttgcataaggcctgtcttgacttctctcctttgggggaagaggatcacattaagaagggtggcaggcttgcctggacacagaattccactaccaaacagacatcatttctgagaacttcagagtttatgatccaggtttcccagtgattaaattactccttggaaggccaagtggcatcagagctgagtgatggacgacctgcagtcccagaacctctccatggacatgactgactcccctcctgccttggctaataacagactggagaatggcatggctcagctgatcaccaccgaggcctggaacatcaactccactgacctgcccctgtgcctcggggagagcccagtggtgatgcccattcacatgcaggtggagggaagctccgcaccagagctcaatccgaatggcaatgccacctacgtcatgaccac

SEQ ID NO: 175399 - DNA, 1952 bp, Homo sapiens
  Payload ID: 14448
  Gene Symbol: RARRES1
  Gene Name: retinoic acid receptor responder (tazarotene induced) 1
  Uniprot ID: P49788
  ENST ID: ENST00000237696
  CDS Start-End: 282-1166
gaccctctcccgccgcggcctgggccagaagcacccggccctgcgctgcggaggcgatgccgcatcctagcactaagcccgggcagcggggaggggcagagagaacccaggggctgcgggaaacgtggaaaaggagtggccccatggggacccgggctcgctacagaccttcgccctgggggcggaggggaggggcccaccacggccttatttccgcgagcgccggcactgcccgctccgagcccgtgtctgtcgggtgccgagccaactttcctgcgtccatgcagccccgccggcaacggctgcctgctccctggtccgggcccaggggcccgcgccccaccgccccgctgctcgcgctgctgctgttgctcgccccggtggcggcgcccgcggggtccggggaccccgacgaccctgggcagcctcaggatgctggggtcccgcgcaggctcctgcagcaggcggcgcgcgcggcgcttcacttcttcaacttccggtccggctcgcccagcgcgctacgagtgctggccgaggtgcaggagggccgcgcgtggattaatccaaaagagggatgtaaagttcacgtggtcttcagcacagagcgctacaacccagagtctttacttcaggaaggtgagggacgtttggggaaatgttctgctcgagtgtttttcaagaatcagaaacccagaccaaccatcaatgtaacttgtacacggctcatcgagaaaaagaaaagacaacaagaggattacctgctttacaagcaaatgaagcaactgaaaaaccccttggaaatagtcagcatacctgataatcatggacatattgatccctctctgagactcatctgggatttggctttccttggaagctcttacgtgatgtgggaaatgacaacacaggtgtcacactactacttggcacagctcactagtgtgaggcagtggaaaactaatgatgatacaattgattttgattatactgttctacttcatgaattatcaacacaggaaataattccctgtcgcattcacttggtctggtaccctggcaaacctcttaaagtgaagtaccactgtcaagagctacagacaccagaagaagcctccggaactgaagaaggatcagctgtagtaccaacagagcttagtaatttctaaaaagaaaaaatgatctttttccgacttctaaacaagtgactatactagcataaatcattcttctagtaaaacagctaaggtatagacattctaataatttgggaaaacctatgattacaagtaaaaactcagaaatgcaaagatgttggttttttgtttctcagtctgctttagcttttaactctggaagcgcatgcacactgaactctgctcagtgctaaacagtcaccagcaggttcctcagggtttcagccctaaaatgtaaaacctggataatcagtgtatgttgcaccagaatcagcattttttttttaactgcaaaaaatgatggtctcatctctgaatttatatttctcattcttttgaacatactatagctaatatattttatgttgctaaattgcttctatctagcatgttaaacaaagataatatactttcgatgaaagtaaattataggaaaaaaattaactgttttaaaaagaacttgattatgttttatgatttcaggcaagtattcatttttaacttgctacctacttttaaataaatgtttacatttctaaataatgaaatgtgttgaatgttctcgtgaagatttgtatacaaaggaaaaatttgtgctaaactggaattaaatgaaatggtaatattgcttaacttaaattttacaaataatagaacgtctgtctcaccagataaagctgtctgcaaacatgcatcaaaagaaacactgatgtaactgaaagtatattaaatatttacaattttcatttacaaggacaa

SEQ ID NO: 175400 - DNA, 839 bp, Homo sapiens
  Payload ID: 14448
  Gene Symbol: RARRES1
  Gene Name: retinoic acid receptor responder (tazarotene induced) 1
  Uniprot ID: P49788
  ENST ID: ENST00000479756
  CDS Start-End: 28-714
gggtgccgagccaactttcctgcgtccatgcagccccgccggcaacggctgcctgctccctggtccgggcccaggggcccgcgccccaccgccccgctgctcgcgctgctgctgttgctcgccccggtggcggcgcccgcggggtccggggaccccgacgaccctgggcagcctcaggatgctggggtcccgcgcaggctcctgcagcaggcggcgcgcgcggcgcttcacttcttcaacttccggtccggctcgcccagcgcgctacgagtgctggccgaggtgcaggagggccgcgcgtggattaatccaaaagagggatgtaaagttcacgtggtcttcagcacagagcgctacaacccagagtctttacttcaggaaggtgagggacgtttggggaaatgttctgctcgagtgtttttcaagaatcagaaacccagaccaaccatcaatgtaacttgtacacggctcatcgagaaaaagaaaagacaacaagaggattacctgctttacaagcaaatgaagcaactgaaaaaccccttggaaatagtcagcatacctgataatcatggacatattgatccctctctgagactcatctgggatttggctttccttggaagctcttacgtgatgtgggaaatgacaacacaggtgtcacactactacttggcacagctcactagtgtgaggcagtgggtaagaaaaacctgaaaattaacttgtgccacaagagttacaatcaaagtggtctccttagactgaattcatgcgaacttctaatttcatatcaagagttgtaatcacatttatttcaataaatatgtgagttcctgcaa

SEQ ID NO: 175401 - DNA, 740 bp, Homo sapiens
  Payload ID: 14449
  Gene Symbol: RARRES2
  Gene Name: retinoic acid receptor responder (tazarotene induced) 2
  Uniprot ID: Q99969
  ENST ID: ENST00000223271
  CDS Start-End: 118-609
gccgccccgcgagaagaagagcgggaagaggcggacagcgaggccaagatttcagctgcgggacggtcaggggagacctccaggcgcagggaaggacggccagggtgacacggaagcatgcgacggctgctgatccctctggccctgtggctgggtgcggtgggcgtgggcgtcgccgagctcacggaagcccagcgccggggcctgcaggtggccctggaggaatttcacaagcacccgcccgtgcagtgggccttccaggagaccagtgtggagagcgccgtggacacgcccttcccagctggaatatttgtgaggctggaatttaagctgcagcagacaagctgccggaagagggactggaagaaacccgagtgcaaagtcaggcccaatgggaggaaacggaaatgcctggcctgcatcaaactgggctctgaggacaaagttctgggccggttggtccactgccccatagagacccaagttctgcgggaggctgaggagcaccaggagacccagtgcctcagggtgcagcgggctggtgaggacccccacagcttctacttccctggacagttcgccttctccaaggccctgccccgcagctaagccagcactgagatgcgtggtgcctccaggaccgctgcgggtggtaaccagtggaagaccccagcccccagggagaggaacccgttctatccccagccatgataataaagctgctctcccagctgcctctc

SEQ ID NO: 175402 - DNA, 583 bp, Homo sapiens
  Payload ID: 14449
  Gene Symbol: RARRES2
  Gene Name: retinoic acid receptor responder (tazarotene induced) 2
  ENST ID: ENST00000467793
  CDS Start-End: 106-583
gaagaagagcgggaagaggcggacagcgaggccaagatttcagctgcgggacggtcaggggagacctccaggcgcagggaaggacggccagggtgacacggaagcatgcgacggctgctgatccctctggccctgtggctgggtgcggtgggcgtgggcgtcgccgagctcacggaagcccagcgccggggcctgcaggtggccctggaggaatttcacaagcacccgcccgtgcagtgggccttccaggagaccagtgtggagagcgccgtggacacgcccttcccagctggaatatttgtgaggctggaatttaagctgcagcagacaagctgccggaagagggactggaagaaacccgagtgcaaagtcaggcccaatgggaggaaacggaaatgcctggcctgcatcaaactgggctctgaggacaaagttctgggccggttggtccactgccccatagagacccaagttctgcggagatgcgtggtgcctccaggaccgctgcgggtggtaaccagtggaagaccccagcccccagggagaggaacccgttctatccccagccatgataataaagctg

SEQ ID NO: 175403 - DNA, 1618 bp, Homo sapiens
  Payload ID: 14449
  Gene Symbol: RARRES2
  Gene Name: retinoic acid receptor responder (tazarotene induced) 2
  Uniprot ID: Q99969
  ENST ID: ENST00000466675
  CDS Start-End: 1035-1526
cggacagcgaggccaagatttcagctgcgggacggtcaggggagacctccaggcgcagggaaggacgtgaggaggggaagcgggctggggcggcagccgggcggaggggcagctgcgcaggcggaatgaggaacgcctttgctctaaggcgaccaccctggcagctcttcactgaggggcctcggtttccacatctgtcgctctccggtcccaagaccaccaggaccgacggggctctccgggagggtcagcccctccggtggccccagtcatgcatcaggggacggatcagaagggctaggaagaggggtcgtggggaaggccccagaaaaaagaggaaggagggaagattttgcctgaagcgggaaagccaagggctgggcggcgcgagacccccattcctagcgactggggctggctggtggcccgcggcagcccccgcgccgggaggattaggcctcccgccgctcccacccgtccggaccctcccacgtgtttaggtcctcccaaaagtattcggcctccggcccctgccccttcccccggctggcctggacctcggggacgtggggggaaccccgtgggagcagggggattctggacggggagggagtagcggttggggagaaggctgagcggggaaaggagagaggggctccggggacggcagggaggagagtgggtcgtgccggagacccagggagagacacaatgggcaagattaggggtgtagggtgggagtgcgaactgactgattcctagcgtgggcagggaactttgctaaaactgcaggccccagggaacagcgcgggcagggtgggagggaacggagagggccaggcggaccctaaggtcaatttggagaaagggccatttccaggctccttcacctgtgcccagcgttctacaggcctggaccccgcccccgctccccaccctccccccagagcagggcgcgggaggaggcggctcgggctggctcggagagctgaggggcgcacacccgcttcgcagggccagggtgacacggaagcatgcgacggctgctgatccctctggccctgtggctgggtgcggtgggcgtgggcgtcgccgagctcacggaagcccagcgccggggcctgcaggtggccctggaggaatttcacaagcacccgcccgtgcagtgggccttccaggagaccagtgtggagagcgccgtggacacgcccttcccagctggaatatttgtgaggctggaatttaagctgcagcagacaagctgccggaagagggactggaagaaacccgagtgcaaagtcaggcccaatgggaggaaacggaaatgcctggcctgcatcaaactgggctctgaggacaaagttctgggccggttggtccactgccccatagagacccaagttctgcgggaggctgaggagcaccaggagacccagtgcctcagggtgcagcgggctggtgaggacccccacagcttctacttccctggacagttcgccttctccaaggccctgccccgcagctaagccagcactgagatgcgtggtgcctccaggaccgctgcgggtggtaaccagtggaagaccccagcccccagggagaggaacccgttctatcc

SEQ ID NO: 175404 - DNA, 563 bp, Homo sapiens
  Payload ID: 14449
  Gene Symbol: RARRES2
  Gene Name: retinoic acid receptor responder (tazarotene induced) 2
  Uniprot ID: Q99969
  ENST ID: ENST00000482669
  CDS Start-End: 72-563
agaagagcgggaagaggcggacagcgaggccaagatttcagctgcgggacgggccagggtgacacggaagcatgcgacggctgctgatccctctggccctgtggctgggtgcggtgggcgtgggcgtcgccgagctcacggaagcccagcgccggggcctgcaggtggccctggaggaatttcacaagcacccgcccgtgcagtgggccttccaggagaccagtgtggagagcgccgtggacacgcccttcccagctggaatatttgtgaggctggaatttaagctgcagcagacaagctgccggaagagggactggaagaaacccgagtgcaaagtcaggcccaatgggaggaaacggaaatgcctggcctgcatcaaactgggctctgaggacaaagttctgggccggttggtccactgccccatagagacccaagttctgcgggaggctgaggagcaccaggagacccagtgcctcagggtgcagcgggctggtgaggacccccacagcttctacttccctggacagttcgccttctccaaggccctgccccgcagctaa

SEQ ID NO: 175405 - DNA, 749 bp, Homo sapiens
  Payload ID: 14450
  Gene Symbol: RARRES3
  Gene Name: retinoic acid receptor responder (tazarotene induced) 3
  Uniprot ID: Q9UL19
  ENST ID: ENST00000255688
  CDS Start-End: 49-543
agctgatccacaaacaagaggagcaccagacctcctcttggcttcgagatggcttcgccacaccaagagcccaaacctggagacctgattgagattttccgccttggctatgagcactgggccctgtatataggagatggctacgtgatccatctggctcctccaagtgagtaccccggggctggctcctccagtgtcttctcagtcctgagcaacagtgcagaggtgaaacgggagcgcctggaagatgtggtgggaggctgttgctatcgggtcaacaacagcttggaccatgagtaccaaccacggcccgtggaggtgatcatcagttctgcgaaggagatggttggtcagaagatgaagtacagtattgtgagcaggaactgtgagcactttgtcacccagctgagatatggcaagtcccgctgtaaacaggtggaaaaggccaaggttgaagtcggtgtggccacggcgcttggaatcctggttgttgctggatgctcttttgcgattaggagataccaaaaaaaagcgacagcctgaagcagccacaaaatcctgtgttagaagcagctgtgggggtcccagtggagatgagcctcccccatgcctccagcagcctgaccctcgtgccctgtctcaggcgttctctagatcctttcctctgtttccctctctcgctggcaaaagtatgatctaattgaaacaagactgaaggatcaataaacagccatctgccccttcagaaa

SEQ ID NO: 175406 - DNA, 696 bp, Homo sapiens
  Payload ID: 14450
  Gene Symbol: RARRES3
  Gene Name: retinoic acid receptor responder (tazarotene induced) 3
  ENST ID: ENST00000354445
  CDS Start-End: 1-495
atggggctgcctgaaccaaagcccaaacctggagacctgattgagattttccgccttggctatgagcactgggccctgtatataggagatggctacgtgatccatctggctcctccaagtgagtaccccggggctggctcctccagtgtcttctcagtcctgagcaacagtgcagaggtgaaacgggagcgcctggaagatgtggtgggaggctgttgctatcgggtcaacaacagcttggaccatgagtaccaaccacggcccgtggaggtgatcatcagttctgcgaaggagatggttggtcagaagatgaagtacagtattgtgagcaggaactgtgagcactttgtcacccagctgagatatggcaagtcccgctgtaaacaggtggaaaaggccaaggttgaagtcggtgtggccacggcgcttggaatcctggttgttgctggatgctcttttgcgattaggagataccaaaaaaaagcgacagcctgaagcagccacaaaatcctgtgttagaagcagctgtgggggtcccagtggagatgagcctcccccatgcctccagcagcctgaccctcgtgccctgtctcaggcgttctctagatcctttcctctgtttccctctctcgctggcaaaagtatgatctaattgaaacaagactgaaggatcaataaacagccatctgccccttc

SEQ ID NO: 175407 - DNA, 938 bp, Homo sapiens
  Payload ID: 14450
  Gene Symbol: RARRES3
  Gene Name: retinoic acid receptor responder (tazarotene induced) 3
  Uniprot ID: Q9UL19
  ENST ID: ENST00000439013
  CDS Start-End: 54-524
ataaaagctgatccacaaacaagaggagcaccagacctcctcttggcttcgagatggcttcgccacaccaagagcccaaacctggagacctgattgagattttccgccttggctatgagcactgggccctgtatataggagatggctacgtgatccatctggctcctccaagtgagtaccccggggctggctcctccagtgtcttctcagtcctgagcaacagtgcagaggtgaaacgggagcgcctggaagatgtggtgggaggctgttgctatcgggtcaacaacagcttggaccatgagtaccaaccacggcccgtggaggtgatcatcagttctgcgaaggagatggttggtcagaagatgaagtacagtattgtgagcaggaactgtgagcactttgtcacccagctgagatatggcaagtcccgctgtaaacaggtaaggacctctctggataatccatctccctctgcttggggctggactcacggggctgtgcagccaggcgatcactgtgaatgatgcaaatgcagcctcttagagacctgctggctgagagtcaggacctctgagctccaatgccagatctgcttctaatccacagagggtctttggacagttcccttccccccaggcctctccatgtgcagaggagggggtggatggaggagctctgaggatccttcccctctaaaacctatcctgaaaatggctcctgaagttctgggggtcatcaggagaatctgggccaacccaggacaatgacaggtcctgcaaccccccaaagagtactcaggcaagggacgctcagggtccgtggacctgtgtaagagctcaaggacatttgtgtgtaagatctgggcacagcctccatcccttgccccttcacagtctttcacatttgttgccccaaaacactcaactaataagtggcag

SEQ ID NO: 175408 - DNA, 2414 bp, Homo sapiens
  Payload ID: 14451
  Gene Symbol: RARA
  Gene Name: retinoic acid receptor, alpha
  Uniprot ID: P10276
  ENST ID: ENST00000254066
  CDS Start-End: 456-1844
cagaagcaggggggaatcctgaatcgagctgagagggcttccccggttctcctgggaaccccatcggccccctgccagcacacacctgagcagcatcacaggacatggccccctcagccacctagctggggcccatctaggagtggcatcttttttggtgccctgaaggccagctctggaccttcccaggaaaagtgccagctcacagaactgcttgaccaaaggaccggctcttgagacatcccccaacccacctggcccccagctagggtgggggctccaggagactgagattagcctgccctctttggacagcagctccaggacagggcgggtgggctgaccacccaaaccccatctgggcccaggccccatgccccgaggaggggtggtctgaagcccaccagagccccctgccagactgtctgcctcccttctgactgtggccgcttggcatggccagcaacagcagctcctgcccgacacctgggggcgggcacctcaatgggtacccggtgcctccctacgccttcttcttcccccctatgctgggtggactctccccgccaggcgctctgaccactctccagcaccagcttccagttagtggatatagcacaccatccccagccaccattgagacccagagcagcagttctgaagagatagtgcccagccctccctcgccaccccctctaccccgcatctacaagccttgctttgtctgtcaggacaagtcctcaggctaccactatggggtcagcgcctgtgagggctgcaagggcttcttccgccgcagcatccagaagaacatggtgtacacgtgtcaccgggacaagaactgcatcatcaacaaggtgacccggaaccgctgccagtactgccgactgcagaagtgctttgaagtgggcatgtccaaggagtctgtgagaaacgaccgaaacaagaagaagaaggaggtgcccaagcccgagtgctctgagagctacacgctgacgccggaggtgggggagctcattgagaaggtgcgcaaagcgcaccaggaaaccttccctgccctctgccagctgggcaaatacactacgaacaacagctcagaacaacgtgtctctctggacattgacctctgggacaagttcagtgaactctccaccaagtgcatcattaagactgtggagttcgccaagcagctgcccggcttcaccaccctcaccatcgccgaccagatcaccctcctcaaggctgcctgcctggacatcctgatcctgcggatctgcacgcggtacacgcccgagcaggacaccatgaccttctcggacgggctgaccctgaaccggacccagatgcacaacgctggcttcggccccctcaccgacctggtctttgccttcgccaaccagctgctgcccctggagatggatgatgcggagacggggctgctcagcgccatctgcctcatctgcggagaccgccaggacctggagcagccggaccgggtggacatgctgcaggagccgctgctggaggcgctaaaggtctacgtgcggaagcggaggcccagccgcccccacatgttccccaagatgctaatgaagattactgacctgcgaagcatcagcgccaagggggctgagcgggtgatcacgctgaagatggagatcccgggctccatgccgcctctcatccaggaaatgttggagaactcagagggcctggacactctgagcggacagccggggggtggggggcgggacgggggtggcctggcccccccgccaggcagctgtagccccagcctcagccccagctccaacagaagcagcccggccacccactccccgtgaccgcccacgccacatggacacagccctcgccctccgccccggcttttctctgcctttctaccgaccatgtgaccccgcaccagccctgcccccacctgccctcccgggcagtactggggaccttccctgggggacggggagggaggaggcagcgactccttggacagaggcctgggccctcagtggactgcctgctcccacagcctgggctgacgtcagaggccgaggccaggaactgagtgaggcccctggtcctgggtctcaggatgggtcctgggggcctcgtgttcatcaagacacccctctgcccagctcaccacatcttcatcaccagcaaacgccaggacttggctcccccatcctcagaactcacaagccattgctccccagctggggaacctcaacctcccccctgcctcggttggtgacagagggggtgggacaggggcggggggttccccctgtacataccctgccataccaaccccaggtattaattctcgctggttttgtttttattttaatttttttgttttgatttttttaataagaattttcattttaagcaca

SEQ ID NO: 175409 - DNA, 2285 bp, Homo sapiens
  Payload ID: 14451
  Gene Symbol: RARA
  Gene Name: retinoic acid receptor, alpha
  Uniprot ID: P10276
  ENST ID: ENST00000394081
  CDS Start-End: 343-1716
agccgctgtactctgcctcggacgccacgagactctagacgggagtcccctcgaggtgaagccgctgagttcccgggccccgccaggcttccctgggagagccgacggaccccccctcccagcacacacaacttccctgcttttcaccgggactggcggagcggccggcggacttagacgcggggacttcagggcagggggcgccccctgcccgggtcaccagtcggggcgaggggacgtctcctctcccccagctgctctgctcggatggcgccgccggctgagtgacgggggcggcgcgcaggacttcccagctcggacctcttgccttcgaggggaaagatgtacgagagtgtagaagtggggggtcccacccctaatcccttcctagtggtggatttttataaccagaaccgggcctgtttgctcccagagaaggggctccccgccccgggtccgtactccaccccgctccggactccgctttggaatggctcaaaccactccattgagacccagagcagcagttctgaagagatagtgcccagccctccctcgccaccccctctaccccgcatctacaagccttgctttgtctgtcaggacaagtcctcaggctaccactatggggtcagcgcctgtgagggctgcaagggcttcttccgccgcagcatccagaagaacatggtgtacacgtgtcaccgggacaagaactgcatcatcaacaaggtgacccggaaccgctgccagtactgccgactgcagaagtgctttgaagtgggcatgtccaaggagtctgtgagaaacgaccgaaacaagaagaagaaggaggtgcccaagcccgagtgctctgagagctacacgctgacgccggaggtgggggagctcattgagaaggtgcgcaaagcgcaccaggaaaccttccctgccctctgccagctgggcaaatacactacgaacaacagctcagaacaacgtgtctctctggacattgacctctgggacaagttcagtgaactctccaccaagtgcatcattaagactgtggagttcgccaagcagctgcccggcttcaccaccctcaccatcgccgaccagatcaccctcctcaaggctgcctgcctggacatcctgatcctgcggatctgcacgcggtacacgcccgagcaggacaccatgaccttctcggacgggctgaccctgaaccggacccagatgcacaacgctggcttcggccccctcaccgacctggtctttgccttcgccaaccagctgctgcccctggagatggatgatgcggagacggggctgctcagcgccatctgcctcatctgcggagaccgccaggacctggagcagccggaccgggtggacatgctgcaggagccgctgctggaggcgctaaaggtctacgtgcggaagcggaggcccagccgcccccacatgttccccaagatgctaatgaagattactgacctgcgaagcatcagcgccaagggggctgagcgggtgatcacgctgaagatggagatcccgggctccatgccgcctctcatccaggaaatgttggagaactcagagggcctggacactctgagcggacagccggggggtggggggcgggacgggggtggcctggcccccccgccaggcagctgtagccccagcctcagccccagctccaacagaagcagcccggccacccactccccgtgaccgcccacgccacatggacacagccctcgccctccgccccggcttttctctgcctttctaccgaccatgtgaccccgcaccagccctgcccccacctgccctcccgggcagtactggggaccttccctgggggacggggagggaggaggcagcgactccttggacagaggcctgggccctcagtggactgcctgctcccacagcctgggctgacgtcagaggccgaggccaggaactgagtgaggcccctggtcctgggtctcaggatgggtcctgggggcctcgtgttcatcaagacacccctctgcccagctcaccacatcttcatcaccagcaaacgccaggacttggctcccccatcctcagaactcacaagccattgctccccagctggggaacctcaacctcccccctgcctcggttggtgacagagggggtgggacaggggcggggggttccccctgtacataccctgccataccaaccccaggtattaattctcgctggttttgtttttattttaatttttttgttttgatttttttaataagaattttcattttaagcac

SEQ ID NO: 175410 - DNA, 2008 bp, Homo sapiens
  Payload ID: 14451
  Gene Symbol: RARA
  Gene Name: retinoic acid receptor, alpha
  ENST ID: ENST00000394086
  CDS Start-End: 3-1439
acatgatgtcacagacaatgacacaagccggtgtctcattccgacacagcgtccgagctgcacaatgtcacacccgggtgccaaacacttggccccgcgcgacccggccctacgcctcctgccgccgctctccgcgtctccgggggaggtggcccggttcggccgggcagggggctggcgggcgagccccgcgggcgggctggcgagcgggtgatgtcacgggcagcgccattgagacccagagcagcagttctgaagagatagtgcccagccctccctcgccaccccctctaccccgcatctacaagccttgctttgtctgtcaggacaagtcctcaggctaccactatggggtcagcgcctgtgagggctgcaagggcttcttccgccgcagcatccagaagaacatggtgtacacgtgtcaccgggacaagaactgcatcatcaacaaggtgacccggaaccgctgccagtactgccgactgcagaagtgctttgaagtgggcatgtccaaggagtctgtgagaaacgaccgaaacaagaagaagaaggaggtgcccaagcccgagtgctctgagagctacacgctgacgccggaggtgggggagctcattgagaaggtgcgcaaagcgcaccaggaaaccttccctgccctctgccagctgggcaaatacactacgaacaacagctcagaacaacgtgtctctctggacattgacctctgggacaagttcagtgaactctccaccaagtgcatcattaagactgtggagttcgccaagcagctgcccggcttcaccaccctcaccatcgccgaccagatcaccctcctcaaggctgcctgcctggacatcctgatcctgcggatctgcacgcggtacacgcccgagcaggacaccatgaccttctcggacgggctgaccctgaaccggacccagatgcacaacgctggcttcggccccctcaccgacctggtctttgccttcgccaaccagctgctgcccctggagatggatgatgcggagacggggctgctcagcgccatctgcctcatctgcggagaccgccaggacctggagcagccggaccgggtggacatgctgcaggagccgctgctggaggcgctaaaggtctacgtgcggaagcggaggcccagccgcccccacatgttccccaagatgctaatgaagattactgacctgcgaagcatcagcgccaagggggctgagcgggtgatcacgctgaagatggagatcccgggctccatgccgcctctcatccaggaaatgttggagaactcagagggcctggacactctgagcggacagccggggggtggggggcgggacgggggtggcctggcccccccgccaggcagctgtagccccagcctcagccccagctccaacagaagcagcccggccacccactccccgtgaccgcccacgccacatggacacagccctcgccctccgccccggcttttctctgcctttctaccgaccatgtgaccccgcaccagccctgcccccacctgccctcccgggcagtactggggaccttccctgggggacggggagggaggaggcagcgactccttggacagaggcctgggccctcagtggactgcctgctcccacagcctgggctgacgtcagaggccgaggccaggaactgagtgaggcccctggtcctgggtctcaggatgggtcctgggggcctcgtgttcatcaagacacccctctgcccagctcaccacatcttcatcaccagcaaacgccaggacttggctcccccatcctcagaactcacaagccattgctccccagctggggaacctcaacctcccccctgcctcggttggtgacagagggggtgggacaggggcggggggttccccctgtacataccctgccataccaaccccaggtattaattctcgctggttttgtttttattttaatttttttgttttgatttttttaataagaattttcattttaagcac

SEQ ID NO: 175411 - DNA, 2024 bp, Homo sapiens
  Payload ID: 14451
  Gene Symbol: RARA
  Gene Name: retinoic acid receptor, alpha
  Uniprot ID: P10276
  ENST ID: ENST00000394089
  CDS Start-End: 531-1919
gtgactcgctatggccgctgccatcgccccgcgcccctgagccgcggccccctggacggctcctctcccgggaccccgcaccctgatgccgagcagcaccagggcgccgggttagggcagacgctgtgctcgctggcaccccgaacgggttgcttcccccgctgcgagcatcacaggacatggccccctcagccacctagctggggcccatctaggagtggcatcttttttggtgccctgaaggccagctctggaccttcccaggaaaagtgccagctcacagaactgcttgaccaaaggaccggctcttgagacatcccccaacccacctggcccccagctagggtgggggctccaggagactgagattagcctgccctctttggacagcagctccaggacagggcgggtgggctgaccacccaaaccccatctgggcccaggccccatgccccgaggaggggtggtctgaagcccaccagagccccctgccagactgtctgcctcccttctgactgtggccgcttggcatggccagcaacagcagctcctgcccgacacctgggggcgggcacctcaatgggtacccggtgcctccctacgccttcttcttcccccctatgctgggtggactctccccgccaggcgctctgaccactctccagcaccagcttccagttagtggatatagcacaccatccccagccaccattgagacccagagcagcagttctgaagagatagtgcccagccctccctcgccaccccctctaccccgcatctacaagccttgctttgtctgtcaggacaagtcctcaggctaccactatggggtcagcgcctgtgagggctgcaagggcttcttccgccgcagcatccagaagaacatggtgtacacgtgtcaccgggacaagaactgcatcatcaacaaggtgacccggaaccgctgccagtactgccgactgcagaagtgctttgaagtgggcatgtccaaggagtctgtgagaaacgaccgaaacaagaagaagaaggaggtgcccaagcccgagtgctctgagagctacacgctgacgccggaggtgggggagctcattgagaaggtgcgcaaagcgcaccaggaaaccttccctgccctctgccagctgggcaaatacactacgaacaacagctcagaacaacgtgtctctctggacattgacctctgggacaagttcagtgaactctccaccaagtgcatcattaagactgtggagttcgccaagcagctgcccggcttcaccaccctcaccatcgccgaccagatcaccctcctcaaggctgcctgcctggacatcctgatcctgcggatctgcacgcggtacacgcccgagcaggacaccatgaccttctcggacgggctgaccctgaaccggacccagatgcacaacgctggcttcggccccctcaccgacctggtctttgccttcgccaaccagctgctgcccctggagatggatgatgcggagacggggctgctcagcgccatctgcctcatctgcggagaccgccaggacctggagcagccggaccgggtggacatgctgcaggagccgctgctggaggcgctaaaggtctacgtgcggaagcggaggcccagccgcccccacatgttccccaagatgctaatgaagattactgacctgcgaagcatcagcgccaagggggctgagcgggtgatcacgctgaagatggagatcccgggctccatgccgcctctcatccaggaaatgttggagaactcagagggcctggacactctgagcggacagccggggggtggggggcgggacgggggtggcctggcccccccgccaggcagctgtagccccagcctcagccccagctccaacagaagcagcccggccacccactccccgtgaccgcccacgccacatggacacagccctcgccctccgccccggcttttctctgcctttctaccgaccatgtgaccccgcaccagccctgcccccacctgccctccc

SEQ ID NO: 175412 - DNA, 3041 bp, Homo sapiens
  Payload ID: 14451
  Gene Symbol: RARA
  Gene Name: retinoic acid receptor, alpha
  Uniprot ID: P10276
  ENST ID: ENST00000425707
  CDS Start-End: 527-1624
ctcgctatggccgctgccatcgccccgcgcccctgagccgcggccccctggacggctcctctcccgggaccccgcaccctgatgccgagcagcaccagggcgccgggttagggcagacgctgtgctcgctggcaccccgaacgggttgcttcccccgctgcgagcatcacaggacatggccccctcagccacctagctggggcccatctaggagtggcatcttttttggtgccctgaaggccagctctggaccttcccaggaaaagtgccagctcacagaactgcttgaccaaaggaccggctcttgagacatcccccaacccacctggcccccagctagggtgggggctccaggagactgagattagcctgccctctttggacagcagctccaggacagggcgggtgggctgaccacccaaaccccatctgggcccaggccccatgccccgaggaggggtggtctgaagcccaccagagccccctgccagactgtctgcctcccttctgactgtggccgcttggcatggccagcaacagcagctcctgcccgacacctgggggcgggcacctcaatgggtacccggtgcctccctacgccttcttcttcccccctatgctgggtggactctccccgccaggcgctctgaccactctccagcaccagcttccagttagtggatatagcacaccatccccagccactgtgagaaacgaccgaaacaagaagaagaaggaggtgcccaagcccgagtgctctgagagctacacgctgacgccggaggtgggggagctcattgagaaggtgcgcaaagcgcaccaggaaaccttccctgccctctgccagctgggcaaatacactacgaacaacagctcagaacaacgtgtctctctggacattgacctctgggacaagttcagtgaactctccaccaagtgcatcattaagactgtggagttcgccaagcagctgcccggcttcaccaccctcaccatcgccgaccagatcaccctcctcaaggctgcctgcctggacatcctgatcctgcggatctgcacgcggtacacgcccgagcaggacaccatgaccttctcggacgggctgaccctgaaccggacccagatgcacaacgctggcttcggccccctcaccgacctggtctttgccttcgccaaccagctgctgcccctggagatggatgatgcggagacggggctgctcagcgccatctgcctcatctgcggagaccgccaggacctggagcagccggaccgggtggacatgctgcaggagccgctgctggaggcgctaaaggtctacgtgcggaagcggaggcccagccgcccccacatgttccccaagatgctaatgaagattactgacctgcgaagcatcagcgccaagggggctgagcgggtgatcacgctgaagatggagatcccgggctccatgccgcctctcatccaggaaatgttggagaactcagagggcctggacactctgagcggacagccggggggtggggggcgggacgggggtggcctggcccccccgccaggcagctgtagccccagcctcagccccagctccaacagaagcagcccggccacccactccccgtgaccgcccacgccacatggacacagccctcgccctccgccccggcttttctctgcctttctaccgaccatgtgaccccgcaccagccctgcccccacctgccctcccgggcagtactggggaccttccctgggggacggggagggaggaggcagcgactccttggacagaggcctgggccctcagtggactgcctgctcccacagcctgggctgacgtcagaggccgaggccaggaactgagtgaggcccctggtcctgggtctcaggatgggtcctgggggcctcgtgttcatcaagacacccctctgcccagctcaccacatcttcatcaccagcaaacgccaggacttggctcccccatcctcagaactcacaagccattgctccccagctggggaacctcaacctcccccctgcctcggttggtgacagagggggtgggacaggggcggggggttccccctgtacataccctgccataccaaccccaggtattaattctcgctggttttgtttttattttaatttttttgttttgatttttttaataagaattttcattttaagcacatttatactgaaggaatttgtgctgtgtattggggggagctggatccagagctggagggggtgggtccgggggagggagtggctcggaaggggcccccactctcctttcatgtccctgtgccccccagttctcctcctcagccttttcctcctcagttttctctttaaaactgtgaagtactaactttccaaggcctgccttcccctccctcccactggagaagccgccagcccctttctccctctgcctgaccactgggtgtggacggtgtggggcagccctgaaaggacaggctcctggccttggcacttgcctgcacccaccatgaggcatggagcagggcagagcaagggccccgggacagagttttcccagacctggctcctcggcagagctgcctcccgtcagggcccacatcatctaggctccccagcccccactgtgaaggggctggccaggggcccgagctgcccccacccccggcctcagccaccagcacccccatagggcccccagacaccacacacatgcgcgtgcgcacacacacaaacacacacacactggacagtagatgggccgacacacacttggcccgagttcctccatttccctggcctgccccccacccccaacctgtcccacccccgtgccccctccttaccccgcaggacgggcctacaggggggtctcccctcacccctgcacccccagctgggggagctggctctgccccgacctccttcaccaggggttggggccccttcccctggagcccgtgggtgcacctgttactgttgggctttccactgagatctactggataaagaataaagttctatttattcta

SEQ ID NO: 175413 - DNA, 813 bp, Homo sapiens
  Payload ID: 14451
  Gene Symbol: RARA
  Gene Name: retinoic acid receptor, alpha
  ENST ID: ENST00000475125
  CDS Start-End: 256-813
ctgggctaggggccttcttccgctgccgcggtacacccagagctacccccgcctctccccgggaggaggaaggacgccattgagacccagagcagcagttctgaagagatagtgcccagccctccctcgccaccccctctaccccgcatctacaagccttgctttgtctgtcaggacaagtcctcaggctaccactatggggtcagcgcctgtgagggctgcaagggcttcttccgccgcagcatccagaagaacatggtgtacacgtgtcaccgggacaagaactgcatcatcaacaaggtgacccggaaccgctgccagtactgccgactgcagaagtgctttgaagtgggcatgtccaaggagtctgtgagaaacgaccgaaacaagaagaagaaggaggtgcccaagcccgagtgctctgagagctacacgctgacgccggaggtgggggagctcattgagaaggtgcgcaaagcgcaccaggaaaccttccctgccctctgccagctgggcaaatacactacgaacaacagctcagaacaacgtgtctctctggacattgacctctgggacaagttcagtgaactctccaccaagtgcatcattaagactgtggagttcgccaagcagctgcccggcttcaccaccctcaccatcgccgaccagatcaccctcctcaaggctgcctgcctggacatcctgatcctgcggatctgcacgcggtacacgcccgagcaggacaccatgaccttctcggacgggctgaccctgaaccggacccagatgcacaacgctggcttcggccccctc

SEQ ID NO: 175414 - DNA, 733 bp, Homo sapiens
  Payload ID: 14451
  Gene Symbol: RARA
  Gene Name: retinoic acid receptor, alpha
  ENST ID: ENST00000577646
  CDS Start-End: 535-733
cccagaagcaggggggaatcctgaatcgagctgagagggcttccccggttctcctgggaaccccatcggccccctgccagcacacacctgagcaggtgtgtgactctggggtgtaacgcgtgggcagctagggatgctgatgctggagaagggatcctggcaccttctgaggcatcacaggacatggccccctcagccacctagctggggcccatctaggagtggcatcttttttggtgccctgaaggccagctctggaccttcccaggaaaagtgccagctcacagaactgcttgaccaaaggaccggctcttgagacatcccccaacccacctggcccccagctagggtgggggctccaggagactgagattagcctgccctctttggacagcagctccaggacagggcgggtgggctgaccacccaaaccccatctgggcccaggccccatgccccgaggaggggtggtctgaagcccaccagagccccctgccagactgtctgcctcccttctgactgtggccgcttggcatggccagcaacagcagctcctgcccgacacctgggggcgggcacctcaatgggtacccggtgcctccctacgccttcttcttcccccctatgctgggtggactctccccgccaggcgctctgaccactctccagcaccagcttccagttagtggatatagcacaccatccccagccaccattgagacccagagcagca

SEQ ID NO: 175415 - DNA, 3084 bp, Homo sapiens
  Payload ID: 14452
  Gene Symbol: RARB
  Gene Name: retinoic acid receptor, beta
  Uniprot ID: P10826
  ENST ID: ENST00000330688
  CDS Start-End: 422-1768
tctttgccaaaggggggaccagaattcccccatgcgagctgtttgaggactgggatgccgagaacgcgagcgatccgagcagggtttgtctgggcaccgtcggggtaggatccggaacgcattcggaaggctttttgcaagcatttacttggaaggagaacttgggatctttctgggaaccccccgccccggctggattggccgagcaagcctggaaaatggtaaatgatcatttggatcaattacaggcttttagctggcttgtctgtcataattcatgattcggggctgggaaaaagaccaacagcctacgtgccaaaaaaggggcagagtttgatggagttgggtggacttttctatgccatttgcctccacacctagaggataagcacttttgcagacattcagtgcaagggagatcatgtttgactgtatggatgttctgtcagtgagtcctgggcaaatcctggatttctacactgcgagtccgtcttcctgcatgctccaggagaaagctctcaaagcatgcttcagtggattgacccaaaccgaatggcagcatcggcacactgctcaatcaattgaaacacagagcaccagctctgaggaactcgtcccaagccccccatctccacttcctccccctcgagtgtacaaaccctgcttcgtctgccaggacaaatcatcagggtaccactatggggtcagcgcctgtgagggatgtaagggctttttccgcagaagtattcagaagaatatgatttacacttgtcaccgagataagaactgtgttattaataaagtcaccaggaatcgatgccaatactgtcgactccagaagtgctttgaagtgggaatgtccaaagaatctgtcaggaatgacaggaacaagaaaaagaaggagacttcgaagcaagaatgcacagagagctatgaaatgacagctgagttggacgatctcacagagaagatccgaaaagctcaccaggaaactttcccttcactctgccagctgggtaaatacaccacgaattccagtgctgaccatcgagtccgactggacctgggcctctgggacaaattcagtgaactggccaccaagtgcattattaagatcgtggagtttgctaaacgtctgcctggtttcactggcttgaccatcgcagaccaaattaccctgctgaaggccgcctgcctggacatcctgattcttagaatttgcaccaggtataccccagaacaagacaccatgactttctcagacggccttaccctaaatcgaactcagatgcacaatgctggatttggtcctctgactgaccttgtgttcacctttgccaaccagctcctgcctttggaaatggatgacacagaaacaggccttctcagtgccatctgcttaatctgtggagaccgccaggaccttgaggaaccgacaaaagtagataagctacaagaaccattgctggaagcactaaaaatttatatcagaaaaagacgacccagcaagcctcacatgtttccaaagatcttaatgaaaatcacagatctccgtagcatcagtgctaaaggtgcagagcgtgtaattaccttgaaaatggaaattcctggatcaatgccacctctcattcaagaaatgctggagaattctgaaggacatgaacccttgaccccaagttcaagtgggaacacagcagagcacagtcctagcatctcacccagctcagtggaaaacagtggggtcagtcagtcaccactcgtgcaataagacattttctagctacttcaaacattccccagtaccttcagttccaggatttaaaatgcaagaaaaaacatttttactgctgcttagtttttggactgaaaagatattaaaactcaagaaggaccaagaagttttcatatgtatcaatatatatactcctcactgtgtaacttacctagaaatacaaacttttccaattttaaaaaatcagccatttcatgcaaccagaaactagttaaaagcttctattttcctctttgaacactcaagattgcatggcaaagacccagtcaaaatgatttacccctggttaagtttctgaagactttgtacatacagaagtatggctctgttctttctatactgtatgtttggtgctttccttttgtcttgcatactcaaaataaccatgacaccaaggttatgaaatagactactgtacacgtctacctaggttcaaaaagataactgtcttgctttcatggaatagtcaagacatcaaggtaaggaaacaggactattgacaggactattgtacagtatgacaagataaggctgaagatattctactttagttagtatggaagcttgtctttgctctttctgatgctctcaaactgcatcttttatttcatgttgcccagtaaaagtatacaaattccctgcactagcagaagagaattctgtatcagtgtaactgccagttcagttaatcaaatgtcatttgttcaattgttaatgtcactttaaattaaaagtggtttattacttgtttaatgacataactacacagttagttaaaaaaaatttttttacagtaatgatagcctccaaggcagaaacacttttcagtgttaagtttttgtttacttgttcacaagccattagggaaatttcatgggataattagcaggctggtctaccacctggaccatgtaactctagtgtccttcctgattcatgcctgatattgggatttttttttccagccttcttgatgccaaggggctaattaatattaacaactcccaaagaaacaggcatagaatctgcctcctttgaccttgttcaatcactatgaagcagagtgaaagctgtggtagagtggttaacagatacaagtgtcagtttcttagttctcatttaagcactagtggaattttttttttttgatatattagcaagtctgtgatgtactttcactggctctgtttgtacattgagattgtttgtttaacaatgctttctatgttcatatactgtttacctttttccatggagtctcctggcaaagaataaaatatatttattttaaa

SEQ ID NO: 175416 - DNA, 1273 bp, Homo sapiens
  Payload ID: 14452
  Gene Symbol: RARB
  Gene Name: retinoic acid receptor, beta
  ENST ID: ENST00000383772
  CDS Start-End: 67-1273
ttggtttaagacctggagtgatgtgttcctgctccagagcacctttctttctgtgaggcccgaaacatgaccaccagcggccacgcatgtccggtcccagcagtgaacggacacatgactcactatccagccacaccctacccgttactctttccacctgtcatcggaggactttccctgcctcccctccatggccttcatggacatccgcctccgagtggatgcagcaccccgtcgccggcaacaattgaaacacagagcaccagctctgaggaactcgtcccaagccccccatctccacttcctccccctcgagtgtacaaaccctgcttcgtctgccaggacaaatcatcagggtaccactatggggtcagcgcctgtgagggatgtaagggctttttccgcagaagtattcagaagaatatgatttacacttgtcaccgagataagaactgtgttattaataaagtcaccaggaatcgatgccaatactgtcgactccagaagtgctttgaagtgggaatgtccaaagaatctgtcaggaatgacaggaacaagaaaaagaaggagacttcgaagcaagaatgcacagagagctatgaaatgacagctgagttggacgatctcacagagaagatccgaaaagctcaccaggaaactttcccttcactctgccagctgggtaaatacaccacgaattccagtgctgaccatcgagtccgactggacctgggcctctgggacaaattcagtgaactggccaccaagtgcattattaagatcgtggagtttgctaaacgtctgcctggtttcactggcttgaccatcgcagaccaaattaccctgctgaaggccgcctgcctggacatcctgattcttagaatttgcaccaggtataccccagaacaagacaccatgactttctcagacggccttaccctaaatcgaactcagatgcacaatgctggatttggtcctctgactgaccttgtgttcacctttgccaaccagctcctgcctttggaaatggatgacacagaaacaggccttctcagtgccatctgcttaatctgtggagaccgccaggaccttgaggaaccgacaaaagtagataagctacaagaaccattgctggaagcactaaaaatttatatcagaaaaagacgacccagcaagcctcacatgtttccaaagatcttaatgaaaatcacagatctccgtagcatcagtgctaaaggtgcagagcgtgtaattaccttgaaaatggaaattc

SEQ ID NO: 175417 - DNA, 2590 bp, Homo sapiens
  Payload ID: 14452
  Gene Symbol: RARB
  Gene Name: retinoic acid receptor, beta
  Uniprot ID: P10826
  ENST ID: ENST00000458646
  CDS Start-End: 264-1274
agacaaacccaaaacatttatgtgcatagaaaaaaattctggaaggtcgtacacagtgaatttctctgagtgaaaagattgtggcaattgaaacacagagcaccagctctgaggaactcgtcccaagccccccatctccacttcctccccctcgagtgtacaaaccctgcttcgtctgccaggacaaatcatcagggtaccactatggggtcagcgcctgtgagggatgtaagggctttttccgcagaagtattcagaagaatatgatttacacttgtcaccgagataagaactgtgttattaataaagtcaccaggaatcgatgccaatactgtcgactccagaagtgctttgaagtgggaatgtccaaagaatctgtcaggaatgacaggaacaagaaaaagaaggagacttcgaagcaagaatgcacagagagctatgaaatgacagctgagttggacgatctcacagagaagatccgaaaagctcaccaggaaactttcccttcactctgccagctgggtaaatacaccacgaattccagtgctgaccatcgagtccgactggacctgggcctctgggacaaattcagtgaactggccaccaagtgcattattaagatcgtggagtttgctaaacgtctgcctggtttcactggcttgaccatcgcagaccaaattaccctgctgaaggccgcctgcctggacatcctgattcttagaatttgcaccaggtataccccagaacaagacaccatgactttctcagacggccttaccctaaatcgaactcagatgcacaatgctggatttggtcctctgactgaccttgtgttcacctttgccaaccagctcctgcctttggaaatggatgacacagaaacaggccttctcagtgccatctgcttaatctgtggagaccgccaggaccttgaggaaccgacaaaagtagataagctacaagaaccattgctggaagcactaaaaatttatatcagaaaaagacgacccagcaagcctcacatgtttccaaagatcttaatgaaaatcacagatctccgtagcatcagtgctaaaggtgcagagcgtgtaattaccttgaaaatggaaattcctggatcaatgccacctctcattcaagaaatgctggagaattctgaaggacatgaacccttgaccccaagttcaagtgggaacacagcagagcacagtcctagcatctcacccagctcagtggaaaacagtggggtcagtcagtcaccactcgtgcaataagacattttctagctacttcaaacattccccagtaccttcagttccaggatttaaaatgcaagaaaaaacatttttactgctgcttagtttttggactgaaaagatattaaaactcaagaaggaccaagaagttttcatatgtatcaatatatatactcctcactgtgtaacttacctagaaatacaaacttttccaattttaaaaaatcagccatttcatgcaaccagaaactagttaaaagcttctattttcctctttgaacactcaagattgcatggcaaagacccagtcaaaatgatttacccctggttaagtttctgaagactttgtacatacagaagtatggctctgttctttctatactgtatgtttggtgctttccttttgtcttgcatactcaaaataaccatgacaccaaggttatgaaatagactactgtacacgtctacctaggttcaaaaagataactgtcttgctttcatggaatagtcaagacatcaaggtaaggaaacaggactattgacaggactattgtacagtatgacaagataaggctgaagatattctactttagttagtatggaagcttgtctttgctctttctgatgctctcaaactgcatcttttatttcatgttgcccagtaaaagtatacaaattccctgcactagcagaagagaattctgtatcagtgtaactgccagttcagttaatcaaatgtcatttgttcaattgttaatgtcactttaaattaaaagtggtttattacttgtttaatgacataactacacagttagttaaaaaaaatttttttacagtaatgatagcctccaaggcagaaacacttttcagtgttaagtttttgtttacttgttcacaagccattagggaaatttcatgggataattagcaggctggtctaccacctggaccatgtaactctagtgtccttcctgattcatgcctgatattgggatttttttttccagccttcttgatgccaaggggctaattaatattaacaactcccaaagaaacaggcatagaatctgcctcctttgaccttgttcaatcactatgaagcagagtgaaagctgtggtagagtggttaacagatacaagtgtcagtttcttagttctcatttaagcactagtggaattttttttttttgatatattagcaagtctgtgatgtactttcactggctctgtttgtacattgagattgtttgtttaacaatgctttctatgttcatatactgtttacctttttccatggagtctcctggcaaagaataaaatatatttattttaaa

SEQ ID NO: 175418 - DNA, 2775 bp, Homo sapiens
  Payload ID: 14452
  Gene Symbol: RARB
  Gene Name: retinoic acid receptor, beta
  Uniprot ID: P10826
  ENST ID: ENST00000437042
  CDS Start-End: 449-1459
gtgacagaagtagtaggaagtgagctgttcagaggcaggagggtctattctttgccaaaggggggaccagaattcccccatgcgagctgtttgaggactgggatgccgagaacgcgagcgatccgagcagggtttgtctgggcaccgtcggggtaggatccggaacgcattcggaaggctttttgcaagcatttacttggaaggagaacttgggatctttctgggaaccccccgccccggctggattggccgagcaagcctggaaaatgcaattgaaacacagagcaccagctctgaggaactcgtcccaagccccccatctccacttcctccccctcgagtgtacaaaccctgcttcgtctgccaggacaaatcatcagggtaccactatggggtcagcgcctgtgagggatgtaagggctttttccgcagaagtattcagaagaatatgatttacacttgtcaccgagataagaactgtgttattaataaagtcaccaggaatcgatgccaatactgtcgactccagaagtgctttgaagtgggaatgtccaaagaatctgtcaggaatgacaggaacaagaaaaagaaggagacttcgaagcaagaatgcacagagagctatgaaatgacagctgagttggacgatctcacagagaagatccgaaaagctcaccaggaaactttcccttcactctgccagctgggtaaatacaccacgaattccagtgctgaccatcgagtccgactggacctgggcctctgggacaaattcagtgaactggccaccaagtgcattattaagatcgtggagtttgctaaacgtctgcctggtttcactggcttgaccatcgcagaccaaattaccctgctgaaggccgcctgcctggacatcctgattcttagaatttgcaccaggtataccccagaacaagacaccatgactttctcagacggccttaccctaaatcgaactcagatgcacaatgctggatttggtcctctgactgaccttgtgttcacctttgccaaccagctcctgcctttggaaatggatgacacagaaacaggccttctcagtgccatctgcttaatctgtggagaccgccaggaccttgaggaaccgacaaaagtagataagctacaagaaccattgctggaagcactaaaaatttatatcagaaaaagacgacccagcaagcctcacatgtttccaaagatcttaatgaaaatcacagatctccgtagcatcagtgctaaaggtgcagagcgtgtaattaccttgaaaatggaaattcctggatcaatgccacctctcattcaagaaatgctggagaattctgaaggacatgaacccttgaccccaagttcaagtgggaacacagcagagcacagtcctagcatctcacccagctcagtggaaaacagtggggtcagtcagtcaccactcgtgcaataagacattttctagctacttcaaacattccccagtaccttcagttccaggatttaaaatgcaagaaaaaacatttttactgctgcttagtttttggactgaaaagatattaaaactcaagaaggaccaagaagttttcatatgtatcaatatatatactcctcactgtgtaacttacctagaaatacaaacttttccaattttaaaaaatcagccatttcatgcaaccagaaactagttaaaagcttctattttcctctttgaacactcaagattgcatggcaaagacccagtcaaaatgatttacccctggttaagtttctgaagactttgtacatacagaagtatggctctgttctttctatactgtatgtttggtgctttccttttgtcttgcatactcaaaataaccatgacaccaaggttatgaaatagactactgtacacgtctacctaggttcaaaaagataactgtcttgctttcatggaatagtcaagacatcaaggtaaggaaacaggactattgacaggactattgtacagtatgacaagataaggctgaagatattctactttagttagtatggaagcttgtctttgctctttctgatgctctcaaactgcatcttttatttcatgttgcccagtaaaagtatacaaattccctgcactagcagaagagaattctgtatcagtgtaactgccagttcagttaatcaaatgtcatttgttcaattgttaatgtcactttaaattaaaagtggtttattacttgtttaatgacataactacacagttagttaaaaaaaatttttttacagtaatgatagcctccaaggcagaaacacttttcagtgttaagtttttgtttacttgttcacaagccattagggaaatttcatgggataattagcaggctggtctaccacctggaccatgtaactctagtgtccttcctgattcatgcctgatattgggatttttttttccagccttcttgatgccaaggggctaattaatattaacaactcccaaagaaacaggcatagaatctgcctcctttgaccttgttcaatcactatgaagcagagtgaaagctgtggtagagtggttaacagatacaagtgtcagtttcttagttctcatttaagcactagtggaattttttttttttgatatattagcaagtctgtgatgtactttcactggctctgtttgtacattgagattgtttgtttaacaatgctttctatgttcatatactgtttacctttttccatggagtctcctggcaaagaataaaatatatttattttaaa

SEQ ID NO: 175419 - DNA, 1836 bp, Homo sapiens
  Payload ID: 14453
  Gene Symbol: RARG
  Gene Name: retinoic acid receptor, gamma
  Uniprot ID: P13631
  ENST ID: ENST00000338561
  CDS Start-End: 160-1491
ctcttccccgcccaccccttacccgcatgcagcccagcgccctatgctagccctccccctccccccctgctggagcggggcgccgccgggggaggagggggaatcggctgcgggtccttggtgtttccagcacccagtttcccttcaagccgggtcgcgatgtacgactgtatggaaacgtttgccccgggtccgcgacggctgtacggggcggccgggcccggggccggcttgctgcgcagagccaccggcggctcctgtttcgccggacttgaatcttttgcctggccgcaacccgccagcctgcaatcggtggagacacagagcaccagctcagaggagatggtgcccagctcgccctcgccccctccgcctcctcgggtctacaagccatgcttcgtgtgcaatgacaagtcctctggctaccactatggggtcagctcttgtgaaggctgcaagggcttctttcgccgaagcatccagaagaacatggtgtacacgtgtcaccgcgacaaaaactgtatcatcaacaaggtgaccaggaatcgctgccagtactgccggctacagaagtgcttcgaagtgggcatgtccaaggaagctgtgcgaaatgaccggaacaagaagaagaaagaggtgaaggaagaagggtcacctgacagctatgagctgagccctcagttagaagagctcatcaccaaggtcagcaaagcccatcaggagactttcccctcgctctgccagctgggcaagtataccacgaactccagtgcagaccaccgcgtgcagctggatctggggctgtgggacaagttcagtgagctggctaccaagtgcatcatcaagatcgtggagtttgccaagcggttgcctggctttacagggctcagcattgctgaccagatcactctgctcaaagctgcctgcctagatatcctgatgctgcgtatctgcacaaggtacaccccagagcaggacaccatgaccttctccgacgggctgaccctgaaccggacccagatgcacaatgccggcttcgggcccctcacagaccttgtctttgcctttgctgggcagctcctgcccctggagatggatgacaccgagacagggctgctcagcgccatctgcctcatctgcggagaccgcatggacctggaggagcccgaaaaagtggacaagctgcaggagccactgctggaagccctgaggctgtacgcccggcgccggcggcccagccagccctacatgttcccaaggatgctaatgaaaatcaccgacctccggggcatcagcactaagggagctgaaagggccattactctgaagatggagattccaggcccgatgcctcccttaatccgagagatgctggagaaccctgaaatgtttgaggatgactcctcgcagcctggtccccaccccaatgcctctagcgaggatgaggttcctgggggccagggcaaagggggcctgaagtccccagcctgaccagggcccctgacctccccgctgtgggggttggggcttcaggcagcagactgaccatctcccagaccgccagtgactgggggaggacctgctctgccctctccccaccccttccaatgagctccttgtttttgccaaagtttctaggggtgcctctgtgttcatccccttcctgatctaaccggctccctcgccagtcccgggggcctgccctgctcccaccaggagagagggcaaagggatgagcctgggtttggactctaaaatctcagcactgccccatgggtcctagacttcccagggcaagaggaagaccctgccattccacagccccttcctctgcca

SEQ ID NO: 175420 - DNA, 2640 bp, Homo sapiens
  Payload ID: 14453
  Gene Symbol: RARG
  Gene Name: retinoic acid receptor, gamma
  Uniprot ID: P13631
  ENST ID: ENST00000394426
  CDS Start-End: 383-1531
aggttggggggggggtggggagggagaaaaagaaagaaaatattttccgtgtccccgcctgcagagtcagtgtgcggtttgggagaaaatgtgtcggatattttggggcggtcacgtgggcgggcgggctccgagaggccccgggacagtcccagcctagagccgtgcccccccaggagccccccagtacggcgagccccggacattgcgacgctccatccaagagactgcccgacgccgggacctcggggctccgccgcctcccttccccctcccactccagcagctacggcccagttccctcaacctgacccagtatgtagaagccagtctctgcaggcggccagcggcggtggagacacagagcaccagctcagaggagatggtgcccagctcgccctcgccccctccgcctcctcgggtctacaagccatgcttcgtgtgcaatgacaagtcctctggctaccactatggggtcagctcttgtgaaggctgcaagggcttctttcgccgaagcatccagaagaacatggtgtacacgtgtcaccgcgacaaaaactgtatcatcaacaaggtgaccaggaatcgctgccagtactgccggctacagaagtgcttcgaagtgggcatgtccaaggaagctgtgcgaaatgaccggaacaagaagaagaaagaggtgaaggaagaagggtcacctgacagctatgagctgagccctcagttagaagagctcatcaccaaggtcagcaaagcccatcaggagactttcccctcgctctgccagctgggcaagtataccacgaactccagtgcagaccaccgcgtgcagctggatctggggctgtgggacaagttcagtgagctggctaccaagtgcatcatcaagatcgtggagtttgccaagcggttgcctggctttacagggctcagcattgctgaccagatcactctgctcaaagctgcctgcctagatatcctgatgctgcgtatctgcacaaggtacaccccagagcaggacaccatgaccttctccgacgggctgaccctgaaccggacccagatgcacaatgccggcttcgggcccctcacagaccttgtctttgcctttgctgggcagctcctgcccctggagatggatgacaccgagacagggctgctcagcgccatctgcctcatctgcggagaccgcatggacctggaggagcccgaaaaagtggacaagctgcaggagccactgctggaagccctgaggctgtacgcccggcgccggcggcccagccagccctacatgttcccaaggatgctaatgaaaatcaccgacctccggggcatcagcactaagggagctgaaagggccattactctgaagatggagattccaggcccgatgcctcccttaatccgagagatgctggagaaccctgaaatgtttgaggatgactcctcgcagcctggtccccaccccaatgcctctagcgaggatgaggttcctgggggccagggcaaagggggcctgaagtccccagcctgaccagggcccctgacctccccgctgtgggggttggggcttcaggcagcagactgaccatctcccagaccgccagtgactgggggaggacctgctctgccctctccccaccccttccaatgagctccttgtttttgccaaagtttctaggggtgcctctgtgttcatccccttcctgatctaaccggctccctcgccagtcccgggggcctgccctgctcccaccaggagagagggcaaagggatgagcctgggtttggactctaaaatctcagcactgccccatgggtcctagacttcccagggcaagaggaagaccctgccattccacagccccttcctctgccaggtgcttggctctctgagagcaaacaggaacactagagaccaaaaaggggacaaaggagaagggctgagcccaccttcttgctcctacccttggtgcctaatgctgtgtgatgcacctgcagggtgtgtgctagcctctgtgccccgtccttgtgccaggtcaaggtgggggcaggctgggccctgcatttctggggcaggaacagagggtgaaagggacagatagatgcaggtccattctgcacctcttggctcgggtgcagagttcaccctgtgccctccgttataagtccctcccccagccctgtcatgtgccttgggctcctcctgccctccatctcagccattggggcagggaccctcctacactacagaggggccaggggatccctctctccctagtgccttccaccctttactccccagagcagcttggcccagggaggggggatgctgcttagctgatcccgccctgacccagaggaagcctctatttatttattagcttttgtttacaccgtggaattgaccccttcctccaggggtcttgggtgggggagcccagggcccctgtgacccctcctttcttcctccaatccccagtttgtatttagctgccaaataagattcccattggctccctgtgttctcttggggggtcagggtgctgtcccctcccctctgtttacatctcccctctaccccgctgtatcgcatattgctgagttttctatttttgcaaaataaagtgatggaaactcatg

SEQ ID NO: 175421 - DNA, 2959 bp, Homo sapiens
  Payload ID: 14453
  Gene Symbol: RARG
  Gene Name: retinoic acid receptor, gamma
  Uniprot ID: P13631
  ENST ID: ENST00000425354
  CDS Start-End: 489-1853
tggggggggggtggggagggagaaaaagaaagaaaatattttccgtgtccccgcctgcagagtcagtgtgcggtttgggagaaaatgtgtcggatattttggggcggtcacgtgggcgggcgggctccgagaggccccgggacagtcccagcctagagccgtgcccccccaggagccccccagtacggcgagccccggacattgcgacgctccatccaagagactgcccgacgccgggacctcggggctccgccgcctcccttccccctcccactccagcagctacggcccagttccctcaacctgacccagtatgtagaagccagtctctgcaggcggccagcgggacttttggaggcccagtgggcaggccaggcagggcgggtacggagcctcccaggctggggcagtgggcatgggcaggggctgtggctgaagacctcgcccgcccactgcagaccccaggggactctcacaccgcagctgccatggccaccaataaggagcgactctttgcggctggtgccctggggcctggatctggctacccaggggcaggtttccccttcgccttcccaggggcactcagggggtctccgcctttcgagatgctgagccctagcttccggggcctgggccagcctgacctccccaaggagatggcctctctgtcggtggagacacagagcaccagctcagaggagatggtgcccagctcgccctcgccccctccgcctcctcgggtctacaagccatgcttcgtgtgcaatgacaagtcctctggctaccactatggggtcagctcttgtgaaggctgcaagggcttctttcgccgaagcatccagaagaacatggtgtacacgtgtcaccgcgacaaaaactgtatcatcaacaaggtgaccaggaatcgctgccagtactgccggctacagaagtgcttcgaagtgggcatgtccaaggaagctgtgcgaaatgaccggaacaagaagaagaaagaggtgaaggaagaagggtcacctgacagctatgagctgagccctcagttagaagagctcatcaccaaggtcagcaaagcccatcaggagactttcccctcgctctgccagctgggcaagtataccacgaactccagtgcagaccaccgcgtgcagctggatctggggctgtgggacaagttcagtgagctggctaccaagtgcatcatcaagatcgtggagtttgccaagcggttgcctggctttacagggctcagcattgctgaccagatcactctgctcaaagctgcctgcctagatatcctgatgctgcgtatctgcacaaggtacaccccagagcaggacaccatgaccttctccgacgggctgaccctgaaccggacccagatgcacaatgccggcttcgggcccctcacagaccttgtctttgcctttgctgggcagctcctgcccctggagatggatgacaccgagacagggctgctcagcgccatctgcctcatctgcggagaccgcatggacctggaggagcccgaaaaagtggacaagctgcaggagccactgctggaagccctgaggctgtacgcccggcgccggcggcccagccagccctacatgttcccaaggatgctaatgaaaatcaccgacctccggggcatcagcactaagggagctgaaagggccattactctgaagatggagattccaggcccgatgcctcccttaatccgagagatgctggagaaccctgaaatgtttgaggatgactcctcgcagcctggtccccaccccaatgcctctagcgaggatgaggttcctgggggccagggcaaagggggcctgaagtccccagcctgaccagggcccctgacctccccgctgtgggggttggggcttcaggcagcagactgaccatctcccagaccgccagtgactgggggaggacctgctctgccctctccccaccccttccaatgagctccttgtttttgccaaagtttctaggggtgcctctgtgttcatccccttcctgatctaaccggctccctcgccagtcccgggggcctgccctgctcccaccaggagagagggcaaagggatgagcctgggtttggactctaaaatctcagcactgccccatgggtcctagacttcccagggcaagaggaagaccctgccattccacagccccttcctctgccaggtgcttggctctctgagagcaaacaggaacactagagaccaaaaaggggacaaaggagaagggctgagcccaccttcttgctcctacccttggtgcctaatgctgtgtgatgcacctgcagggtgtgtgctagcctctgtgccccgtccttgtgccaggtcaaggtgggggcaggctgggccctgcatttctggggcaggaacagagggtgaaagggacagatagatgcaggtccattctgcacctcttggctcgggtgcagagttcaccctgtgccctccgttataagtccctcccccagccctgtcatgtgccttgggctcctcctgccctccatctcagccattggggcagggaccctcctacactacagaggggccaggggatccctctctccctagtgccttccaccctttactccccagagcagcttggcccagggaggggggatgctgcttagctgatcccgccctgacccagaggaagcctctatttatttattagcttttgtttacaccgtggaattgaccccttcctccaggggtcttgggtgggggagcccagggcccctgtgacccctcctttcttcctccaatccccagtttgtatttagctgccaaataagattcccattggctccctgtgttctcttggggggtcagggtgctgtcccctcccctctgtttacatctcccctctaccccgctgtatcgcatattgctgagttttctatttttgcaaaataaagtgatggaaactc

SEQ ID NO: 175422 - DNA, 1779 bp, Homo sapiens
  Payload ID: 14453
  Gene Symbol: RARG
  Gene Name: retinoic acid receptor, gamma
  Uniprot ID: P13631
  ENST ID: ENST00000543726
  CDS Start-End: 198-1496
caagccccaccccccacccctccaggcttcgcttttaaaaaaggtctccccagtgctagctgccgaagcacccagataagagctggacggaggctaaagcggcagccccagcttcgcgccccgcccagtccctttcccctgctggggatcccccctcttccccgcccaccccttacccgcatgcagcccagcgccctatgctagccctccccctccccccctgctggagcggggcgccgccgggggaggagggggaatcggctgcgggtccttggtgtttccagcacccagtttcccttcaagccgggtcgcgatgtacgactgtatggaaacgtttgccccgggtccgcgacggctgtacggggcggccgggcccggggccggcttgctgcgcagagccaccggcggctcctgtttcgccggacttgaatcttttgcctggccgcaacccgccagcctgcaatggcttctttcgccgaagcatccagaagaacatggtgtacacgtgtcaccgcgacaaaaactgtatcatcaacaaggtgaccaggaatcgctgccagtactgccggctacagaagtgcttcgaagtgggcatgtccaaggaagctgtgcgaaatgaccggaacaagaagaagaaagaggtgaaggaagaagggtcacctgacagctatgagctgagccctcagttagaagagctcatcaccaaggtcagcaaagcccatcaggagactttcccctcgctctgccagctgggcaagtataccacgaactccagtgcagaccaccgcgtgcagctggatctggggctgtgggacaagttcagtgagctggctaccaagtgcatcatcaagatcgtggagtttgccaagcggttgcctggctttacagggctcagcattgctgaccagatcactctgctcaaagctgcctgcctagatatcctgatgctgcgtatctgcacaaggtacaccccagagcaggacaccatgaccttctccgacgggctgaccctgaaccggacccagatgcacaatgccggcttcgggcccctcacagaccttgtctttgcctttgctgggcagctcctgcccctggagatggatgacaccgagacagggctgctcagcgccatctgcctcatctgcggagaccgcatggacctggaggagcccgaaaaagtggacaagctgcaggagccactgctggaagccctgaggctgtacgcccggcgccggcggcccagccagccctacatgttcccaaggatgctaatgaaaatcaccgacctccggggcatcagcactaagggagctgaaagggccattactctgaagatggagattccaggcccgatgcctcccttaatccgagagatgctggagaaccctgaaatgtttgaggatgactcctcgcagcctggtccccaccccaatgcctctagcgaggatgaggttcctgggggccagggcaaagggggcctgaagtccccagcctgaccagggcccctgacctccccgctgtgggggttggggcttcaggcagcagactgaccatctcccagaccgccagtgactgggggaggacctgctctgccctctccccaccccttccaatgagctccttgtttttgccaaagtttctaggggtgcctctgtgttcatccccttcctgatctaaccggctccctcgccagtcccgggggcctgccctgctcccaccaggagagagggcaaagggatgagcctgggtttggactctaaaatctcagcactgccccat

SEQ ID NO: 175423 - DNA, 944 bp, Homo sapiens
  Payload ID: 14453
  Gene Symbol: RARG
  Gene Name: retinoic acid receptor, gamma
  ENST ID: ENST00000550362
  CDS Start-End: 899-944
tcccagccacagttcctcctgccctcctctccagcctctccccttccaaatccaggcctaaaggtgggggacaactggcagccagggacccaggcgccctaactcctggagcttactccaggcaagatgacagggaagatgtctgtgagccctggcctcagcacccccagcaacagccactagtcaaccagtttgctcctgggaccaaaggactgaggtgggctaggggaagggagaggctacttggatctgcaggtgaaggctgagcaaagagtaagggcaggagcatctattctagatctggcatactcctgcccggccaatccagcactgggagggagtgggtaccgccccattgcctaccctggggaggcgccagagactggcctcgcaagagtcacagcctggccacagacaactcaactagtccccccaaaaggcagaaaggagaaaagtgccagagagaaaagagtcagtgtgcggtttgggagaaaatgtgtcggatattttggggcggtcacgtgggcgggcgggctccgagaggccccgggacagtcccagcctagagccgtgcccccccaggagccccccagtacggcgagccccggacattgcgacgctccatccaagagactgcccgacgccgggacctcggggctccgccgcctcccttccccctcccactccagcagctacggcccagttccctcaacctgacccagtatgtagaagccagtctctgcaggcggccagcgggacttttggaggcccagtgggcaggccaggcagggcgggtacggagcctcccaggctggggcagtgggcatgggcaggggctgtggctgaagacctcgcccgcccactgcagaccccaggggactctcacaccgcagctgccatggccaccaataaggagcgactctttgcggctggtgccctggggc

SEQ ID NO: 175424 - DNA, 555 bp, Homo sapiens
  Payload ID: 14453
  Gene Symbol: RARG
  Gene Name: retinoic acid receptor, gamma
  ENST ID: ENST00000546717
  CDS Start-End: 384-555
ttttccgtgtccccgcctgcagagtcagtgtgcggtttgggagaaaatgtgtcggatattttggggcggtcacgtgggcgggcgggctccgagaggccccgggacagtcccagcctagagccgtgcccccccaggagccccccagtacggcgagccccggacattgcgacgctccatccaagagactgcccgacgccgggacctcggggctccgccgcctcccttccccctcccactccaggacttttggaggcccagtgggcaggccaggcagggcgggtacggagcctcccaggctggggcagtgggcatgggcaggggctgtggctgaagacctcgcccgcccactgcagaccccaggggactctcacaccgcagctgccatggccaccaataaggagcgactctttgcggctggtgccctggggcctggatctggctacccaggggcaggtttccccttcgccttcccaggggcactcagggggtctccgcctttcgagatgctgagccctagcttccggggcctgggccagcctgacctccccaaggaga

SEQ ID NO: 175425 - DNA, 586 bp, Homo sapiens
  Payload ID: 14453
  Gene Symbol: RARG
  Gene Name: retinoic acid receptor, gamma
  ENST ID: ENST00000551158
  CDS Start-End: 489-586
acagacaactcaactagtccccccaaaaggcagaaaggagaaaagtgccagagagaaaagagtcagtgtgcggtttgggagaaaatgtgtcggatattttggggcggtcacgtgggcgggcgggctccgagaggccccgggacagtcccagcctagagccgtgcccccccaggagccccccagtacggcgagccccggacattgcgacgctccatccaagagactgcccgacgccgggacctcggggctccgccgcctcccttccccctcccactccagcagctacggcccagttccctcaacctgacccagtatgtagaagccagtctctgcaggcggccagcgggacttttggaggcccagtgggcaggccaggcagggcgggtacggagcctcccaggctggggcagtgggcatgggcaggggctgtggctgaagacctcgcccgcccactgcagaccccaggggactctcacaccgcagctgccatggccaccaataaggagcgactctttgcggctggtgccctggggcctggatctggctacccaggggcaggtttccccttcgccttcccaggggcact

SEQ ID NO: 175426 - DNA, 1846 bp, Homo sapiens
  Payload ID: 14454
  Gene Symbol: RXRA
  Gene Name: retinoid X receptor, alpha
  Uniprot ID: P19793
  ENST ID: ENST00000481739
  CDS Start-End: 53-1441
cgcccgccgcccgctgcctgcgccgccggccgggcatgagttagtcgcagacatggacaccaaacatttcctgccgctcgatttctccacccaggtgaactcctccctcacctccccgacggggcgaggctccatggctgccccctcgctgcacccgtccctggggcctggcatcggctccccgggacagctgcattctcccatcagcaccctgagctcccccatcaacggcatgggcccgcctttctcggtcatcagctcccccatgggcccccactccatgtcggtgcccaccacacccaccctgggcttcagcactggcagcccccagctcagctcacctatgaaccccgtcagcagcagcgaggacatcaagccccccctgggcctcaatggcgtcctcaaggtccccgcccacccctcaggaaacatggcttccttcaccaagcacatctgcgccatctgcggggaccgctcctcaggcaagcactatggagtgtacagctgcgaggggtgcaagggcttcttcaagcggacggtgcgcaaggacctgacctacacctgccgcgacaacaaggactgcctgattgacaagcggcagcggaaccggtgccagtactgccgctaccagaagtgcctggccatgggcatgaagcgggaagccgtgcaggaggagcggcagcgtggcaaggaccggaacgagaatgaggtggagtcgaccagcagcgccaacgaggacatgccggtggagaggatcctggaggctgagctggccgtggagcccaagaccgagacctacgtggaggcaaacatggggctgaaccccagctcgccgaacgaccctgtcaccaacatttgccaagcagccgacaaacagcttttcaccctggtggagtgggccaagcggatcccacacttctcagagctgcccctggacgaccaggtcatcctgctgcgggcaggctggaatgagctgctcatcgcctccttctcccaccgctccatcgccgtgaaggacgggatcctcctggccaccgggctgcacgtccaccggaacagcgcccacagcgcaggggtgggcgccatctttgacagggtgctgacggagcttgtgtccaagatgcgggacatgcagatggacaagacggagctgggctgcctgcgcgccatcgtcctctttaaccctgactccaaggggctctcgaacccggccgaggtggaggcgctgagggagaaggtctatgcgtccttggaggcctactgcaagcacaagtacccagagcagccgggaaggttcgctaagctcttgctccgcctgccggctctgcgctccatcgggctcaaatgcctggaacatctcttcttcttcaagctcatcggggacacacccattgacaccttccttatggagatgctggaggcgccgcaccaaatgacttaggcctgcgggcccatcctttgtgcccacccgttctggccaccctgcctggacgccagctgttcttctcagcctgagccctgtccctgcccttctctgcctggcctgtttggactttggggcacagcctgtcactgctctgcctaagagatgtgttgtcaccctccttatttctgttactacttgtctgtggcccagggcagtggctttcctgaggcagcagccttcgtggcaagaactagcgtgagcccagccaggcgcctccccaccgggctctcaggacaccctgccacaccccacggggcttgggcgactacagggtcttcgggccccagccctggagctgcaggagttgggaacggggcttttgtttccgttgctgtttatcgatgctggttttcagaattc

SEQ ID NO: 175427 - DNA, 2908 bp, Homo sapiens
  Payload ID: 14455
  Gene Symbol: RXRB
  Gene Name: retinoid X receptor, beta
  Uniprot ID: P28702
  ENST ID: ENST00000374680
  CDS Start-End: 213-1814
ggcgggaactcgcgccgagacttcccgtctgtacaaagatggctgccacattggcgctgtcattttggtactgagcagagcgacgggcttaattcgacccaatccaggccagagtctttctctcaggggcttcctcgtgctcagctaatcctccgatcaatccttgggaatccctgggacctcttcggtatccctactctcagccagggatcatgtcttgggccgctcgcccgcccttcctccctcagcggcatgccgcagggcagtgtgggccggtgggggtgcgaaaagaaatgcattgtggggtcgcgtcccggtggcggcggcgacggccctggctggatcccgcagcggcggcggcggcggcggtggcaggcggagaacaacaaaccccggagccggagccaggggaggctggacgggacgggatgggcgacagcgggcgggactcccgaagcccagacagctcctccccaaatccccttccccagggagtccctcccccttctcctcctgggccacccctacccccttcaacagctccatcccttggaggctctggggccccacccccacccccgatgccaccacccccactgggctctccctttccagtcatcagttcttccatggggtcccctggtctgccccctccagctcccccaggattctccgggcctgtcagcagcccccagattaactcaacagtgtcactccctgggggtgggtctggcccccctgaagatgtgaagccaccagtcttaggggtccggggcctgcactgtccaccccctccaggtggccctggggctggcaaacggctatgtgcaatctgcggggacagaagctcaggcaaacactacggggtttacagctgtgagggttgcaagggcttcttcaaacgcaccatccgcaaagaccttacatactcttgccgggacaacaaagactgcacagtggacaagcgccagcggaaccgctgtcagtactgccgctatcagaagtgcctggccactggcatgaagagggaggcggtacaggaggagcgtcagcggggaaaggacaaggatggggatggggagggggctgggggagcccccgaggagatgcctgtggacaggatcctggaggcagagcttgctgtggaacagaagagtgaccagggcgttgagggtcctgggggaaccgggggtagcggcagcagcccaaatgaccctgtgactaacatctgtcaggcagctgacaaacagctattcacgcttgttgagtgggcgaagaggatcccacacttttcctccttgcctctggatgatcaggtcatattgctgcgggcaggctggaatgaactcctcattgcctccttctcacaccgatccattgatgttcgagatggcatcctccttgccacaggtcttcacgtgcaccgcaactcagcccattcagcaggagtaggagccatctttgatcgggtgctgacagagctagtgtccaaaatgcgtgacatgaggatggacaagacagagcttggctgcctgagggcaatcattctgtttaatccagatgccaagggcctctccaaccctagtgaggtggaggtcctgcgggagaaagtgtatgcatcactggagacctactgcaaacagaagtaccctgagcagcagggacggtttgccaagctgctgctacgtcttcctgccctccggtccattggccttaagtgtctagagcatctgtttttcttcaagctcattggtgacacccccatcgacaccttcctcatggagatgcttgaggctccccatcaactggcctgagctcagacccagacgtggtgcttctcacactggaggagcacacatccaagagggactccaagccctggggcagggtggggggccatgttcccagaaccttgatggggtgagaagtacagggcagaaccaagaacataaaccctccaagggatctgcttgatatcccaagttggaagggaccccagatacctgtgaggactggttgtctctcttcggtggccttgagtctctgaatttgtcgggttctcccatgatttggggtgatttctcaccctctgtccttcccccagcacaaagcactggccttgcctccaggaccttgcttccttctcatcttgcctcattttgcttcccatctgaagagtggaaatggggaactcccccagaggtggatactggggggcaggcctcccaagctgatggacatgagagtagggccctgacaggccttcctcctctcaaacctggcagatgggggcctctctggaagagggaggggccctgtcactgtccagagtctctttttacacttcacctccttctgcagtcagactgaaatataaaaaaggtggtggtggtggtgaaggggctggtggagatgtaggaaccgatctgctatttttaatttcctgtgaggatagagacttgcagttagactcaaagaagtactgtactttcccaggttgactaagaaatgccagtggtggaggtgggtgtttgggaaaggcagggccctgaaatggcctgtccctagggctctccaagcactagccttcccagcttcccgccgccccccctatctcttcctgtctaacttggggaaggggcctgggctgtgaggacagggcccccacaggggatggtttcacgagtgtagtcccggaggccttccctttacagctctcctccagccctgggcacatagcataggctggggacacaggatcctggcctgagaattgaggggaggtggccagcccgcagaggtggggtgctggggctgcatgatttttgccctgcgtcccttctctttggggctcctttcccctctcatacataaaatcgctttcaaattaaaatcgctgttttctgga

SEQ ID NO: 175428 - DNA, 2846 bp, Homo sapiens
  Payload ID: 14455
  Gene Symbol: RXRB
  Gene Name: retinoid X receptor, beta
  Uniprot ID: P28702
  ENST ID: ENST00000374685
  CDS Start-End: 139-1752
gcagagcgacgggcttaattcgacccaatccaggccagagtctttctctcaggggcttcctcgtgctcagctaatcctccgatcaatccttgggaatccctgggacctcttcggtatccctactctcagccagggatcatgtcttgggccgctcgcccgcccttcctccctcagcggcatgccgcagggcagtgtgggccggtgggggtgcgaaaagaaatgcattgtggggtcgcgtcccggtggcggcggcgacggccctggctggatcccgcagcggcggcggcggcggcggtggcaggcggagaacaacaaaccccggagccggagccaggggaggctggacgggacgggatgggcgacagcgggcgggactcccgaagcccagacagctcctccccaaatccccttccccagggagtccctcccccttctcctcctgggccacccctacccccttcaacagctccatcccttggaggctctggggccccacccccacccccgatgccaccacccccactgggctctccctttccagtcatcagttcttccatggggtcccctggtctgccccctccagctcccccaggattctccgggcctgtcagcagcccccagattaactcaacagtgtcactccctgggggtgggtctggcccccctgaagatgtgaagccaccagtcttaggggtccggggcctgcactgtccaccccctccaggtggccctggggctggcaaacggctatgtgcaatctgcggggacagaagctcaggcaaacactacggggtttacagctgtgagggttgcaagggcttcttcaaacgcaccatccgcaaagaccttacatactcttgccgggacaacaaagactgcacagtggacaagcgccagcggaaccgctgtcagtactgccgctatcagaagtgcctggccactggcatgaagagggaggcggtacaggaggagcgtcagcggggaaaggacaaggatggggatggggagggggctgggggagcccccgaggagatgcctgtggacaggatcctggaggcagagcttgctgtggaacagaagagtgaccagggcgttgagggtcctgggggaaccgggggtagcggcagcagcccaaatgaccctgtgactaacatctgtcaggcagctgacaaacagctattcacgcttgttgagtgggcgaagaggatcccacacttttcctccttgcctctggatgatcaggtcatattgctgcgggcaggctggaatgaactcctcattgcctccttctcacaccgatccattgatgttcgagatggcatcctccttgccacaggtcttcacgtgcaccgcaactcagcccattcagcaggagtaggagccatctttgatcggtccctctccagggtgctgacagagctagtgtccaaaatgcgtgacatgaggatggacaagacagagcttggctgcctgagggcaatcattctgtttaatccagatgccaagggcctctccaaccctagtgaggtggaggtcctgcgggagaaagtgtatgcatcactggagacctactgcaaacagaagtaccctgagcagcagggacggtttgccaagctgctgctacgtcttcctgccctccggtccattggccttaagtgtctagagcatctgtttttcttcaagctcattggtgacacccccatcgacaccttcctcatggagatgcttgaggctccccatcaactggcctgagctcagacccagacgtggtgcttctcacactggaggagcacacatccaagagggactccaagccctggggcagggtggggggccatgttcccagaaccttgatggggtgagaagtacagggcagaaccaagaacataaaccctccaagggatctgcttgatatcccaagttggaagggaccccagatacctgtgaggactggttgtctctcttcggtggccttgagtctctgaatttgtcgggttctcccatgatttggggtgatttctcaccctctgtccttcccccagcacaaagcactggccttgcctccaggaccttgcttccttctcatcttgcctcattttgcttcccatctgaagagtggaaatggggaactcccccagaggtggatactggggggcaggcctcccaagctgatggacatgagagtagggccctgacaggccttcctcctctcaaacctggcagatgggggcctctctggaagagggaggggccctgtcactgtccagagtctctttttacacttcacctccttctgcagtcagactgaaatataaaaaaggtggtggtggtggtgaaggggctggtggagatgtaggaaccgatctgctatttttaatttcctgtgaggatagagacttgcagttagactcaaagaagtactgtactttcccaggttgactaagaaatgccagtggtggaggtgggtgtttgggaaaggcagggccctgaaatggcctgtccctagggctctccaagcactagccttcccagcttcccgccgccccccctatctcttcctgtctaacttggggaaggggcctgggctgtgaggacagggcccccacaggggatggtttcacgagtgtagtcccggaggccttccctttacagctctcctccagccctgggcacatagcataggctggggacacaggatcctggcctgagaattgaggggaggtggccagcccgcagaggtggggtgctggggctgcatgatttttgccctgcgtcccttctctttggggctcctttcccctctcatacataaaatcgctttcaaattaaaatcgctgttttctgga

SEQ ID NO: 175429 - DNA, 2832 bp, Homo sapiens
  Payload ID: 14455
  Gene Symbol: RXRB
  Gene Name: retinoid X receptor, beta
  Uniprot ID: P28702
  ENST ID: ENST00000383216
  CDS Start-End: 139-1752
gcagagcgacgggcttaattcgacccaatccaggccagagtctttctctcaggggcttcctcgtgctcagctaatcctccgatcaatccttgggaatccctgggacctcttcggtatccctactctcagccagggatcatgtcttgggccgctcgcccgcccttcctccctcagcggcatgccgcagggcagtgtgggccggtgggggtgcgaaaagaaatgcattgtggggtcgcgtcccggtggcggcggcgacggccctggctggatcccgcagcggcggcggcggcggcggtggcaggcggagaacaacaaaccccggagccggagccaggggaggctggacgggacgggatgggcgacagcgggcgggactcccgaagcccagacagctcctccccaaatccccttccccagggagtccctcccccttctcctcctgggccacccctacccccttcaacagctccatcccttggaggctctggggccccacccccacccccgatgccaccacccccactgggctctccctttccagtcatcagttcttccatggggtcccctggtctgccccctccagctcccccaggattctccgggcctgtcagcagcccccagattaactcaacagtgtcactccctgggggtgggtctggcccccctgaagatgtgaagccaccagtcttaggggtccggggcctgcactgtccaccccctccaggtggccctggggctggcaaacggctatgtgcaatctgcggggacagaagctcaggcaaacactacggggtttacagctgtgagggttgcaagggcttcttcaaacgcaccatccgcaaagaccttacatactcttgccgggacaacaaagactgcacagtggacaagcgccagcggaaccgctgtcagtactgccgctatcagaagtgcctggccactggcatgaagagggaggcggtacaggaggagcgtcagcggggaaaggacaaggatggggatggggagggggctgggggagcccccgaggagatgcctgtggacaggatcctggaggcagagcttgctgtggaacagaagagtgaccagggcgttgagggtcctgggggaaccgggggtagcggcagcagcccaaatgaccctgtgactaacatctgtcaggcagctgacaaacagctattcacgcttgttgagtgggcgaagaggatcccacacttttcctccttgcctctggatgatcaggtcatattgctgcgggcaggctggaatgaactcctcattgcctccttttcacaccgatccattgatgttcgagatggcatcctccttgccacaggtcttcacgtgcaccgcaactcagcccattcagcaggagtaggagccatctttgatcggtccctctccagggtgctgacagagctagtgtccaaaatgcgtgacatgaggatggacaagacagagcttggctgcctgagggcaatcattctgtttaatccagatgccaagggcctctccaaccctagtgaggtggaggtcctgcgggagaaagtgtatgcatcactggagacctactgcaaacagaagtaccctgagcagcagggacggtttgccaagctgctgctacgtcttcctgccctccggtccattggccttaagtgtctagagcatctgtttttcttcaagctcattggtgacacccccatcgacaccttcctcatggagatgcttgaggctccccatcaactggcctgagctcagacccagacgtggtgcttctcacactggaggagcacacatccaagagggactccaagccctggggcagggtggggggccatgttcccagaaccttgatggggtgagaagtacagggcagaaccaagaacataaaccctccaagggatctgcttgatatcccaagttggaagggaccccagatacctgtgaggactggttgtctctcttcggtggccttgagtctctgaatttgtcggggtctcccatgatttggggtgatttctcaccctctgtccttcccccagcacaaagcactggccttgcctccaggaccttgcttccttctcatcttgcctcattttgcttcccatctgaagagtggaaatggggatctcccccagaggtggatactggggggcaggcctcccaagctgatggacatgagagtagggccctgacaggccttcctcctctcaaacctggcagatgggggcctctctggaagagggaggggccctgtcactgtccagagtctctttttacacttcacctccttctgcagtcagactgaaatataaaaaaggtggtggtggtggtgaaggggctggtggagatgtaggaaccgatctgctatttttaatttcctgtgaggatagagacttgcagttagactcaaagaagtactgtactttcccaggttgactaagaaatgccagtggtggaggtgggtgtttgggaaaggcagggccctgaaatggcctgtccctagggctctccaagcactagccttcccagcttcccgccgcccccccccatctcttcctgtctaacttggggaaggggcctgggctgtgaggacagggcccccacaggggatggtttcacgagtgtagtcccggaggccttccctttacagctctcctccagccctgggcacatagcataggctggggacacaggatcctggcctgagaattgaggggaggtggccagcccgcagaggtggggtgctggggctgcatgatttttgccctgcgtcccttctctttggggctcctttcccctctcatacataaaatcgctttcaaattaaaa

SEQ ID NO: 175430 - DNA, 2909 bp, Homo sapiens
  Payload ID: 14455
  Gene Symbol: RXRB
  Gene Name: retinoid X receptor, beta
  Uniprot ID: P28702
  ENST ID: ENST00000383217
  CDS Start-End: 213-1814
ggcgggaactcgcgccgagacttcccgtctgtacaaagatggctgccacattggcgctgtcattttggtactgagcagagcgacgggcttaattcgacccaatccaggccagagtctttctctcaggggcttcctcgtgctcagctaatcctccgatcaatccttgggaatccctgggacctcttcggtatccctactctcagccagggatcatgtcttgggccgctcgcccgcccttcctccctcagcggcatgccgcagggcagtgtgggccggtgggggtgcgaaaagaaatgcattgtggggtcgcgtcccggtggcggcggcgacggccctggctggatcccgcagcggcggcggcggcggcggtggcaggcggagaacaacaaaccccggagccggagccaggggaggctggacgggacgggatgggcgacagcgggcgggactcccgaagcccagacagctcctccccaaatccccttccccagggagtccctcccccttctcctcctgggccacccctacccccttcaacagctccatcccttggaggctctggggccccacccccacccccgatgccaccacccccactgggctctccctttccagtcatcagttcttccatggggtcccctggtctgccccctccagctcccccaggattctccgggcctgtcagcagcccccagattaactcaacagtgtcactccctgggggtgggtctggcccccctgaagatgtgaagccaccagtcttaggggtccggggcctgcactgtccaccccctccaggtggccctggggctggcaaacggctatgtgcaatctgcggggacagaagctcaggcaaacactacggggtttacagctgtgagggttgcaagggcttcttcaaacgcaccatccgcaaagaccttacatactcttgccgggacaacaaagactgcacagtggacaagcgccagcggaaccgctgtcagtactgccgctatcagaagtgcctggccactggcatgaagagggaggcggtacaggaggagcgtcagcggggaaaggacaaggatggggatggggagggggctgggggagcccccgaggagatgcctgtggacaggatcctggaggcagagcttgctgtggaacagaagagtgaccagggcgttgagggtcctgggggaaccgggggtagcggcagcagcccaaatgaccctgtgactaacatctgtcaggcagctgacaaacagctattcacgcttgttgagtgggcgaagaggatcccacacttttcctccttgcctctggatgatcaggtcatattgctgcgggcaggctggaatgaactcctcattgcctccttttcacaccgatccattgatgttcgagatggcatcctccttgccacaggtcttcacgtgcaccgcaactcagcccattcagcaggagtaggagccatctttgatcgggtgctgacagagctagtgtccaaaatgcgtgacatgaggatggacaagacagagcttggctgcctgagggcaatcattctgtttaatccagatgccaagggcctctccaaccctagtgaggtggaggtcctgcgggagaaagtgtatgcatcactggagacctactgcaaacagaagtaccctgagcagcagggacggtttgccaagctgctgctacgtcttcctgccctccggtccattggccttaagtgtctagagcatctgtttttcttcaagctcattggtgacacccccatcgacaccttcctcatggagatgcttgaggctccccatcaactggcctgagctcagacccagacgtggtgcttctcacactggaggagcacacatccaagagggactccaagccctggggcagggtggggggccatgttcccagaaccttgatggggtgagaagtacagggcagaaccaagaacataaaccctccaagggatctgcttgatatcccaagttggaagggaccccagatacctgtgaggactggttgtctctcttcggtggccttgagtctctgaatttgtcggggtctcccatgatttggggtgatttctcaccctctgtccttcccccagcacaaagcactggccttgcctccaggaccttgcttccttctcatcttgcctcattttgcttcccatctgaagagtggaaatggggatctcccccagaggtggatactggggggcaggcctcccaagctgatggacatgagagtagggccctgacaggccttcctcctctcaaacctggcagatgggggcctctctggaagagggaggggccctgtcactgtccagagtctctttttacacttcacctccttctgcagtcagactgaaatataaaaaaggtggtggtggtggtgaaggggctggtggagatgtaggaaccgatctgctatttttaatttcctgtgaggatagagacttgcagttagactcaaagaagtactgtactttcccaggttgactaagaaatgccagtggtggaggtgggtgtttgggaaaggcagggccctgaaatggcctgtccctagggctctccaagcactagccttcccagcttcccgccgcccccccccatctcttcctgtctaacttggggaaggggcctgggctgtgaggacagggcccccacaggggatggtttcacgagtgtagtcccggaggccttccctttacagctctcctccagccctgggcacatagcataggctggggacacaggatcctggcctgagaattgaggggaggtggccagcccgcagaggtggggtgctggggctgcatgatttttgccctgcgtcccttctctttggggctcctttcccctctcatacataaaatcgctttcaaattaaaatcgctgttttctgga

SEQ ID NO: 175431 - DNA, 287 bp, Homo sapiens
  Payload ID: 14455
  Gene Symbol: RXRB
  Gene Name: retinoid X receptor, beta
  ENST ID: ENST00000437617
  CDS Start-End: 1-287
gcagcccaaatgaccctgtgactaacatctgtcaggcagctgacaaacagctattcacgcttgttgagtgggcgaagaggatcccacacttttcctccttgcctctggatgatcaggtcatattgctgcgggcaggtcttcacgtgcaccgcaactcagcccattcagcaggagtaggagccatctttgatcgggtgctgacagagctagtgtccaaaatgcgtgacatgaggatggacaagacagagcttggctgcctgagggcaatcattctgtttaatccagat

SEQ ID NO: 175432 - DNA, 287 bp, Homo sapiens; identical to SEQ ID NO: 175431
  Payload ID: 14455
  Gene Symbol: RXRB
  Gene Name: retinoid X receptor, beta
  ENST ID: ENST00000441299
  CDS Start-End: 1-287

SEQ ID NO: 175433 - DNA, 2846 bp, Homo sapiens
  Payload ID: 14455
  Gene Symbol: RXRB
  Gene Name: retinoid X receptor, beta
  Uniprot ID: P28702
  ENST ID: ENST00000431161
  CDS Start-End: 139-1752
gcagagcgacgggcttaattcgacccaatccaggccagagtctttctctcaggggcttcctcgtgctcagctaatcctccgatcaatccttgggaatccctgggacctcttcggtatccctactctcagccagggatcatgtcttgggccgctcgcccgcccttcctccctcagcggcatgccgcagggcagtgtgggccggtgggggtgcgaaaagaaatgcattgtggggtcgcgtcccggtggcggcggcgacggccctggctggatcccgcagcggcggcggcggcggcggtggcaggcggagaacaacaaaccccggagccggagccaggggaggctggacgggacgggatgggcgacagcgggcgggactcccgaagcccagacagctcctccccaaatccccttccccagggagtccctcccccttctcctcctgggccacccctacccccttcaacagctccatcccttggaggctctggggccccacccccacccccgatgccaccacccccactgggctctccctttccagtcatcagttcttccatggggtcccctggtctgccccctccagctcccccaggattctccgggcctgtcagcagcccccagattaactcaacagtgtcactccctgggggtgggtctggcccccctgaagatgtgaagccaccagtcttaggggtccggggcctgcactgtccaccccctccaggtggccctggggctggcaaacggctatgtgcaatctgcggggacagaagctcaggcaaacactacggggtttacagctgtgagggttgcaagggcttcttcaaacgcaccatccgcaaagaccttacatactcttgccgggacaacaaagactgcacagtggacaagcgccagcggaaccgctgtcagtactgccgctatcagaagtgcctggccactggcatgaagagggaggcggtacaggaggagcgtcagcggggaaaggacaaggatggggatggggagggggctgggggagcccccgaggagatgcctgtggacaggatcctggaggcagagcttgctgtggaacagaagagtgaccagggcgttgagggtcctgggggaaccgggggtagcggcagcagcccaaatgaccctgtgactaacatctgtcaggcagctgacaaacagctattcacgcttgttgagtgggcgaagaggatcccacacttttcctccttgcctctggatgatcaggtcatattgctgcgggcaggctggaatgaactcctcattgcctccttttcacaccgatccattgatgttcgagatggcatcctccttgccacaggtcttcacgtgcaccgcaactcagcccattcagcaggagtaggagccatctttgatcggtccctctccagggtgctgacagagctagtgtccaaaatgcgtgacatgaggatggacaagacagagcttggctgcctgagggcaatcattctgtttaatccagatgccaagggcctctccaaccctagtgaggtggaggtcctgcgggagaaagtgtatgcatcactggagacctactgcaaacagaagtaccctgagcagcagggacggtttgccaagctgctgctacgtcttcctgccctccggtccattggccttaagtgtctagagcatctgtttttcttcaagctcattggtgacacccccatcgacaccttcctcatggagatgcttgaggctccccatcaactggcctgagctcagacccagacgtggtgcttctcacactggaggagcacacatccaagagggactccaagccctggggcagggtggggggccatgttcccagaaccttgatggggtgagaagtacagggcagaaccaagaacataaaccctccaagggatctgcttgatatcccaagttggaagggaccccagatacctgtgaggactggttgtctctcttcggtggccttgagtctctgaatttgtcggggtctcccatgatttggggtgatttctcaccctctgtccttcccccagcacaaagcactggccttgcctccaggaccttgcttccttctcatcttgcctcattttgcttcccatctgaagagtggaaatggggatctcccccagaggtggatactggggggcaggcctcccaagctgatggacatgagagtagggccctgacaggccttcctcctctcaaacctggcagatgggggcctctctggaagagggaggggccctgtcactgtccagagtctctttttacacttcacctccttctgcagtcagactgaaatataaaaaaggtggtggtggtggtgaaggggctggtggagatgtaggaaccgatctgctatttttaatttcctgtgaggatagagacttgcagttagactcaaagaagtactgtactttcccaggttgactaagaaatgccagtggtggaggtgggtgtttgggaaaggcagggccctgaaatggcctgtccctagggctctccaagcactagccttcccagcttcccgccgccccccccatctcttcctgtctaacttggggaaggggcctgggctgtgaggacagggcccccacaggggatggtttcacgagtgtagtcccggaggccttccctttacagctctcctccagccctgggcacatagcataggctggggacacaggatcctggcctgagaattgaggggaggtggccagcccgcagaggtggggtgctggggctgcatgatttttgccctgcgtcccttctctttggggctcctttcccctctcatacataaaatcgctttcaaattaaaatcgctgttttctgga

SEQ ID NO: 175434 - DNA, 2832 bp, Homo sapiens; identical to SEQ ID NO: 175429
  Payload ID: 14455
  Gene Symbol: RXRB
  Gene Name: retinoid X receptor, beta
  Uniprot ID: P28702
  ENST ID: ENST00000456244
  CDS Start-End: 139-1752

SEQ ID NO: 175435 - DNA, 2846 bp, Homo sapiens; identical to SEQ ID NO: 175428
  Payload ID: 14455
  Gene Symbol: RXRB
  Gene Name: retinoid X receptor, beta
  Uniprot ID: P28702
  ENST ID: ENST00000455462
  CDS Start-End: 139-1752

SEQ ID NO: 175436 - DNA, 2908 bp, Homo sapiens; identical to SEQ ID NO: 175427
  Payload ID: 14455
  Gene Symbol: RXRB
  Gene Name: retinoid X receptor, beta
  Uniprot ID: P28702
  ENST ID: ENST00000415157
  CDS Start-End: 213-1814

SEQ ID NO: 175437 - DNA, 2846 bp, Homo sapiens
  Payload ID: 14455
  Gene Symbol: RXRB
  Gene Name: retinoid X receptor, beta
  Uniprot ID: P28702
  ENST ID: ENST00000443603
  CDS Start-End: 139-1752
gcagagcgacgggcttaattcgacccaatccaggccagagtctttctctcaggggcttcctcgtgctcagctaatcctccgatcaatccttgggaatccctgggacctcttcggtatccctactctcagccagggatcatgtcttgggccgctcgcccgcccttcctccctcagcggcatgccgcagggcagtgtgggccggtgggggtgcgaaaagaaatgcattgtggggtcgcgtcccggtggcggcggcgacggccctggctggatcccgcagcggcggcggcggcggcggtggcaggcggagaacaacaaaccccggagccggagccaggggaggctggacgggacgggatgggcgacagcgggcgggactcccgaagcccagacagctcctccccaaatccccttccccagggagtccctcccccttctcctcctgggccacccctacccccttcaacagctccatcccttggaggctctggggccccacccccacccccgatgccaccacccccactgggctctccctttccagtcatcagttcttccatggggtcccctggtctgccccctccagctcccccaggattctccgggcctgtcagcagcccccagattaactcaacagtgtcactccctgggggtgggtctggcccccctgaagatgtgaagccaccagtcttaggggtccggggcctgcactgtccaccccctccaggtggccctggggctggcaaacggctatgtgcaatctgcggggacagaagctcaggcaaacactacggggtttacagctgtgagggttgcaagggcttcttcaaacgcaccatccgcaaagaccttacatactcttgccgggacaacaaagactgcacagtggacaagcgccagcggaaccgctgtcagtactgccgctatcagaagtgcctggccactggcatgaagagggaggcggtacaggaggagcgtcagcggggaaaggacaaggatggggatggggagggggctgggggagcccccgaggagatgcctgtggacaggatcctggaggcagagcttgctgtggaacagaagagtgaccagggcgttgagggtcctgggggaaccgggggtagcggcagcagcccaaatgaccctgtgactaacatctgtcaggcagctgacaaacagctattcacgcttgttgagtgggcgaagaggatcccacacttttcctccttgcctctggatgatcaggtcatattgctgcgggcaggctggaatgaactcctcattgcctccttttcacaccgatccattgatgttcgagatggcatcctccttgccacaggtcttcacgtgcaccgcaactcagcccattcagcaggagtaggagccatctttgatcggtccctctccagggtgctgacagagctagtgtccaaaatgcgtgacatgaggatggacaagacagagcttggctgcctgagggcaatcattctgtttaatccagatgccaagggcctctccaaccctagtgaggtggaggtcctgcgggagaaagtgtatgcatcactggagacctactgcaaacagaagtaccctgagcagcagggacggtttgccaagctgctgctacgtcttcctgccctccggtccattggccttaagtgtctagagcatctgtttttcttcaagctcattggtgacacccccatcgacaccttcctcatggagatgcttgaggctccccatcaactggcctgagctcagacccagacgtggtgcttctcacactggaggagcacacatccaagagggactccaagccctggggcagggtggggggccatgttcccagaaccttgatggggtgagaagtacagggcagaaccaagaacataaaccctccaagggatctgcttgatatcccaagttggaagggaccccagatacctgtgaggactggttgtctctcttcggtggccttgagtctctgaatttgtcggggtctcccatgatttggggtgatttctcaccctctgtccttcccccagcacaaagcactggccttgcctccaggaccttgcttccttctcatcttgcctcattttgcttcccatctgaagagtggaaatggggaactcccccagaggtggatactggggggcaggcctcccaagctgatggacatgagagtagggccctgacaggccttcctcctctcaaacctggcagatgggggcctctctggaagagggaggggccctgtcactgtccagagtctctttttacacttcacctccttctgcagtcagactgaaatataaaaaaggtggtggtggtggtgaaggggctggtggagatgtaggaaccgatctgctatttttaatttcctgtgaggatagagacttgcagttagactcaaagaagtactgtactttcccaggttgactaagaaatgccagtggtggaggtgggtgtttgggaaaggcagggccctgaaatggcctgtccctagggctctccaagcactagccttcccagcttcccgccgccccccccatctcttcctgtctaacttggggaaggggcctgggctgtgaggacagggcccccacaggggatggtttcacgagtgtagtcccggaggccttccctttacagctctcctccagccctgggcacatagcataggctggggacacaggatcctggcctgagaattgaggggaggtggccagcccgcagaggtggggtgctggggctgcatgatttttgccctgcgtcccttctctttggggctcctttcccctctcatacataaaatcgctttcaaattaaaatcgctgttttctgga

SEQ ID NO: 175438 - DNA, 287 bp, Homo sapiens; identical to SEQ ID NO: 175431
  Payload ID: 14455
  Gene Symbol: RXRB
  Gene Name: retinoid X receptor, beta
  ENST ID: ENST00000415668
  CDS Start-End: 1-287

SEQ ID NO: 175439 - DNA, 287 bp, Homo sapiens; identical to SEQ ID NO: 175431
  Payload ID: 14455
  Gene Symbol: RXRB
  Gene Name: retinoid X receptor, beta
  ENST ID: ENST00000428813
  CDS Start-End: 1-287

SEQ ID NO: 175440 - DNA, 2908 bp, Homo sapiens
  Payload ID: 14455
  Gene Symbol: RXRB
  Gene Name: retinoid X receptor, beta
  Uniprot ID: P28702
  ENST ID: ENST00000415909
  CDS Start-End: 213-1814
ggcgggaactcgcgccgagacttcccgtctgtacaaagatggctgccacattggcgctgtcattttggtactgagcagagcgacgggcttaattcgacccaatccaggccagagtctttctctcaggggcttcctcgtgctcagctaatcctccgatcaatccttgggaatccctgggacctcttcggtatccctactctcagccagggatcatgtcttgggccgctcgcccgcccttcctccctcagcggcatgccgcagggcagtgtgggccggtgggggtgcgaaaagaaatgcattgtggggtcgcgtcccggtggcggcggcgacggccctggctggatcccgcagcggcggcggcggcggcggtggcaggcggagaacaacaaaccccggagccggagccaggggaggctggacgggacgggatgggcgacagcgggcgggactcccgaagcccagacagctcctccccaaatccccttccccagggagtccctcccccttctcctcctgggccacccctacccccttcaacagctccatcccttggaggctctggggccccacccccacccccgatgccaccacccccactgggctctccctttccagtcatcagttcttccatggggtcccctggtctgccccctccagctcccccaggattctccgggcctgtcagcagcccccagattaactcaacagtgtcactccctgggggtgggtctggcccccctgaagatgtgaagccaccagtcttaggggtccggggcctgcactgtccaccccctccaggtggccctggggctggcaaacggctatgtgcaatctgcggggacagaagctcaggcaaacactacggggtttacagctgtgagggttgcaagggcttcttcaaacgcaccatccgcaaagaccttacatactcttgccgggacaacaaagactgcacagtggacaagcgccagcggaaccgctgtcagtactgccgctatcagaagtgcctggccactggcatgaagagggaggcggtacaggaggagcgtcagcggggaaaggacaaggatggggatggggagggggctgggggagcccccgaggagatgcctgtggacaggatcctggaggcagagcttgctgtggaacagaagagtgaccagggcgttgagggtcctgggggaaccgggggtagcggcagcagcccaaatgaccctgtgactaacatctgtcaggcagctgacaaacagctattcacgcttgttgagtgggcgaagaggatcccacacttttcctccttgcctctggatgatcaggtcatattgctgcgggcaggctggaatgaactcctcattgcctccttttcacaccgatccattgatgttcgagatggcatcctccttgccacaggtcttcacgtgcaccgcaactcagcccattcagcaggagtaggagccatctttgatcgggtgctgacagagctagtgtccaaaatgcgtgacatgaggatggacaagacagagcttggctgcctgagggcaatcattctgtttaatccagatgccaagggcctctccaaccctagtgaggtggaggtcctgcgggagaaagtgtatgcatcactggagacctactgcaaacagaagtaccctgagcagcagggacggtttgccaagctgctgctacgtcttcctgccctccggtccattggccttaagtgtctagagcatctgtttttcttcaagctcattggtgacacccccatcgacaccttcctcatggagatgcttgaggctccccatcaactggcctgagctcagacccagacgtggtgcttctcacactggaggagcacacatccaagagggactccaagccctggggcagggtggggggccatgttcccagaaccttgatggggtgagaagtacagggcagaaccaagaacataaaccctccaagggatctgcttgatatcccaagttggaagggaccccagatacctgtgaggactggttgtctctcttcggtggccttgagtctctgaatttgtcggggtctcccatgatttggggtgatttctcaccctctgtccttcccccagcacaaagcactggccttgcctccaggaccttgcttccttctcatcttgcctcattttgcttcccatctgaagagtggaaatggggatctcccccagaggtggatactggggggcaggcctcccaagctgatggacatgagagtagggccctgacaggccttcctcctctcaaacctggcagatgggggcctctctggaagagggaggggccctgtcactgtccagagtctctttttacacttcacctccttctgcagtcagactgaaatataaaaaaggtggtggtggtggtgaaggggctggtggagatgtaggaaccgatctgctatttttaatttcctgtgaggatagagacttgcagttagactcaaagaagtactgtactttcccaggttgactaagaaatgccagtggtggaggtgggtgtttgggaaaggcagggccctgaaatggcctgtccctagggctctccaagcactagccttcccagcttcccgccgccccccccatctcttcctgtctaacttggggaaggggcctgggctgtgaggacagggcccccacaggggatggtttcacgagtgtagtcccggaggccttccctttacagctctcctccagccctgggcacatagcataggctggggacacaggatcctggcctgagaattgaggggaggtggccagcccgcagaggtggggtgctggggctgcatgatttttgccctgcgtcccttctctttggggctcctttcccctctcatacataaaatcgctttcaaattaaaatcgctgttttctgga

SEQ ID NO: 175441 - DNA, 2894 bp, Homo sapiens
  Payload ID: 14455
  Gene Symbol: RXRB
  Gene Name: retinoid X receptor, beta
  Uniprot ID: P28702
  ENST ID: ENST00000431820
  CDS Start-End: 213-1814
ggcgggaactcgcgccgagacttcccgtctgtacaaagatggctgccacattggcgctgtcattttggtactgagcagagcgacgggcttaattcgacccaatccaggccagagtctttctctcaggggcttcctcgtgctcagctaatcctccgatcaatccttgggaatccctgggacctcttcggtatccctactctcagccagggatcatgtcttgggccgctcgcccgcccttcctccctcagcggcatgccgcagggcagtgtgggccggtgggggtgcgaaaagaaatgcattgtggggtcgcgtcccggtggcggcggcgacggccctggctggatcccgcagcggcggcggcggcggcggtggcaggcggagaacaacaaaccccggagccggagccaggggaggctggacgggacgggatgggcgacagcgggcgggactcccgaagcccagacagctcctccccaaatccccttccccagggagtccctcccccttctcctcctgggccacccctacccccttcaacagctccatcccttggaggctctggggccccacccccacccccgatgccaccacccccactgggctctccctttccagtcatcagttcttccatggggtcccctggtctgccccctccagctcccccaggattctccgggcctgtcagcagcccccagattaactcaacagtgtcactccctgggggtgggtctggcccccctgaagatgtgaagccaccagtcttaggggtccggggcctgcactgtccaccccctccaggtggccctggggctggcaaacggctatgtgcaatctgcggggacagaagctcaggcaaacactacggggtttacagctgtgagggttgcaagggcttcttcaaacgcaccatccgcaaagaccttacatactcttgccgggacaacaaagactgcacagtggacaagcgccagcggaaccgctgtcagtactgccgctatcagaagtgcctggccactggcatgaagagggaggcggtacaggaggagcgtcagcggggaaaggacaaggatggggatggggagggggctgggggagcccccgaggagatgcctgtggacaggatcctggaggcagagcttgctgtggaacagaagagtgaccagggcgttgagggtcctgggggaaccgggggtagcggcagcagcccaaatgaccctgtgactaacatctgtcaggcagctgacaaacagctattcacgcttgttgagtgggcgaagaggatcccacacttttcctccttgcctctggatgatcaggtcatattgctgcgggcaggctggaatgaactcctcattgcctccttttcacaccgatccattgatgttcgagatggcatcctccttgccacaggtcttcacgtgcaccgcaactcagcccattcagcaggagtaggagccatctttgatcgggtgctgacagagctagtgtccaaaatgcgtgacatgaggatggacaagacagagcttggctgcctgagggcaatcattctgtttaatccagatgccaagggcctctccaaccctagtgaggtggaggtcctgcgggagaaagtgtatgcatcactggagacctactgcaaacagaagtaccctgagcagcagggacggtttgccaagctgctgctacgtcttcctgccctccggtccattggccttaagtgtctagagcatctgtttttcttcaagctcattggtgacacccccatcgacaccttcctcatggagatgcttgaggctccccatcaactggcctgagctcagacccagacgtggtgcttctcacactggaggagcacacatccaagagggactccaagccctggggcagggtggggggccatgttcccagaaccttgatggggtgagaagtacagggcagaaccaagaacataaaccctccaagggatctgcttgatatcccaagttggaagggaccccagatacctgtgaggactggttgtctctcttcggtggccttgagtctctgaatttgtcggggtctcccatgatttggggtgatttctcaccctctgtccttcccccagcacaaagcactggccttgcctccaggaccttgcttccttctcatcttgcctcattttgcttcccatctgaagagtggaaatggggatctcccccagaggtggatactggggggcaggcctcccaagctgatggacatgagagtagggccctgacaggccttcctcctctcaaacctggcagatgggggcctctctggaagagggaggggccctgtcactgtccagagtctctttttacacttcacctccttctgcagtcagactgaaatataaaaaaggtggtggtggtggtgaaggggctggtggagatgtaggaaccgatctgctatttttaatttcctgtgaggatagagacttgcagttagactcaaagaagtactgtactttcccaggttgactaagaaatgccagtggtggaggtgggtgtttgggaaaggcagggccctgaaatggcctgtccctagggctctccaagcactagccttcccagcttcccgccgcccccccccatctcttcctgtctaacttggggaaggggcctgggctgtgaggacagggcccccacaggggatggtttcacgagtgtagtcccggaggccttccctttacagctctcctccagccctgggcacatagcataggctggggacacaggatcctggcctgagaattgaggggaggtggccagcccgcagaggtggggtgctggggctgcatgatttttgccctgcgtcccttctctttggggctcctttcccctctcatacataaaatcgctttcaaattaaaa

SEQ ID NO: 175442 - DNA, 287 bp, Homo sapiens; identical to SEQ ID NO: 175431
  Payload ID: 14455
  Gene Symbol: RXRB
  Gene Name: retinoid X receptor, beta
  ENST ID: ENST00000451068
  CDS Start-End: 1-287

SEQ ID NO: 175443 - DNA, 2908 bp, Homo sapiens
  Payload ID: 14455
  Gene Symbol: RXRB
  Gene Name: retinoid X receptor, beta
  Uniprot ID: P28702
  ENST ID: ENST00000436753
  CDS Start-End: 213-1814
ggcgggaactcgcgccgagacttcccgtctgtacaaagatggctgccacattggcgctgtcattttggtactgagcagagcgacgggcttaattcgacccaatccaggccagagtctttctctcaggggcttcctcgtgctcagctaatcctccgatcaatccttgggaatccctgggacctcttcggtatccctactctcagccagggatcatgtcttgggccgctcgcccgcccttcctccctcagcggcatgccgcagggcagtgtgggccggtgggggtgcgaaaagaaatgcattgtggggtcgcgtcccggtggcggcggcgacggccctggctggatcccgcagcggcggcggcggcggcggtggcaggcggagaacaacaaaccccggagccggagccaggggaggctggacgggacgggatgggcgacagcgggcgggactcccgaagcccagacagctcctccccaaatccccttccccagggagtccctcccccttctcctcctgggccacccctacccccttcaacagctccatcccttggaggctctggggccccacccccacccccgatgccaccacccccactgggctctccctttccagtcatcagttcttccatggggtcccctggtctgccccctccagctcccccaggattctccgggcctgtcagcagcccccagattaactcaacagtgtcactccctgggggtgggtctggcccccctgaagatgtgaagccaccagtcttaggggtccggggcctgcactgtccaccccctccaggtggccctggggctggcaaacggctatgtgcaatctgcggggacagaagctcaggcaaacactacggggtttacagctgtgagggttgcaagggcttcttcaaacgcaccatccgcaaagaccttacatactcttgccgggacaacaaagactgcacagtggacaagcgccagcggaaccgctgtcagtactgccgctatcagaagtgcctggccactggcatgaagagggaggcggtacaggaggagcgtcagcggggaaaggacaaggatggggatggggagggggctgggggagcccccgaggagatgcctgtggacaggatcctggaggcagagcttgctgtggaacagaagagtgaccagggcgttgagggtcctgggggaaccgggggtagcggcagcagcccaaatgaccctgtgactaacatctgtcaggcagctgacaaacagctattcacgcttgttgagtgggcgaagaggatcccacacttttcctccttgcctctggatgatcaggtcatattgctgcgggcaggctggaatgaactcctcattgcctccttttcacaccgatccattgatgttcgagatggcatcctccttgccacaggtcttcacgtgcaccgcaactcagcccattcagcaggagtaggagccatctttgatcgggtgctgacagagctagtgtccaaaatgcgtgacatgaggatggacaagacagagcttggctgcctgagggcaatcattctgtttaatccagatgccaagggcctctccaaccctagtgaggtggaggtcctgcgggagaaagtgtatgcatcactggagacctactgcaaacagaagtaccctgagcagcagggacggtttgccaagctgctgctacgtcttcctgccctccggtccattggccttaagtgtctagagcatctgtttttcttcaagctcattggtgacacccccatcgacaccttcctcatggagatgcttgaggctccccatcaactggcctgagctcagacccagacgtggtgcttctcacactggaggagcacacatccaagagggactccaagccctggggcagggtggggggccatgttcccagaaccttgatggggtgagaagtacagggcagaaccaagaacataaaccctccaagggatctgcttgatatcccaagttggaagggaccccagatacctgtgaggactggttgtctctcttcggtggccttgagtctctgaatttgtcggggtctcccatgatttggggtgatttctcaccctctgtccttcccccagcacaaagcactggccttgcctccaggaccttgcttccttctcatcttgcctcattttgcttcccatctgaagagtggaaatggggaactcccccagaggtggatactggggggcaggcctcccaagctgatggacatgagagtagggccctgacaggccttcctcctctcaaacctggcagatgggggcctctctggaagagggaggggccctgtcactgtccagagtctctttttacacttcacctccttctgcagtcagactgaaatataaaaaaggtggtggtggtggtgaaggggctggtggagatgtaggaaccgatctgctatttttaatttcctgtgaggatagagacttgcagttagactcaaagaagtactgtactttcccaggttgactaagaaatgccagtggtggaggtgggtgtttgggaaaggcagggccctgaaatggcctgtccctagggctctccaagcactagccttcccagcttcccgccgccccccccatctcttcctgtctaacttggggaaggggcctgggctgtgaggacagggcccccacaggggatggtttcacgagtgtagtcccggaggccttccctttacagctctcctccagccctgggcacatagcataggctggggacacaggatcctggcctgagaattgaggggaggtggccagcccgcagaggtggggtgctggggctgcatgatttttgccctgcgtcccttctctttggggctcctttcccctctcatacataaaatcgctttcaaattaaaatcgctgttttctgga

SEQ ID NO: 175444 - DNA, 1977 bp, Homo sapiens
  Payload ID: 14455
  Gene Symbol: RXRB
  Gene Name: retinoid X receptor, beta
  ENST ID: ENST00000485267
  CDS Start-End: 162-401
tggcgctgtcattttggtactgagcagagcgacgggcttaattcgacccaatccaggccagagtctttctctcaggggcttcctcgtgctcagctaatcctccgatcaatccttgggaatccctgggacctcttcggtatccctactctcagccagggatcatgtcttgggccgctcgcccgcccttcctccctcagcggcatgccgcagggcagtgtgggccggtgggggtgcgaaaagaaatgcattgtggggtcgcgtcccggtggcggcggcgacggccctggctggatcccgcagcggcggcggcggcggcggtggcaggcggagaacaacaaaccccggagccggagccaggggaggctggacgggacgggatgggcgacagcgggcgggattaactcaacagtgtcactccctgggggtgggtctggcccccctgaagatgtgaagccaccagtcttaggggtccggggcctgcactgtccaccccctccaggtggccctggggctggcaaacggctatgtgcaatctgcggggacagaagctcaggcaaacactacggggtttacagctgtgagggttgcaagggcttcttcaaacgcaccatccgcaaagaccttacatactcttgccgggacaacaaagactgcacagtggacaagcgccagcggaaccgctgtcagtactgccgctatcagaagtgcctggccactggcatgaagagggaggcggtacaggaggagcgtcagcggggaaaggacaaggatggggatggggagggggctgggggagcccccgaggagatgcctgtggacaggatcctggaggcagagcttgctgtggaacagaagagtgaccagggcgttgagggtcctgggggaaccgggggtagcggcagcagcccaaatgaccctgtgactaacatctgtcaggcagctgacaaacagctattcacgcttgttgagtgggcgaagaggatcccacacttttcctccttgcctctggatgatcaggtcatattgctgcgggcaggctggaatgaactcctcattgcctccttttcacaccgatccattgatgttcgagatggcatcctccttgccacaggtcttcacgtgcaccgcaactcagcccattcagcaggagtaggagccatctttgatcgggtgctgacagagctagtgtccaaaatgcgtgacatgaggatggacaagacagagcttggctgcctgagggcaatcattctgtttaatccagatgccaagggcctctccaaccctagtgaggtggaggtcctgcgggagaaagtgtatgcatcactggagacctactgcaaacagaagtaccctgagcagcagggacggtttgccaagctgctgctacgtcttcctgccctccggtccattggccttaagtgtctagagcatctgtttttcttcaagctcattggtgacacccccatcgacaccttcctcatggagatgcttgaggctccccatcaactggcctgagctcagacccagacgtggtgcttctcacactggaggagcacacatccaagagggactccaagccctggggcagggtggggggccatgttcccagaaccttgatggggtgagaagtacagggcagaaccaagaacataaaccctccaagggatctgcttgatatcccaagttggaagggaccccagatacctgtgaggactggttgtctctcttcggtggccttgagtctctgaatttgtcggggtctcccatgatttggggtgatttctcaccctctgtccttcccccagcacaaagcactggccttgcctccaggaccttgcttccttctcatcttgcctcattttgcttcccatctgaagagtggaaatggggatctcccccagaggtggatactggggggcaggcctcccaagctgatggacatgagagtagggccctgacaggccttcctcctctcaa

SEQ ID NO: 175445 - DNA, 1977 bp, Homo sapiens
  Payload ID: 14455
  Gene Symbol: RXRB
  Gene Name: retinoid X receptor, beta
  ENST ID: ENST00000483281
  CDS Start-End: 162-401
tggcgctgtcattttggtactgagcagagcgacgggcttaattcgacccaatccaggccagagtctttctctcaggggcttcctcgtgctcagctaatcctccgatcaatccttgggaatccctgggacctcttcggtatccctactctcagccagggatcatgtcttgggccgctcgcccgcccttcctccctcagcggcatgccgcagggcagtgtgggccggtgggggtgcgaaaagaaatgcattgtggggtcgcgtcccggtggcggcggcgacggccctggctggatcccgcagcggcggcggcggcggcggtggcaggcggagaacaacaaaccccggagccggagccaggggaggctggacgggacgggatgggcgacagcgggcgggattaactcaacagtgtcactccctgggggtgggtctggcccccctgaagatgtgaagccaccagtcttaggggtccggggcctgcactgtccaccccctccaggtggccctggggctggcaaacggctatgtgcaatctgcggggacagaagctcaggcaaacactacggggtttacagctgtgagggttgcaagggcttcttcaaacgcaccatccgcaaagaccttacatactcttgccgggacaacaaagactgcacagtggacaagcgccagcggaaccgctgtcagtactgccgctatcagaagtgcctggccactggcatgaagagggaggcggtacaggaggagcgtcagcggggaaaggacaaggatggggatggggagggggctgggggagcccccgaggagatgcctgtggacaggatcctggaggcagagcttgctgtggaacagaagagtgaccagggcgttgagggtcctgggggaaccgggggtagcggcagcagcccaaatgaccctgtgactaacatctgtcaggcagctgacaaacagctattcacgcttgttgagtgggcgaagaggatcccacacttttcctccttgcctctggatgatcaggtcatattgctgcgggcaggctggaatgaactcctcattgcctccttctcacaccgatccattgatgttcgagatggcatcctccttgccacaggtcttcacgtgcaccgcaactcagcccattcagcaggagtaggagccatctttgatcgggtgctgacagagctagtgtccaaaatgcgtgacatgaggatggacaagacagagcttggctgcctgagggcaatcattctgtttaatccagatgccaagggcctctccaaccctagtgaggtggaggtcctgcgggagaaagtgtatgcatcactggagacctactgcaaacagaagtaccctgagcagcagggacggtttgccaagctgctgctacgtcttcctgccctccggtccattggccttaagtgtctagagcatctgtttttcttcaagctcattggtgacacccccatcgacaccttcctcatggagatgcttgaggctccccatcaactggcctgagctcagacccagacgtggtgcttctcacactggaggagcacacatccaagagggactccaagccctggggcagggtggggggccatgttcccagaaccttgatggggtgagaagtacagggcagaaccaagaacataaaccctccaagggatctgcttgatatcccaagttggaagggaccccagatacctgtgaggactggttgtctctcttcggtggccttgagtctctgaatttgtcgggttctcccatgatttggggtgatttctcaccctctgtccttcccccagcacaaagcactggccttgcctccaggaccttgcttccttctcatcttgcctcattttgcttcccatctgaagagtggaaatggggaactcccccagaggtggatactggggggcaggcctcccaagctgatggacatgagagtagggccctgacaggccttcctcctctcaa

SEQ ID NO: 175446 - DNA, 1977 bp, Homo sapiens; identical to SEQ ID NO: 175445
  Payload ID: 14455
  Gene Symbol: RXRB
  Gene Name: retinoid X receptor, beta
  ENST ID: ENST00000462174
  CDS Start-End: 162-401

SEQ ID NO: 175447 - DNA, 1977 bp, Homo sapiens; identical to SEQ ID NO: 175444
  Payload ID: 14455
  Gene Symbol: RXRB
  Gene Name: retinoid X receptor, beta
  ENST ID: ENST00000468440
  CDS Start-End: 162-401

SEQ ID NO: 175448 - DNA, 1977 bp, Homo sapiens
  Payload ID: 14455
  Gene Symbol: RXRB
  Gene Name: retinoid X receptor, beta
  ENST ID: ENST00000463338
  CDS Start-End: 162-401
tggcgctgtcattttggtactgagcagagcgacgggcttaattcgacccaatccaggccagagtctttctctcaggggcttcctcgtgctcagctaatcctccgatcaatccttgggaatccctgggacctcttcggtatccctactctcagccagggatcatgtcttgggccgctcgcccgcccttcctccctcagcggcatgccgcagggcagtgtgggccggtgggggtgcgaaaagaaatgcattgtggggtcgcgtcccggtggcggcggcgacggccctggctggatcccgcagcggcggcggcggcggcggtggcaggcggagaacaacaaaccccggagccggagccaggggaggctggacgggacgggatgggcgacagcgggcgggattaactcaacagtgtcactccctgggggtgggtctggcccccctgaagatgtgaagccaccagtcttaggggtccggggcctgcactgtccaccccctccaggtggccctggggctggcaaacggctatgtgcaatctgcggggacagaagctcaggcaaacactacggggtttacagctgtgagggttgcaagggcttcttcaaacgcaccatccgcaaagaccttacatactcttgccgggacaacaaagactgcacagtggacaagcgccagcggaaccgctgtcagtactgccgctatcagaagtgcctggccactggcatgaagagggaggcggtacaggaggagcgtcagcggggaaaggacaaggatggggatggggagggggctgggggagcccccgaggagatgcctgtggacaggatcctggaggcagagcttgctgtggaacagaagagtgaccagggcgttgagggtcctgggggaaccgggggtagcggcagcagcccaaatgaccctgtgactaacatctgtcaggcagctgacaaacagctattcacgcttgttgagtgggcgaagaggatcccacacttttcctccttgcctctggatgatcaggtcatattgctgcgggcaggctggaatgaactcctcattgcctccttttcacaccgatccattgatgttcgagatggcatcctccttgccacaggtcttcacgtgcaccgcaactcagcccattcagcaggagtaggagccatctttgatcgggtgctgacagagctagtgtccaaaatgcgtgacatgaggatggacaagacagagcttggctgcctgagggcaatcattctgtttaatccagatgccaagggcctctccaaccctagtgaggtggaggtcctgcgggagaaagtgtatgcatcactggagacctactgcaaacagaagtaccctgagcagcagggacggtttgccaagctgctgctacgtcttcctgccctccggtccattggccttaagtgtctagagcatctgtttttcttcaagctcattggtgacacccccatcgacaccttcctcatggagatgcttgaggctccccatcaactggcctgagctcagacccagacgtggtgcttctcacactggaggagcacacatccaagagggactccaagccctggggcagggtggggggccatgttcccagaaccttgatggggtgagaagtacagggcagaaccaagaacataaaccctccaagggatctgcttgatatcccaagttggaagggaccccagatacctgtgaggactggttgtctctcttcggtggccttgagtctctgaatttgtcggggtctcccatgatttggggtgatttctcaccctctgtccttcccccagcacaaagcactggccttgcctccaggaccttgcttccttctcatcttgcctcattttgcttcccatctgaagagtggaaatggggaactcccccagaggtggatactggggggcaggcctcccaagctgatggacatgagagtagggccctgacaggccttcctcctctcaa

SEQ ID NO: 175449 - DNA, 1227 bp, Homo sapiens
  Payload ID: 14455
  Gene Symbol: RXRB
  Gene Name: retinoid X receptor, beta
  ENST ID: ENST00000531100
  CDS Start-End: 72-1115
accttcgccctaatgcctttaccaatatggcggcactccggtagcgacgaatccatcctgcactgacacgcatgcgcgagtgtggaggtggccctggggctggcaaacggctatgtgcaatctgcggggacagaagctcaggcaaacactacggggtttacagctgtgagggttgcaagggcttcttcaaacgcaccatccgcaaagaccttacatactcttgccgggacaacaaagactgcacagtggacaagcgccagcggaaccgctgtcagtactgccgctatcagaagtgcctggccactggcatgaagagggaggcggtacaggaggagcgtcagcggggaaaggacaaggatggggatggggagggggctgggggagcccccgaggagatgcctgtggacaggatcctggaggcagagcttgctgtggaacagaagagtgaccagggcgttgagggtcctgggggaaccgggggtagcggcagcagcccaaatgaccctgtgactaacatctgtcaggcagctgacaaacagctattcacgcttgttgagtgggcgaagaggatcccacacttttcctccttgcctctggatgatcaggtcatattgctgcgggcaggctggaatgaactcctcattgcctccttttcacaccgatccattgatgttcgagatggcatcctccttgccacaggtcttcacgtgcaccgcaactcagcccattcagcaggagtaggagccatctttgatcggtccctctccagggtgctgacagagctagtgtccaaaatgcgtgacatgaggatggacaagacagagcttggctgcctgagggcaatcattctgtttaatccagatgccaagggcctctccaaccctagtgaggtggaggtcctgcgggagaaagtgtatgcatcactggagacctactgcaaacagaagtaccctgagcagcagggacggtttgccaagctgctgctacgtcttcctgccctccggtccattggccttaagtgtctagagcatctgtttttcttcaagctcattggtgacacccccatcgacaccttcctcatggagatgcttgaggctccccatcaactggcctgagctcagacccagacgtggtgcttctcacactggaggagcacacatccaagagggactccaagccctggggcagggtggggggccatgttcccagaaccttgatggggtgaga

SEQ ID NO: 175450 - DNA, 1977 bp, Homo sapiens; identical to SEQ ID NO: 175444
  Payload ID: 14455
  Gene Symbol: RXRB
  Gene Name: retinoid X receptor, beta
  ENST ID: ENST00000465169
  CDS Start-End: 162-401

SEQ ID NO: 175451 - DNA, 2041 bp, Homo sapiens
  Payload ID: 14456
  Gene Symbol: RXRG
  Gene Name: retinoid X receptor, gamma
  Uniprot ID: P48443
  ENST ID: ENST00000359842
  CDS Start-End: 304-1695
gcggtggcaagagtagcggtgacggcggcggcggcggcggcggcagcattatgcgtgattactgacaggcaccagctgctgccgccacagccgtctcaaacgcactatgtggactctccgatctagaggcagattcctgactaatcccagagggctggcccagcctgtgctccccgggctgctaggaagcgatgaccactcttgttagcccaagttgaagaaagccgggctgtgcctgggagccgagagaggcggtaatatttagaagctgcacaggagaggaacatgaactgacgagtaaacatgtatggaaattattctcacttcatgaagtttcccgcaggctatggaggctcccctggccacactggctctacatccatgagcccatcagcagccttgtccacagggaagccaatggacagccaccccagctacacagataccccagtgagtgccccacggactctgagtgcagtggggacccccctcaatgccctgggctctccatatcgagtcatcacctctgccatgggcccaccctcaggagcacttgcagcgcctccaggaatcaacttggttgccccacccagctctcagctaaatgtggtcaacagtgtcagcagttcagaggacatcaagcccttaccagggcttcccgggattggaaacatgaactacccatccaccagccccggatctctggttaaacacatctgtgccatctgtggagacagatcctcaggaaagcactacggggtatacagttgtgaaggctgcaaagggttcttcaagaggacgataaggaaggacctcatctacacgtgtcgggataataaagactgcctcattgacaagcgtcagcgcaaccgctgccagtactgtcgctatcagaagtgccttgtcatgggcatgaagagggaagctgtgcaagaagaaagacagaggagccgagagcgagctgagagtgaggcagaatgtgctaccagtggtcatgaagacatgcctgtggagaggattctagaagctgaacttgctgttgaaccaaagacagaatcctatggtgacatgaatatggagaactcgacaaatgaccctgttaccaacatatgtcatgctgctgacaagcagcttttcaccctcgttgaatgggccaagcgtattccccacttctctgacctcaccttggaggaccaggtcattttgcttcgggcagggtggaatgaattgctgattgcctctttctcccaccgctcagtttccgtgcaggatggcatccttctggccacgggtttacatgtccaccggagcagtgcccacagtgctggggtcggctccatctttgacagagtcctaactgagctggtttccaaaatgaaagacatgcagatggacaagtcggaactgggatgcctgcgagccattgtactctttaacccagatgccaagggcctgtccaacccctctgaggtggagactctgcgagagaaggtttatgccacccttgaggcctacaccaagcagaagtatccggaacagccaggcaggtttgccaagctgctgctgcgcctcccagctctgcgttccattggcttgaaatgcctggagcacctcttcttcttcaagctcatcggggacacccccattgacaccttcctcatggagatgttggagaccccgctgcagatcacctgagccccaccagccacagcctccccacccaggatgacccctgggcaggtgtgtgtggacccccaccctgcactttcctccacctcccaccctgacccccttcctgtccccaaaatgtgatgcttataataaagaaaacctttctacacatgagacttttataggtggacttttgtatagatgttaaaggtaatacgctttgctgtctacagggctgggagactttctggaagttcttgggaaaactaatcaagcctctgtacatacaattggtttaaattattttttcacttgccctggaaagcaaacaaatgagtaataaaataatatgtgtgaaattggcactgct

SEQ ID NO: 175452 - DNA, 2252 bp, Homo sapiens
  Payload ID: 14456
  Gene Symbol: RXRG
  Gene Name: retinoid X receptor, gamma
  ENST ID: ENST00000619224
  CDS Start-End: 890-1912
acctacaccgggcggtcatacatcgattggcttcctagataatagatcgtgccacccggtagggacctctggggacgcgccgggagctggaagagtcgcacgcagcagcccaaccctgagttaatcaaactagcaacaggatctcaagcagcagcgacggcggtggcaagagtagcggtgacggcggcggcggcggcggcggcagcattatgcgtgattactgacaggcaccagctgctgccgccacagccgtctcaaacgcactatgtggactctccgatctagaggcagattcctgactaatcccagagggctggcccagcctgtgctccccgggctgctaggaagcgatgaccactcttgttagcccaagttgaagaaagccgggctgtgcctgggagccgagagaggcggtaatatttagaagctgcacaggagaggaacatgaactgacgagtaaacatgtatggaaattattctcacttcatgaagtttcccgcaggctatggaggctcccctggccacactggctctacatccatgagcccatcagcagccttgtccacagggaagccaatggacagccaccccagctacacagataccccagtgagtgccccacggactctgagtgcagtggggacccccctcaatgccctgggctctccatatcgagtcatcacctctgccatgggcccaccctcaggagcacttgcagcgcctccaggaatcaacttggttgccccacccagctctcaggactggtctgagagggattcatgatggaagcatgttcattctgtgacctggttctcgcctaaatgtggtcaacagtgtcagcagttcagaggacatcaagcccttaccagggcttcccgggattggaaacatgaactacccatccaccagccccggatctctggttaaacacatctgtgccatctgtggagacagatcctcaggaaagcactacggggtatacagttgtgaaggctgcaaagggttcttcaagaggacgataaggaaggacctcatctacacgtgtcgggataataaagactgcctcattgacaagcgtcagcgcaaccgctgccagtactgtcgctatcagaagtgccttgtcatgggcatgaagagggaagctgtgcaagaagaaagacagaggagccgagagcgagctgagagtgaggcagaatgtgctaccagtggtcatgaagacatgcctgtggagaggattctagaagctgaacttgctgttgaaccaaagacagaatcctatggtgacatgaatatggagaactcgacaaatgaccctgttaccaacatatgtcatgctgctgacaagcagcttttcaccctcgttgaatgggccaagcgtattccccacttctctgacctcaccttggaggaccaggtcattttgcttcgggcagggtggaatgaattgctgattgcctctttctcccaccgctcagtttccgtgcaggatggcatccttctggccacgggtttacatgtccaccggagcagtgcccacagtgctggggtcggctccatctttgacagagtcctaactgagctggtttccaaaatgaaagacatgcagatggacaagtcggaactgggatgcctgcgagccattgtactctttaacccagatgccaagggcctgtccaacccctctgaggtggagactctgcgagagaaggtttatgccacccttgaggcctacaccaagcagaagtatccggaacagccaggcaggtttgccaagctgctgctgcgcctcccagctctgcgttccattggcttgaaatgcctggagcacctcttcttcttcaagctcatcggggacacccccattgacaccttcctcatggagatgttggagaccccgctgcagatcacctgagccccaccagccacagcctccccacccaggatgacccctgggcaggtgtgtgtggacccccaccctgcactttcctccacctcccaccctgacccccttcctgtccccaaaatgtgatgcttataataaagaaaacctttctacacatgagacttttataggtggacttttgtatagatgttaaaggtaatacgctttgctgtctacagggctgggagactttctggaagttcttgggaaaactaatcaagcctctgtacatacaattggtttaaattattttttcacttgccctggaaagcaaacaaatgagtaataaaataatatgtgtgaaattggc

SEQ ID NO: 175453 - DNA, 898 bp, Homo sapiens
  Payload ID: 14457
  Gene Symbol: RBP1
  Gene Name: retinol binding protein 1, cellular
  ENST ID: ENST00000232219
  CDS Start-End: 112-705
aaacgaactgaacgtctgaaacgaaggtggcgcggcctggacaaacctgacccttcgacatcccccgcccctgcgcccgccctcgctaagcggggaggagcgaccgctacaatggatcctcccgcaggctttgtgcgcgctgggaatccagctgtcgccgccccgcagagccccctgtccccggagggcgctcatttccgggccgcccaccacccgcgtagcaccggcagccgctgtcccggcagtctccagccgtcccgcccgcttgtggccaactggctccagtcactccccgaaatgccagtcgacttcactgggtactggaagatgttggtcaacgagaatttcgaggagtacctgcgcgccctcgacgtcaatgtggccttgcgcaaaatcgccaacttgctgaagccagacaaagagatcgtgcaggacggtgaccatatgatcatccgcacgctgagcacttttaggaactacatcatggacttccaggttgggaaggagtttgaggaggatctgacaggcatagatgaccgcaagtgcatgacaacagtgagctgggacggagacaagctccagtgtgtgcagaagggtgagaaggaggggcgtggctggacccagtggatcgagggtgatgagctgcacctggagatgagagtggaaggtgtggtctgcaagcaagtattcaagaaggtgcagtgaggcccaggcagacaaccttgtcccaaggaatcagcaggatgtgtgggccaggatccccctctttgcacagcatgaggcaaaaatgtccagccacccccaggcatctgttagcagagtctgtctcttggctttgtcacttttccttttcttaaaacaaagccatgccaataaagtgatctgtgttcaaaacgtc

SEQ ID NO: 175454 - DNA, 1935 bp, Homo sapiens
  Payload ID: 14457
  Gene Symbol: RBP1
  Gene Name: retinol binding protein 1, cellular
  ENST ID: ENST00000483943
  CDS Start-End: 188-463
aatggatcctcccgcaggctttgtgcgcgctgggaatccagctgtcgccgccccgcagagccccctgtccccggagggcgctcatttccgggccgcccaccacccgcgtagcaccggcagccgctgtcccggcagtctccagccgtcccgcccgcttgtggccaactggctccagtcactccccgaaatgccagtcgacttcactgggtactggaagatgttggtcaacgagaatttcgaggagtacctgcgcgccctcgacgtcaatgtggccttgcgcaaaatcgccaacttgctgaagccagacaaagagatcgtgcaggacggtgaccatatgatcatccgcacgctgagcacttttaggaactacatcatggacttccaggttgggaaggagtttgaggaggatctgacaggcatagatgaccgcaagtgcatgagtgaaactggcttttcctcttgaatgtgctgacttttgattccagccccccaggaatggatcagagaagaggagccgctacccacccactcatcagcctggcctcaggggcagctcatggactttttagccagagagaaccgggttcaagttatggctcaagccctaaccccttggtgatgggctggttacttatagaagcctaatttttatcagctctaaagcttgaagatttagtgaaacattgtggaaagctcccagcacagtacctggcacctggcaggttctctgtcatctcccctacttttccctcctgatcacttatttaacacaagcaccagatgctgaaaaccctctaattgtcccaggaacacacataccctcaaagggagaagcacactttcaaatcaaactccaggatttgcatcttttagcaatttccattatgcggagaaagtatctactcactgtctggttttgaaattttaccccaaatcgaaagagcatgggttttggtgtcagacctgggtcggtcctggctctggcctttgcaggcagtatcaccacgggcaaggcttcacctctcataacctggctgtggaaccacagaaacaacagaattcagtcccagccctccagaggtggatccgtaaacagagggactactagggctgggtggagggctgtgagtgatccaacatcccctgctcttgagagtggtgttttagcatgggagtgttaatgaatgtcacaagtttcttgataccaaatagagttcctaccatttgcaggtcataccggtcactgccaagagatggcttatttagtgggaattgtctggcactcctagtataagtcacctaagtggggcaagtgggccttgaaacatccctgggagacactcactcaggctgcctgtgggagctgggctttttgtgtcactctcccatgcagcagtgacggctggggtttctaagtggtcagaggagctggaaaatggcttctgaagtaacagtcccttgtcatagtggtacaaagatgtcttcattcatctgttggcacatgtctctgggtaaactgccggcaaggccaaagtgatgggggttattattagtttttaatagaaaagttagactggcttcactttccaaccagcttccctagttccagcccatttgcagacttttgggtggtctgtgggatgaaaatttcttgtgaggaggtgagctgaagatggccatccctcctggttgctcttggattgtctgggcttcatttctaaggcggtcccagagcccatgtgggggttgggggaagcagcattgtctagcccctttggtttgtacccatgttcaccccacccccacagccacctgccttttctgtgggacttgaaaagcatcaggaatatcttcctacctgaaattcttccattagaccctgattaattggattaatctaggaaaccagattaaatgaccatttaacgacccttt

SEQ ID NO: 175455 - DNA, 1072 bp, Homo sapiens
  Payload ID: 14457
  Gene Symbol: RBP1
  Gene Name: retinol binding protein 1, cellular
  ENST ID: ENST00000487424
  CDS Start-End: 157-453
gggaatccagctgtcgccgccccgcagagccccctgtccccggagggcgctcatttccgggccgcccaccacccgcgtagcaccggcagccgctgtcccggcagtctccagccgtcccgcccgcttgtggccaactggctccagtcactccccgaaatgccagtcgacttcactgggtactggaagatgttggtcaacgagaatttcgaggagtacctgcgcgccctcgacgtcaatgtggccttgcgcaaaatcgccaacttgctgaagccagacaaagagatcgtgcaggacggtgaccatatgatcatccgcacgctgagcacttttaggaactacatcatggacttccaggttgggaaggagtttgaggaggatctgacaggcatagatgaccgcaagtgcatggtgaggattcgcgtccacctggtgtctcctgcccagggggcctgaccaagggctgggctagttcatccgagagggggcaagggcctgagggactgaaaactcttcccactctcagcccccatggtgggcagcaccaactcatgaagcatcctgctctatctacactggaaggtgatggttatgaaggctgccatgtgctgtgtctccactgcgttcaggcactctgcccggtgctttatgcacatgacttcacctaagcctcacacagcctttgagggagatatgaatatgcccattttacagatgaagaaacagtctcaaagagatgaagtaacatgtccagagtagcacagctagggagggtctggagttcaaagcatgtctgttgatgccgttctctggctgactgggctggtggagggtaaaagaaaagaaaggaggaaagaaaaaagaaacacagagtgaaactggcttttcctcttgaatgtgctgacttttgattccagccccccaggaatggatcagagaagaggagccgctacccacccactcatcagcctggcctcaggggcagctcatggactttttagccagagagaaccgggttcaagttatggctcaagccctaaccccttggtgatgggctggttacttatagaagcct

SEQ ID NO: 175456 - DNA, 1487 bp, Homo sapiens
  Payload ID: 14457
  Gene Symbol: RBP1
  Gene Name: retinol binding protein 1, cellular
  Uniprot ID: P09455
  ENST ID: ENST00000492918
  CDS Start-End: 112-585
aaacgaactgaacgtctgaaacgaaggtggcgcggcctggacaaacctgacccttcgacatcccccgcccctgcgcccgccctcgctaagcggggaggagcgaccgctacaatggatcctcccgcaggctttgtgcgcgctgggaatccagctgtcgccgccccgcagagccccctgtccccggagggcgctcatttccgggccgcccaccacccgcgtagcaccggcagccgctgtcccggcagtctccagccgtcccgcccgcttgtggccaactggctccagtcactccccgaaatgccagtcgacttcactgggtactggaagatgttggtcaacgagaatttcgaggagtacctgcgcgccctcgacgtcaatgtggccttgcgcaaaatcgccaacttgctgaagccagacaaagagatcgtgcaggacggtgaccatatgatcatccgcacgctgagcacttttaggaactacatcatggacttccaggttgggaaggagtttgaggaggatctgacaggcatagatgaccgcaagtgcatggctggagtgcaatcgcgtgatctcagctcactgtaacctctgcctcccgggttcaagcaattctcctgcctcagcctcccaagtagctgggattacagtcacacgccaccacacctggataattttgtatttttggtagagacagggtttcactatgttggtcaggctggtctcaaactcctgagctcaggtgatccatctgcctcagcctcccaaaatgctgggattacaagtgtgagccactacacctggttcttctttccactgtttgctaactcccatggtgttttctggcatcacttccagcattatttctagccttacctcttccaggaagccttccctgatgggcctctgtctctaccttaaaggctgtcgaggtgccttctgacttccataacctccagcatttgtctaccagtacttaccattctgctggaattctctgtcttcttaccttcttctcagataatctgtgagccctcaagagcaggccactgaccttacttccctctctccagcacctacagctggtgcataggaggtgtgaaacccatgattgctgaatgccgttcccttgcacagaaccacgtggtgaattcctattgctcagtcaagggtcagtttaaagcagggaactgcagagcacagtcatcaagagcatgagctctagagccaaatctcatctccccacttcacggctgggtgaacttcaggcctcagtctccacatttgtaaaatgatgagaagcatacctgctctaggaggttgtcaggagtcaactggtatgacatatactttgcctagtaccctgcccagcacataatgttgggcattatcattatcataacaacacatgttgttatgatattgattatggtgactgataatgacagcaatgctatcactcccaccagggagccttccctgacccccca

SEQ ID NO: 175457 - DNA, 667 bp, Homo sapiens
  Payload ID: 14457
  Gene Symbol: RBP1
  Gene Name: retinol binding protein 1, cellular
  Uniprot ID: P09455
  ENST ID: ENST00000617459
  CDS Start-End: 112-573
aaacgaactgaacgtctgaaacgaaggtggcgcggcctggacaaacctgacccttcgacatcccccgcccctgcgcccgccctcgctaagcggggaggagcgaccgctacaatggatcctcccgcaggctttgtgcgcgctgggaatccagctgtcgccgccccgcagagccccctgtccccggagggcgctcatttccgggccgcccaccacccgcgtagcaccggcagccgctgtcccggcagtctccagccgtcccgcccgcttgtggccaactggctccagtcactccccgaaatgccagtcgacttcactgggtactggaagatgttggtcaacgagaatttcgaggagtacctgcgcgccctcgacgtcaatgtggccttgcgcaaaatcgccaacttgctgaagccagacaaagagatcgtgcaggacggtgaccatatgatcatccgcacgctgagcacttttaggaactacatcatggacttccaggttgggaaggagtttgaggaggatctgacaggcatagatgaccgcaagtgcatgagtgaaactggcttttcctcttgaatgtgctgacttttgattccagccccccaggaatggatcagagaagaggagccgctacccacccactcatcagcctggcctcaggggcagctca

SEQ ID NO: 175458 - DNA, 516 bp, Homo sapiens
  Payload ID: 14457
  Gene Symbol: RBP1
  Gene Name: retinol binding protein 1, cellular
  Uniprot ID: P09455
  ENST ID: ENST00000619087
  CDS Start-End: 56-463
cagtctccagccgtcccgcccgcttgtggccaactggctccagtcactccccgaaatgccagtcgacttcactgggtactggaagatgttggtcaacgagaatttcgaggagtacctgcgcgccctcgacgtcaatgtggccttgcgcaaaatcgccaacttgctgaagccagacaaagagatcgtgcaggacggtgaccatatgatcatccgcacgctgagcacttttaggaactacatcatggacttccaggttgggaaggagtttgaggaggatctgacaggcatagatgaccgcaagtgcatgacaacagtgagctgggacggagacaagctccagtgtgtgcagaagggtgagaaggaggggcgtggctggacccagtggatcgagggtgatgagctgcacctggagatgagagtggaaggtgtggtctgcaagcaagtattcaagaaggtgcagtgaggcccaggcagacaaccttgtcccaaggaatcagcaggatgtgtgggccagga

SEQ ID NO: 175459 - DNA, 694 bp, Homo sapiens
  Payload ID: 14458
  Gene Symbol: RBP2
  Gene Name: retinol binding protein 2, cellular
  Uniprot ID: P50120
  ENST ID: ENST00000232217
  CDS Start-End: 58-462
ctgcagcctgctccttgccatccaccacaaaccctcaccgaaccagtggccaccaccatgacaagggaccagaatggaacctgggagatggagagtaatgaaaactttgagggctacatgaaggccctggatattgattttgccacccgcaagattgcagtacgtctcactcagacgaaggttattgatcaagatggtgataacttcaagacaaaaaccactagcacattccgcaactatgatgtggatttcactgttggagtagagtttgacgagtacacaaagagcctggataaccggcatgttaaggcactggtcacctgggaaggtgatgtccttgtgtgtgtgcaaaagggggagaaggagaaccgcggctggaagcagtggattgagggggacaagctgtacctggagctgacctgtggtgaccaggtgtgccgtcaagtgttcaaaaagaaatgatggcgacgtgggaggcctgccaagcacaagctccccactgcccacactgagtggtctactggctttgagaaacagctgtggggaccttcccactcttgacagagccccattaaggcatctgggtgggttttaaacagaatgcctatgtagcagtgatagacatattcccctcctttgaaacctagcattaaatggaaaaacaaaaattactcccatattttgaaacccttta

SEQ ID NO: 175460 - DNA, 180 bp, Homo sapiens
  Payload ID: 14458
  Gene Symbol: RBP2
  Gene Name: retinol binding protein 2, cellular
  ENST ID: ENST00000506825
  CDS Start-End: 108-180
tagggagccagcccaggagcccagctgctgcagtcagatgctcccaaggacagcagcctgctccttgccatccaccacaaaccctcaccgaaccagtggccaccaccatgacaagggaccagaatggaacctgggagatggagagtaatgaaaactttgagggctacatgaaggccctgg

SEQ ID NO: 175461 - DNA, 489 bp, Homo sapiens
  Payload ID: 14458
  Gene Symbol: RBP2
  Gene Name: retinol binding protein 2, cellular
  ENST ID: ENST00000511956
  CDS Start-End: 179-489
ctgctgcagtcagatgctcccaaggacagcagtctccagaaagcttcttgtaacctggaaagattggttatagttgatcattttcctccatcttaaaagtcacctgaagaattccacaaggacttagcctgctccttgccatccaccacaaaccctcaccgaaccagtggccaccaccatgacaagggaccagaatggaacctgggagatggagagtaatgaaaactttgagggctacatgaaggccctggatattgattttgccacccgcaagattgcagtacgtctcactcagacgaaggttattgatcaagatggtgataacttcaagacaaaaaccactagcacattccgcaactatgatgtggatttcactgttggagtagagtttgacgagtacacaaagagcctggataaccggcatgttaaggcactggtcacctgggaaggtgatgtccttgtgtgtgtgcaaaagggggagaaggagaa

SEQ ID NO: 175462 - DNA, 4276 bp, Homo sapiens
  Payload ID: 14459
  Gene Symbol: RBP3
  Gene Name: retinol binding protein 3, interstitial
  Uniprot ID: P10745
  ENST ID: ENST00000584701
  CDS Start-End: 115-3858
tgtccaccagctgagaaggacaagggcggaaggcagctgcacagagcagggccacggccttgcacacagtccagggagcttttgtgcaggagccaggcctccccctgggtccccatgatgagagaatgggttctgctcatgtccgtgctgctctgtggcctggctggccccacacacctgttccagccaagcctggtgctggacatggccaaggtcctcttggataactactgcttcccggagaacctgctgggcatgcaggaagccatccagcaggccatcaagagccatgagattctgagcatctcagacccgcagacgctggccagtgtgctgacagccggggtgcagagctccctgaacgatcctcgcctggtcatctcctatgagcccagcacccccgagcctcccccacaagtcccagcactcaccagcctctcagaagaggaactgcttgcctggctgcaaaggggcctccgccatgaggttctggagggtaatgtgggctacctgcgggtggacagcgtcccgggccaggaggtgctgagcatgatgggggagttcctggtggcccacgtgtgggggaatctcatgggcacctccgccttagtgctggatctccggcactgcacaggaggccaggtctctggcattccctacatcatctcctacctgcacccagggaacaccatcctgcacgtggacactatctacaaccgcccctccaacaccaccacggagatctggaccttgccccaggtcctgggagaaaggtacggtgccgacaaggatgtggtggtcctcaccagcagccagaccaggggcgtggccgaggacatcgcgcacatccttaagcagatgcgcagggccatcgtggtgggcgagcggactgggggaggggccctggacctccggaagctgaggataggcgagtctgacttcttcttcacggtgcccgtgtccaggtccctggggccccttggtggaggcagccagacgtgggagggcagcggggtgctgccctgtgtggggactccggccgagcaggccctggagaaagccctggccatcctcactctgcgcagcgcccttccaggggtagtccactgcctccaggaggtcctgaaggactactacacgctggtggaccgtgtgcccaccctgctgcagcacttggccagcatggacttctccacggtggtctccgaggaagatctggtcaccaagctcaatgccggcctgcaggctgcgtctgaggatcccaggctcctggtgcgagccatcgggcccacagaaactccttcttggcccgcgcccgacgctgcagccgaagactcaccaggggtggccccagagttgcctgaggacgaggctatccggcaagcactggtggactctgtgttccaggtgtcggtgctgccaggcaatgtgggctacctgcgcttcgatagttttgctgacgcctccgtcctgggtgtgttggccccatatgtcctgcgccaggtgtgggagccgctacaggacacggagcacctcatcatggacctgcgccacaaccctggagggccatcctctgctgtgcccctgctcctgtcctacttccagggccctgaggccggccccgtgcacctcttcaccacctatgatcgccgcaccaacatcacgcaggagcacttcagccacatggagctcccgggcccacgctacagcacccaacgtggggtgtatctgctcaccagccaccgcaccgccacggccgcggaggagttcgccttccttatgcagtcgctgggctgggccacactggtaggtgagatcaccgcgggcaacctgctgcacacccgcacggtgccgctgctggacacacccgaaggcagcctcgcgctcaccgtgccggtcctcaccttcatcgacaatcacggcgaggcctggctgggtggtggagtggtgcccgatgccatcgtgctggccgaggaggccctggacaaagcccaggaagtgctggagttccaccaaagcctgggggccttggtggagggcacagggcacctgctggaggcccactatgctcggccagaggtcgtggggcagaccagtgccctcctgcgggccaagctggcccagggcgcctaccgcacagctgtggacttggagtctctggcctctcagctcacagcagacctccaggaggtgtctggggaccaccgcttgctagtgttccacagccctggcgagctggtggtagaggaagcacccccaccaccccctgctgtcccctctccagaggagctcacctaccttattgaggccctgttcaagacagaggtgctgcccggccagctgggctacctgcgttttgacgccatggctgaactggagacagtgaaggccgtggggccacagctggtgcggctggtatggcaacagctggtggacacggctgcgctggtgatcgacctgcgctacaaccctggcagctactccacggccatcccgctgctctgctcctacttctttgaggcagagccccgccagcacctgtattctgtctttgacagggccacctcaaaagtcacggaggtgtggaccttgccccaggtcgccggccagcgctacggctcacacaaggacctctacatcctgatgagccacaccagtggctctgcggccgaggcctttgcacacaccatgcaggacctgcagcgggccacggtcattggggagcccacggccggaggcgcactctctgtgggcatctaccaggtgggcagcagccccttatatgcatccatgcccacccagatggccatgagtgccaccacaggcaaggcctgggacctggctggtgtggagcccgacatcactgtgcccatgagcgaagccctttccatagcccaggacatagtggctctgcgtgccaaggtgcccacggtgctgcagacggccgggaagctggtggctgataactatgcctctgccgagctgggggccaagatggccaccaaactgagcggtctgcagagccgctactccagggtgacctcagaagtggccctagccgagatcctgggggctgacctgcagatgctctccggagacccacacctgaaggcagcccatatccctgagaatgccaaggaccgcattcctggaattgtgcccatgcagatcccttcccctgaagtatttgaagagctgatcaagttttccttccacactaacgtgcttgaggacaacattggctacttgaggtttgacatgtttggggacggtgagctgctcacccaggtctccaggctgctggtggagcacatctggaagaagatcatgcacacggatgccatgatcatcgacatgaggttcaacatcggtggccccacatcctccattcccatcttgtgctcctacttctttgatgaaggccctccagttctgctggacaagatctacagccggcctgatgactctgtcagtgaactctggacacacgcccaggttgtaggtgaacgctatggctccaagaagagcatggtcattctgaccagcagtgtgacggccggcaccgcggaggagttcacctatatcatgaagaggctgggccgggccctggtcattggggaggtgaccagtgggggctgccagccaccacagacctaccacgtggatgacaccaacctctacctcactatccccacggcccgttctgtgggggcctcggatggcagctcctgggaaggggtgggggtgacaccccatgtggttgtccctgcagaagaggctctcgccagggccaaggagatgctccagcacaaccagctgagggtgaagcggagcccaggcctgcaggaccacctgtagggaagggccccataggcagagccccagggcagacagaacctctgggacacacaccaagggcactcctgcaggtggcccggcctgaggttcccaggagcagcaaaggggcctgctgagctctggttaggttacagctggaggtgtgtatatatacacacacacacatgtatatacacatatatatgtgtatgtatatatatgtatatatatatggctttccaataaccacctaaattttaacaaaggttccttctaagtggtagaacttggggtggtatttttaccttccttcttcatactttgctctttttcttaaatactcattaatgtgcatatatcattattttcagatgcagctatcattattccaaaatacaaaataaagaagataaaataaattatatacccgagccattaa

SEQ ID NO: 175463 - DNA, 1068 bp, Homo sapiens
  Payload ID: 14460
  Gene Symbol: RBP4
  Gene Name: retinol binding protein 4, plasma
  Uniprot ID: P02753
  ENST ID: ENST00000371464
  CDS Start-End: 75-680
gctccacgcgcgcccggactcggcggccaggcttgcgcgcggttcccctcccggtgggcggattcctgggcaagatgaagtgggtgtgggcgctcttgctgttggcggcgctgggcagcggccgcgcggagcgcgactgccgagtgagcagcttccgagtcaaggagaacttcgacaaggctcgcttctctgggacctggtacgccatggccaagaaggaccccgagggcctctttctgcaggacaacatcgtcgcggagttctccgtggacgagaccggccagatgagcgccacagccaagggccgagtccgtcttttgaataactgggacgtgtgcgcagacatggtgggcaccttcacagacaccgaggaccctgccaagttcaagatgaagtactggggcgtagcctcctttctccagaaaggaaatgatgaccactggatcgtcgacacagactacgacacgtatgccgtgcagtactcctgccgcctcctgaacctcgatggcacctgtgctgacagctactccttcgtgttttcccgggaccccaacggcctgcccccagaagcgcagaagattgtaaggcagcggcaggaggagctgtgcctggccaggcagtacaggctgatcgtccacaacggttactgcgatggcagatcagaaagaaaccttttgtagcaatatcaagaatctagtttcatctgagaacttctgattagctctcagtcttcagctctatttatcttaggagtttaatttgcccttctctccccatcttccctcagttcccataaaaccttcattacacataaagatacacgtgggggtcagtgaatctgcttgcctttcctgaaagtttctggggcttaagattccagactctgattcattaaactatagtcacccgtgtcctgtgattttagttttcatttgtgtttatgtctgtgctgcagacggatgggtggggtgcgcttctttataccaggagcacgtggctctttctgacctttggcctgttctagtgcctaatctccattattaaatactggcttctcccaacttcctg

SEQ ID NO: 175464 - DNA, 1314 bp, Homo sapiens
  Payload ID: 14460
  Gene Symbol: RBP4
  Gene Name: retinol binding protein 4, plasma
  Uniprot ID: P02753
  ENST ID: ENST00000371467
  CDS Start-End: 321-926
gccaatttggcatggccagggcctgggcactcacgcaccagggagcctcgcgggtccgctctcgctctgtgaggccacggtcttcccgccaggttgactcgagcctcctgccagagccactggccccggaggccaccctagaccgcagctggcggccgctggcacgagtgcagggtaactgagccagggccgctggcgcatttggcctggccgaggccaccccgcgcggccgctccactgtgcccgaggctgtcctggaggtgaggccggcccacagggaccctgcccgtgcccgggctccgggcggattcctgggcaagatgaagtgggtgtgggcgctcttgctgttggcggcgctgggcagcggccgcgcggagcgcgactgccgagtgagcagcttccgagtcaaggagaacttcgacaaggctcgcttctctgggacctggtacgccatggccaagaaggaccccgagggcctctttctgcaggacaacatcgtcgcggagttctccgtggacgagaccggccagatgagcgccacagccaagggccgagtccgtcttttgaataactgggacgtgtgcgcagacatggtgggcaccttcacagacaccgaggaccctgccaagttcaagatgaagtactggggcgtagcctcctttctccagaaaggaaatgatgaccactggatcgtcgacacagactacgacacgtatgccgtgcagtactcctgccgcctcctgaacctcgatggcacctgtgctgacagctactccttcgtgttttcccgggaccccaacggcctgcccccagaagcgcagaagattgtaaggcagcggcaggaggagctgtgcctggccaggcagtacaggctgatcgtccacaacggttactgcgatggcagatcagaaagaaaccttttgtagcaatatcaagaatctagtttcatctgagaacttctgattagctctcagtcttcagctctatttatcttaggagtttaatttgcccttctctccccatcttccctcagttcccataaaaccttcattacacataaagatacacgtgggggtcagtgaatctgcttgcctttcctgaaagtttctggggcttaagattccagactctgattcattaaactatagtcacccgtgtcctgtgattttagttttcatttgtgtttatgtctgtgctgcagacggatgggtggggtgcgcttctttataccaggagcacgtggctctttctgacctttggcctgttctagtgcctaatctccattattaaatactggcttctcccaacttcctg

SEQ ID NO: 175465 - DNA, 814 bp, Homo sapiens
  Payload ID: 14460
  Gene Symbol: RBP4
  Gene Name: retinol binding protein 4, plasma
  ENST ID: ENST00000371469
  CDS Start-End: 29-628
atcctttataaaatgaaaaactacttggatgaattattccaaaattcctgcacaagtggacctcagaaggcagacggagcgcgactgccgagtgagcagcttccgagtcaaggagaacttcgacaaggctcgcttctctgggacctggtacgccatggccaagaaggaccccgagggcctctttctgcaggacaacatcgtcgcggagttctccgtggacgagaccggccagatgagcgccacagccaagggccgagtccgtcttttgaataactgggacgtgtgcgcagacatggtgggcaccttcacagacaccgaggaccctgccaagttcaagatgaagtactggggcgtagcctcctttctccagaaaggaaatgatgaccactggatcgtcgacacagactacgacacgtatgccgtgcagtactcctgccgcctcctgaacctcgatggcacctgtgctgacagctactccttcgtgttttcccgggaccccaacggcctgcccccagaagcgcagaagattgtaaggcagcggcaggaggagctgtgcctggccaggcagtacaggctgatcgtccacaacggttactgcgatggcagatcagaaagaaaccttttgtagcaatatcaagaatctagtttcatctgagaacttctgattagctctcagtcttcagctctatttatcttaggagtttaatttgcccttctctccccatcttccctcagttcccataaaaccttcattacacataaagatacacgtgggggtcagtgaatctgcttgcctttcctgaaagtttctggg

SEQ ID NO: 175466 - DNA, 882 bp, Homo sapiens
  Payload ID: 14460
  Gene Symbol: RBP4
  Gene Name: retinol binding protein 4, plasma
  ENST ID: ENST00000615669
  CDS Start-End: 52-651
cggccaggcttgcgcgcggttcccctcccggtgggcggattcctgggcaagatgaagtgggtgtgggcgctcttgctgttggcggcgtgggcagcggccgagcgcgactgccgagtgagcagcttccgagtcaaggagaacttcgacaaggctcgcttctctgggacctggtacgccatggccaagaaggaccccgagggcctctttctgcaggacaacatcgtcgcggagttctccgtggacgagaccggccagatgagcgccacagccaagggccgagtccgtcttttgaataactgggacgtgtgcgcagacatggtgggcaccttcacagacaccgaggaccctgccaagttcaagatgaagtactggggcgtagcctcctttctccagaaaggaaatgatgaccactggatcgtcgacacagactacgacacgtatgccgtgcagtactcctgccgcctcctgaacctcgatggcacctgtgctgacagctactccttcgtgttttcccgggaccccaacggcctgcccccagaagcgcagaagattgtaaggcagcggcaggaggagctgtgcctggccaggcagtacaggctgatcgtccacaacggttactgcgatggcagatcagaaagaaaccttttgtagcaatatcaagaatctagtttcatctgagaacttctgattagctctcagtcttcagctctatttatcttaggagtttaatttgcccttctctccccatcttccctcagttcccataaaaccttcattacacataaagatacacgtgggggtcagtgaatctgcttgcctttcctgaaagtttctggggcttaagattccagactctgattcattaaactatagtcacccgtg

SEQ ID NO: 175467 - DNA, 838 bp, Homo sapiens
  Payload ID: 14460
  Gene Symbol: RBP4
  Gene Name: retinol binding protein 4, plasma
  ENST ID: ENST00000629763
  CDS Start-End: 1-600
atgaattattccaaaattcctgcacaagtggacctcagaaggcagacggagcgcgactgccgagtgagcagcttccgagtcaaggagaacttcgacaaggctcgcttctctgggacctggtacgccatggccaagaaggaccccgagggcctctttctgcaggacaacatcgtcgcggagttctccgtggacgagaccggccagatgagcgccacagccaagggccgagtccgtcttttgaataactgggacgtgtgcgcagacatggtgggcaccttcacagacaccgaggaccctgccaagttcaagatgaagtactggggcgtagcctcctttctccagaaaggaaatgatgaccactggatcgtcgacacagactacgacacgtatgccgtgcagtactcctgccgcctcctgaacctcgatggcacctgtgctgacagctactccttcgtgttttcccgggaccccaacggcctgcccccagaagcgcagaagattgtaaggcagcggcaggaggagctgtgcctggccaggcagtacaggctgatcgtccacaacggttactgcgatggcagatcagaaagaaaccttttgtagcaatatcaagaatctagtttcatctgagaacttctgattagctctcagtcttcagctctatttatcttaggagtttaatttgcccttctctccccatcttccctcagttcccataaaaccttcattacacataaagatacacgtgggggtcagtgaatctgcttgcctttcctgaaagtttctggggcttaagattccagactctgattcattaaactatagtcacccgtgtcctgtg

SEQ ID NO: 175468 - DNA, 1012 bp, Homo sapiens
  Payload ID: 14461
  Gene Symbol: RBP5
  Gene Name: retinol binding protein 5, cellular
  Uniprot ID: P82980
  ENST ID: ENST00000266560
  CDS Start-End: 168-575
ttattgcaacagggccccagccttataaaaagccctggtaacccggccattacacatcctgtctctgtgtgtggagctggctggaatctctcagcctcacctgccagacaacaccccctccttcctcaccctgtctcctgcattctcctgaaaccttcatccacacaatgcctcccaacctcactggctactaccgctttgtctcgcagaagaacatggaggactacctgcaagccctaaacatcagcttggctgtgcggaagatcgcgctgctgctgaagccggacaaggagatcgaacaccagggcaaccacatgacggtgaggacgctcagcaccttccgaaactacactgtgcagtttgatgtgggagtggagtttgaggaggacctcaggagcgtggacggacgaaaatgccagaccatagtaacctgggaggaggagcacctggtgtgtgtgcagaaaggggaggtccccaaccggggctggagacactggctggagggagagatgctgtatctggaactgactgcaagggatgcagtgtgcgagcaggtcttcaggaaggtcagatagccggagaggagccaagatccctccagacagcaccagctcacagacgctcttgttgtgcccccttcaagcccagattgtgccaggtcagctgtcccttcctctggccacctttcctccctctgggtccctcctcacccctccccgtgttaatctgtaacttgcagcccccaggccaaagtcctttctcacactccactgcccaatagtgacctcacttccaggtcaaggtctggcgtcccaaatgaaagaagcaggcaaagggaaggagcccctgagaacaaccaatctccgctctctcctgtccatttgacctcttcttttccttctaagaaagaactaagctttgggcatttggcgattagtgaaaattctatcctgatggacttctggaaaactgtgactggggttcaagagtttaaacaggggctactggcaga

SEQ ID NO: 175469 - DNA, 564 bp, Homo sapiens
  Payload ID: 14461
  Gene Symbol: RBP5
  Gene Name: retinol binding protein 5, cellular
  ENST ID: ENST00000542370
  CDS Start-End: 99-392
tgtggagctggctggaatctctcagcctcacctgccagacaacaccccctccttcctcaccctgtctcctgcattctcctgaaaccttcatccacacaatgcctcccaacctcactggctactaccgctttgtctcgcagaagaacatggaggactacctgcaagccctaaacatcagcttggctgtgcggaagatcgcgctgctgctgaagccggacaaggagatcgaacaccagggcaaccacatgacggtgaggacgctcagcaccttccgaaactacactgtgcagtttgatgtgggagtggagtttgaggaggacctcaggagcgtggacggacgaaaatgccaggctgcccttggcatgaattctccagccagagccatctcctgagctccagggcaatgttttcaactgcctacaaaatacagttggccctccatattcatgggttctgcatccacagcttcagcaaactgcaaatggaaaaatatttgggaaaaataaaaataaaaaataacaatacaaaatgatacaaataaaaaacaatacagtatagcaacta

SEQ ID NO: 175470 - DNA, 515 bp, Homo sapiens
  Payload ID: 14461
  Gene Symbol: RBP5
  Gene Name: retinol binding protein 5, cellular
  ENST ID: ENST00000543045
  CDS Start-End: 88-297
ctggaatctctcagcctcacctgccagacaacaccccctccttcctcaccctgtctcctgcattctcctgaaaccttcatccacacaatgcctcccaacctcactggctactaccgctttgtctcgcagaagaacatggaggactacctgcaagccctaagcagcccccacagacatcagcttggctgtgcggaagatcgcgctgctgctgaagccggacaaggagatcgaacaccagggcaaccacatgacggtgaggacgctcagcaccttccgaaactacactgtgcagtttgatgtgggagtggagtttgaggaggacctcaggagcgtggacggacgaaaatgccaggctgcccttggcatgaattctccagccagagccatctcctgagctccagggcaatgttttcaactgcctacaaaatacagttggccctccatattcatgggttctgcatccacagcttcagcaaactgcaaatggaaaaatatttgggaaaaataaaaataaa

SEQ ID NO: 175471 - DNA, 636 bp, Homo sapiens
  Payload ID: 14462
  Gene Symbol: RBP7
  Gene Name: retinol binding protein 7, cellular
  Uniprot ID: Q96R05
  ENST ID: ENST00000294435
  CDS Start-End: 44-448
gagcctccggccgcccgccgggtttgtcccgcgatccccgaccatgcccgccgacctcagcggtacttggaccctgctcagcagcgacaacttcgagggctacatgctggccctaggtattgactttgccactcgtaaaatagccaagttgctgaagccacagaaagtgattgagcagaatggggattcttttaccatccacacgaacagcagcctaaggaactactttgtgaaatttaaagttggagaagaatttgatgaagataacagaggcctggacaacagaaaatgcaagagtttggttatctgggacaatgacaggctcacctgtatccagaagggagaaaagaagaacagaggctggacccattggatcgaaggagacaaactccacctggaaatgttctgtgaaggtcaagtgtgcaaacagacattccagagagcctgatccacatccagcagcagagcccacttgtggctgcagctttatgccaaattatattgcagactgaacagacgtttatctatcccatttggcgacgaggactcgtggctggagagagccacacagcgtgtaacctgaagtcatctagattatggggaaactgctcagcttcaataaacctgtccaaatga

SEQ ID NO: 175472 - DNA, 861 bp, Homo sapiens
  Payload ID: 14462
  Gene Symbol: RBP7
  Gene Name: retinol binding protein 7, cellular
  ENST ID: ENST00000315901
  CDS Start-End: 54-233
gtcccggcccgagcctccggccgcccgccgggtttgtcccgcgatccccgaccatgcccgccgacctcagcggtacttggaccctgctcagcagcgacaacttcgagggctacatgctggccctagatggagttttgctcttgttgcccaggctggagtgcaatggcgggatctcggctcaccgcaacttccgtctccccggttcaaacaattctcctgcttcagcctcctgagtagctgggattgcaggcatgccccaccacgcccagctaattttgtatttttagtagagacggggtttctccatattggtcaggctggtctccaactcccgacctcaggtattgactttgccactcgtaaaatagccaagttgctgaagccacagaaagtgattgagcagaatggggattcttttaccatccacacgaacagcagcctaaggaactactttgtgaaatttaaagttggagaagaatttgatgaagataacagaggcctggacaacagaaaatgcaagagtttggttatctgggacaatgacaggctcacctgtatccagaagggagaaaagaagaacagaggctggacccattggatcgaaggagacaaactccacctggaaatgttctgtgaaggtcaagtgtgcaaacagacattccagagagcctgatccacatccagcagcagagcccacttgtggctgcagctttatgccaaattatattgcagactgaacagacgtttatctatcccatttggcgacgaggactcgtggctggagagagccacacagcgtgtaacctgaagtcatctagattatggggaaactgctcagcttcaataaacctgtccaaatga

SEQ ID NO: 175473 - DNA, 3949 bp, Homo sapiens
  Payload ID: 14463
  Gene Symbol: RDH10
  Gene Name: retinol dehydrogenase 10 (all-trans)
  Uniprot ID: Q8IZV5
  ENST ID: ENST00000240285
  CDS Start-End: 679-1704
cggagcgctctgacttgcaagcgggctgcgctgcggagcccagtgcccgagtgacacccgcggagagtgcagggccggggaacgcgagccctcgggggcagctgcaaggcgttgggcagcgcttgcctgcgccgagcgagtctccccttcccggcgctccgccgccccgcaccccactctcccaccctctcgcaacttgggtcgagttgacaactcccgcggcagcccgctggcccgtgccgcctccgctgcgcacccctcccccggggtgagagggagccggcgcgccggttccggggacgctcgggcggcagcagcttggccatgagggcagttcgagtagtctaactcgcggctgtcaccgccactgcagcggagccggccggccgggcgctgcgggacgggcgggcggctgccggcaggaggcgccgagccgggtgactgccgcggcgggcacagtccggggccacagcgccgagcccgggcgggagtggccccgcgcaggcagggagcggcgccgcgcactccaacccggcgggcacctcgggggcgggcgcggggcgcagccttctcgtcccggcctctgtgacaagcgccccggagccgggagcccgattgccgggctcggggtgggcgcggacgcaggcactgggctcgtgcggggccccgggcgtcgcgatgaacatcgtggtggagttcttcgtggtcactttcaaagtgctctgggcgttcgtgctggccgcggcgcgctggctggtgcggcccaaggagaagagcgtggcgggccaggtgtgcctcatcaccggcgccggcagcggcctgggccgcctcttcgcgctggagttcgcccggcgtcgggcgctgctggtgctgtgggacatcaacacgcaaagcaacgaggagacggctggcatggtgcgccacatctaccgcgacctggaggcggccgacgccgctgcgctgcaagctgggaatggtgaggaagaaattctgccccactgtaacttgcaggtttttacctacacctgtgacgtggggaagagggagaacgtctacctgacggctgaaagagtccgcaaggaggttggcgaagtctcagtcctggtcaataatgctggtgtggtctctgggcatcaccttctggaatgtcctgatgagctcattgagagaaccatgatggtcaattgccatgcacacttctggaccactaaggcttttcttcctacgatgctggagattaatcatggtcatattgtgacagttgcaagttccttgggattgttcagtactgccggagttgaggattactgtgccagtaaatttggagttgtgggttttcatgaatccctgagccatgaactaaaggctgctgaaaaggatggaattaaaacaaccttggtttgcccttatcttgtagacactggcatgttcagaggctgccgaatcaggaaagaaattgagccttttctgccacctctgaagcctgattactgtgtgaagcaggccatgaaggccatcctcactgaccagcccatgatctgcactccccgcctcatgtacatcgtgaccttcatgaagagcatcctaccatttgaagcagttgtgtgcatgtatcggttcctaggagcggacaagtgtatgtacccctttattgctcaaagaaagcaagccacaaacaataatgaagcaaaaaatggaatctaagaatctttttgtatggaatattacttctatcagaagatgatcaagatgtttcagtccagtgcacatcagcattgctgacattttatggattctaaacttgtgttgtttcttttttaaatcaactttttaaaaaaataaagtgtaaattaaccgactagagtacttggaaaatgtgatcagtacaagtgaacttaggttgttgccaacagggtccttttaggcagaacccagaaaccagtcaaatctgtagagaagcagtgtgacatcttcaggttaccattattttttaatgagcaggaagtctagaaatgataactagactgtatgtttcatgtgtgtgatttttcagaattcccagagtttactcattcttgttattaaactctagccagttgacatcttcgcaatttcaaggactgatagtgctgtattttctcacgttttctaagtttccgttttgcaaggcctaggtgactttttcatggtgtttgtatgtttagctcttttgaaaaggaattttgaaatctccatcaactgaagtaaatgatgtctgagtgttacagtaaaggtgaccaagtctctttcttaaagtcacaatgactaaagtattagttgaatttttttttttttttttttgatggagtctcgctctgtcaccaggctggagtgcagtagcacaatcacggctcactgcaatctctgcctcccagtttcaagtgattctgctgtctcagcctcccaagtagctgggactacaggcatgcgccaccacgcccagctaatttttgtatttttagtagagacggggtttcaccatgttggtcaggatggtctccatctcttgacattgtgatccacctgcctcggcctcccaaagtgctgggattacaggcatgagccactgcacccagccttgaatttttaattttatctctgatatacttcattaagtgtctggagacctaattatcctaaaagatcatacattttctacctatgaattttgctgcatacagaaagtgccctttcctcaggaagttgctgtgtttcatttctttggatggactcttatctagaatacatagcagctctgcaaaggaacagtttttaaaaatgggaacttctacattgaaaagtccccatttttgtgccaactatgattagtgagaggaagaaatcttattctatggcatatgtatggaagggtgtaaagattcttttgaaaggtttattcacattgtagaacagcaaatgacatttttacagtatttttttgtaaagcaaactattttgtgccttgaatttggtatatgtgtattagtgaaacattgtaaaggtgaacttctacctctgtatctaaatgtataccatccacttgtaaatgactataaactattatgtgattgcttttttttttagaatgtcttgtttaaatagtggccaatgtttaaggctgttaaaataagccaacttttactaattggggagttttataaatgactgattaaatttaaagaattaacttacatgcaattgtgtgattattagttatcagcagtgttgtaaggaaaattattgtgtttttttttatgatcattatcccactttaggtaaagaaaaatattggaatggaatagtgttgggaaacagacattaacaacctagggtgcctgcactcaaatagccgatgttactgtccctagattagagacttgattaagggcttgtttgtaccaaaagtggggaaacaatgccatgacctgtgttttagtttggctgcaccacagatcaaatctgcactgtgtctacatataggaaaggtcctggtgtgtgctaatgttcccaatgcaggacttgaggaagagctctgttatatgtttccatttctctttatcaaagataaccaaaccttatggcccttataacaatggaggcactggctgcctcttaattttcaatcatggacctaaagaagtactctgaagggtctcaacaatgccaggtggggacagatatactcagagattatccaggtctgcctcccagcgagcctggagtacaccagaccctcctagagaaatctgttataatttaacaacccacttatccaccttaaaactgaggaaagtcgtctttacatctaattttattcttgtgtgttataacttaaacctatttctatttttgtttgttattgcccttataagggtgtccatctccaagttcaataaactaattcatttaa

SEQ ID NO: 175474 - DNA, 978 bp, Homo sapiens
  Payload ID: 14463
  Gene Symbol: RDH10
  Gene Name: retinol dehydrogenase 10 (all-trans)
  ENST ID: ENST00000519380
  CDS Start-End: 385-915
tgggaggaaggcagctgtaaagctcagtcgttggcaagccttgcagcgttagaaatttgaagctcactgtagtatttttgttttgtgtgatctttgtcctactgatcgccatgtgactcactttctgcacttccttctcttttgcatgttttctcctcatctggacttctgaggacagctgggaatggtgaggaagaaattctgccccactgtaacttgcaggtttttacctacacctgtgacgtggggaagagggagaacgtctacctgacggctgaaagagtccgcaaggaggttggcgaagtctcagtcctggtcaataatgctggtgtggtctctgggcatcaccttctggaatgtcctgatgagctcattgagagaaccatgatggtcaattgccatgcacacttctggaccactaaggcttttcttcctacgatgctggagattaatcatggtcatattgtgacagttgcaagttccttgggattgttcagtactgccggagttgaggattactgtgccagtaaatttggagttgtgggttttcatgaatccctgagccatgaactaaaggctgctgaaaaggatggaattaaaacaaccttggtttgcccttatcttgtagacactggcatgttcagaggctgccgaatcaggaaagaaattgagccttttctgccacctctgaagcctgattactgtgtgaagcaggccatgaaggccatcctcactgaccagcccatgatctgcactccccgcctcatgtacatcgtgaccttcatgaagagcatcctaccatttgaagcagttgtgtgcatgtatcggttcctaggagcggacaagtgtatgtacccctttattgctcaaagaaagcaagccacaaacaataatgaagcaaaaaatggaatctaagaatctttttgtatggaatattacttctatcagaagatgatcaagatgtttcagtccagtgca

SEQ ID NO: 175475 - DNA, 436 bp, Homo sapiens
  Payload ID: 14463
  Gene Symbol: RDH10
  Gene Name: retinol dehydrogenase 10 (all-trans)
  ENST ID: ENST00000521928
  CDS Start-End: 251-436
aagccctccggggtagggaaggcggagggaacttgttaccacagctgggaatggtgaggaagaaattctgccccactgtaacttgcaggtttttacctacacctgtgacgtggggaagagggagaacgtctacctgacggctgaaagagtccgcaaggaggttggcgaagtctcagtcctggtcaataatgctggtgtggtctctgggcatcaccttctggaatgtcctgatgagctcattgagagaaccatgatggtcaattgccatgcacacttctggaccactaaggcttttcttcctacgatgctggagattaatcatggtcatattgtgacagttgcaagttccttgggattgttcagtactgccggagttgaggattactgtgccagtaaatttggagttgtgggttttcatgaatccctgagccatgaa

SEQ ID NO: 175476 - DNA, 2588 bp, Homo sapiens
  Payload ID: 14464
  Gene Symbol: RDH11
  Gene Name: retinol dehydrogenase 11 (all-trans/9-cis/11-cis)
  Uniprot ID: Q8TC12
  ENST ID: ENST00000381346
  CDS Start-End: 112-1068
gtctgctccccgggctgtcgcaatttgaattggggcgtgtctagaaagagaagccatagtcggcgagcaacgctggagcatcccgctctggtgccgctgcagccggcagagatggttgagctcatgttcccgctgttgctcctccttctgcccttccttctgtatatggctgcgccccaaatcaggaaaatgctgtccagtggggtgtgtacatcaactgttcagcttcctgggaaagtagttgtggtcacaggagctaatacaggtatcgggaaggagacagccaaagagctggctcagagaggagctcgagtatatttagcttgccgggatgtggaaaagggggaattggtggccaaagagatccagaccacgacagggaaccagcaggtgttggtgcggaaactggacctgtctgatactaagtctattcgagcttttgctaagggcttcttagctgaggaaaagcacctccacgttttgatcaacaatgcaggagtgatgatgtgtccgtactcgaagacagcagatggctttgagatgcacataggagtcaaccacttgggtcacttcctcctaacccatctgctgctagagaaactaaaggaatcagccccatcaaggatagtaaatgtgtcttccctcgcacatcacctgggaaggatccacttccataacctgcagggcgagaaattctacaatgcaggcctggcctactgtcacagcaagctagccaacatcctcttcacccaggaactggcccggagactaaaaggctctggcgttacgacgtattctgtacaccctggcacagtccaatctgaactggttcggcactcatctttcatgagatggatgtggtggcttttctcctttttcatcaagactcctcagcagggagcccagaccagcctgcactgtgccttaacagaaggtcttgagattctaagtgggaatcatttcagtgactgtcatgtggcatgggtctctgcccaagctcgtaatgagactatagcaaggcggctgtgggacgtcagttgtgacctgctgggcctcccaatagactaacaggcagtgccagttggacccaagagaagactgcagcagactacacagtacttcttgtcaaaatgattctccttcaaggttttcaaaacctttagcacaaagagagcaaaaccttccagccttgcctgcttggtgtccagttaaaactcagtgtactgccagattcgtctaaatgtctgtcatgtccagatttactttgcttctgttactgccagagttactagagatatcataataggataagaagaccctcatatgacctgcacagctcattttccttctgaaagaaactactacctaggagaatctaagctatagcagggatgatttatgcaaatttgaactagcttctttgttcacaattcagttcctcccaaccaaccagtcttcacttcaagagggccacactgcaacctcagcttaacatgaataacaaagactggctcaggagcagggcttgcccaggcatggtggatcaccggaggtcagtagttcaagaccagcctggccaacatggtgaaaccccacctctactaaaaattgtgtatatctttgtgtgtcttcctgtttatgtgtgccaagggagtattttcacaaagttcaaaacagccacaataatcagagatggagcaaaccagtgccatccagtctttatgcaaatgaaatgctgcaaagggaagcagattctgtatatgttggtaactacccaccaagagcacatgggtagcagggaagaagtaaaaaaagagaaggagaatactggaagataatgcacaaaatgaagggactagttaaggattaactagccctttaaggattaactagttaaggattaatagcaaaagatattaaatatgctaacatagctatggaggaattgagggcaagcacccaggactgatgaggtcttaacaaaaaccagtgtggcaaaaaaaaaaaaaaaaaaaaaaaaaaaaatcctaaaaacaaacaaacaaaaaaaacaattcttcattcagaaaaattatcttagggactgatattggtaattatggtcaatttaataatattttggggcatttccttacattgtcttgacaagattaaaatgtctgtgccaaaattttgtattttatttggagacttcttatcaaaagtaatgctgccaaaggaagtctaaggaattagtagtgttcccatcacttgtttggagtgtgctattctaaaagattttgatttcctggaatgacaattatattttaactttggtgggggaaagagttataggaccacagtcttcacttctgatacttgtaaattaatcttttattgcacttgttttgaccattaagctatatgtttagaaatggtcattttacggaaaaattagaaaaattctgataatagtgcagaataaatgaattaatgttttacttaatttatattgaactgtcaatgacaaataaaaattctttttgattattttttgttttcatttaccagaataaaaactaagaattaaaagtttgattacagtcaaa

SEQ ID NO: 175477 - DNA, 1064 bp, Homo sapiens
  Payload ID: 14464
  Gene Symbol: RDH11
  Gene Name: retinol dehydrogenase 11 (all-trans/9-cis/11-cis)
  Uniprot ID: Q8TC12
  ENST ID: ENST00000428130
  CDS Start-End: 31-777
cccgctctggtgccgctgcagccggcagagatggttgagctcatgttcccgctgttgctcctccttctgcccttccttctgtatatggctgcgccccaaatcaggaaaatgctgtccagtggggtgtgtacatcaactgttcagcttcctgggaaagtagttgtggtcacaggagctaatacaggtatcgggaaggagacagccaaagagctggctcagagaggagctcgagtatatttagcttgccgggatgtggaaaagggggaattggtggccaaagagatccagaccacgacagggaaccagcaggtgttggtgcggaaactggacctgtctgatactaagtctattcgagcttttgctaagggcttcttagctgaggaaaagcacctccacgttttgatcaacaatgcaggagtgatgatgtgtccgtactcgaagacagcagatggctttgagatgcacataggagtcaaccacttgggctctggcgttacgacgtattctgtacaccctggcacagtccaatctgaactggttcggcactcatctttcatgagatggatgtggtggcttttctcctttttcatcaagactcctcagcagggagcccagaccagcctgcactgtgccttaacagaaggtcttgagattctaagtgggaatcatttcagtgactgtcatgtggcatgggtctctgcccaagctcgtaatgagactatagcaaggcggctgtgggacgtcagttgtgacctgctgggcctcccaatagactaacaggcagtgccagttggacccaagagaagactgcagcagactacacagtacttcttgtcaaaatgattctccttcaaggttttcaaaacctttagcacaaagagagcaaaaccttccagccttgcctgcttggtgtccagttaaaactcagtgtactgccagattcgtctaaatgtctgtcatgtccagatttactttgcttctgttactgccagagttactagagatatcataataggataagaagaccctcatatgacctgcacagctcattttccttctgaaag

SEQ ID NO: 175478 - DNA, 621 bp, Homo sapiens
  Payload ID: 14464
  Gene Symbol: RDH11
  Gene Name: retinol dehydrogenase 11 (all-trans/9-cis/11-cis)
  ENST ID: ENST00000557726
  CDS Start-End: 62-621
aagccatagtcggcgagcaacgctggagcatcccgctctggtgccgctgcagccggcagagatggttgagctcatgttcccgctgttgctcctccttctgcccttccttctgtatatggctgcgccccaaatcaggaaaatgctgtccagtggggtgtgtacatcaactgttcagcttcctgggaaagtagttgtggtcacaggagctaatacaggtatcgggaaggagacagccaaagagctggctcagagagaggaaaagcacctccacgttttgatcaacaatgcaggagtgatgatgtgtccgtactcgaagacagcagatggctttgagatgcacataggagtcaaccacttgggtcacttcctcctaacccatctgctgctagagaaactaaaggaatcagccccatcaaggatagtaaatgtgtcttccctcgcacatcacctgggaaggatccacttccataacctgcagggcgagaaattctacaatgcaggcctggcctactgtcacagcaagctagccaacatcctcttcacccaggaactggcccggagactaaaaggctctggcgttacgacgtattctgtacaccctggcacagtccaatctgaact

SEQ ID NO: 175479 - DNA, 562 bp, Homo sapiens
  Payload ID: 14464
  Gene Symbol: RDH11
  Gene Name: retinol dehydrogenase 11 (all-trans/9-cis/11-cis)
  ENST ID: ENST00000557273
  CDS Start-End: 28-562
gctctggtgccgctgcagccggcagagatggttgagctcatgttcccgctgttgctcctccttctgcccttccttctgtatatggctgcgccccaaatcaggaaaatgctgtccagtggggtgtgtacatcaactgttcagcttcctgggaaagtagttgtggtcacaggagctaatacaggtatcgggaaggagacagccaaagagctggctcagagaggtcacttcctcctaacccatctgctgctagagaaactaaaggaatcagccccatcaaggatagtaaatgtgtcttccctcgcacatcacctgggaaggatccacttccataacctgcagggcgagaaattctacaatgcaggcctggcctactgtcacagcaagctagccaacatcctcttcacccaggaactggcccggagactaaaaggctctggcgttacgacgtattctgtacaccctggcacagtccaatctgaactggttcggcactcatctttcatgagatggatgtggtggcttttctcctttttcatcaagactcctcagcagggagcccaga

SEQ ID NO: 175480 - DNA, 849 bp, Homo sapiens
  Payload ID: 14464
  Gene Symbol: RDH11
  Gene Name: retinol dehydrogenase 11 (all-trans/9-cis/11-cis)
  ENST ID: ENST00000554035
  CDS Start-End: 1-615
tctgatactaagtctattcgagcttttgctaagggcttcttagctgaggaaaagcacctccacgttttgatcaacaatgcaggagtgatgatgtgtccgtactcgaagacagcagatggctttgagatgcacataggagtcaaccacttgggtcacttcctcctaacccatctgctgctagagaaactaaaggaatcagccccatcaaggatagtaaatgtgtcttccctcgcacatcacctgggaaggatccacttccataacctgcagggcgagaaattctacaatgcaggcctggcctactgtcacagcaagctagccaacatcctcttcacccaggaactggcccggagactaaaagtccaatctgaactggttcggcactcatctttcatgagatggatgtggtggcttttctcctttttcatcaagactcctcagcagggagcccagaccagcctgcactgtgccttaacagaaggtcttgagattctaagtgggaatcatttcagtgactgtcatgtggcatgggtctctgcccaagctcgtaatgagactatagcaaggcggctgtgggacgtcagttgtgacctgctgggcctcccaatagactaacaggcagtgccagttggacccaagagaagactgcagcagactacacagtacttcttgtcaaaatgattctccttcaaggttttcaaaacctttagcacaaagagagcaaaaccttccagccttgcctgcttggtgtccagttaaaactcagtgtactgccagattcgtctaaatgtctgtcatgtccagatttactttgcttctgttactgccagagttactagagatatcata

SEQ ID NO: 175481 - DNA, 888 bp, Homo sapiens
  Payload ID: 14464
  Gene Symbol: RDH11
  Gene Name: retinol dehydrogenase 11 (all-trans/9-cis/11-cis)
  ENST ID: ENST00000554731
  CDS Start-End: 64-249
agaagccatagtcggcgagcaacgctggagcatcccgctctggtgccgctgcagccggcagagatggttgagctcatgttcccgctgttgctcctccttctgcccttccttctgtatatggctgcgccccaaatcaggtcacttcctcctaacccatctgctgctagagaaactaaaggaatcagccccatcaaggatagtaaatgtgtcttccctcgcacatcacctgggaaggatccacttccataacctgcagggcgagaaattctacaatgcaggcctggcctactgtcacagcaagctagccaacatcctcttcacccaggaactggcccggagactaaaaggctctggcgttacgacgtattctgtacaccctggcacagtccaatctgaactggttcggcactcatctttcatgagatggatgtggtggcttttctcctttttcatcaagactcctcagcagggagcccagaccagcctgcactgtgccttaacagaaggtcttgagattctaagtgggaatcatttcagtgactgtcatgtggcatgggtctctgcccaagctcgtaatgagactatagcaaggcggctgtgggacgtcagttgtgacctgctgggcctcccaatagactaacaggcagtgccagttggacccaagagaagactgcagcagactacacagtacttcttgtcaaaatgattctccttcaaggttttcaaaacctttagcacaaagagagcaaaaccttccagccttgcctgcttggtgtccagttaaaactcagtgtactgccagattcgtctaaatgtctgtcatgtccagatttactttgcttctgttactgccagagttactagagatatcataataggataagaaga

SEQ ID NO: 175482 - DNA, 1926 bp, Homo sapiens
  Payload ID: 14464
  Gene Symbol: RDH11
  Gene Name: retinol dehydrogenase 11 (all-trans/9-cis/11-cis)
  Uniprot ID: Q8TC12
  ENST ID: ENST00000553384
  CDS Start-End: 52-969
cggcgagcaacgctggagcatcccgctctggtgccgctgcagccggcagagatggttgagctcatgttcccgctgttgctcctccttctgcccttccttctgtatatggctgcgccccaaatcaggaaaatgctgtccagtggggtgtgtacatcaactgttcagcttcctgggaaagtagttgtggtcacaggagctaatacaggagctcgagtatatttagcttgccgggatgtggaaaagggggaattggtggccaaagagatccagaccacgacagggaaccagcaggtgttggtgcggaaactggacctgtctgatactaagtctattcgagcttttgctaagggcttcttagctgaggaaaagcacctccacgttttgatcaacaatgcaggagtgatgatgtgtccgtactcgaagacagcagatggctttgagatgcacataggagtcaaccacttgggtcacttcctcctaacccatctgctgctagagaaactaaaggaatcagccccatcaaggatagtaaatgtgtcttccctcgcacatcacctgggaaggatccacttccataacctgcagggcgagaaattctacaatgcaggcctggcctactgtcacagcaagctagccaacatcctcttcacccaggaactggcccggagactaaaaggctctggcgttacgacgtattctgtacaccctggcacagtccaatctgaactggttcggcactcatctttcatgagatggatgtggtggcttttctcctttttcatcaagactcctcagcagggagcccagaccagcctgcactgtgccttaacagaaggtcttgagattctaagtgggaatcatttcagtgactgtcatgtggcatgggtctctgcccaagctcgtaatgagactatagcaaggcggctgtgggacgtcagttgtgacctgctgggcctcccaatagactaacaggcagtgccagttggacccaagagaagactgcagcagactacacagtacttcttgtcaaaatgattctccttcaaggttttcaaaacctttagcacaaagagagcaaaaccttccagccttgcctgcttggtgtccagttaaaactcagtgtactgccagattcgtctaaatgtctgtcatgtccagatttactttgcttctgttactgccagagttactagagatatcataataggataagaagaccctcatatgacctgcacagctcattttccttctgaaagaaactactacctaggagaatctaagctatagcagggatgatttatgcaaatttgaactagcttctttgttcacaattcagttcctcccaaccaaccagtcttcacttcaagagggccacactgcaacctcagcttaacatgaataacaaagactggctcaggagcagggcttgcccaggcatggtggatcaccggaggtcagtagttcaagaccagcctggccaacatggtgaaaccccacctctactaaaaattgtgtatatctttgtgtgtcttcctgtttatgtgtgccaagggagtattttcacaaagttcaaaacagccacaataatcagagatggagcaaaccagtgccatccagtctttatgcaaatgaaatgctgcaaagggaagcagattctgtatatgttggtaactacccaccaagagcacatgggtagcagggaagaagtaaaaaaagagaaggagaatactggaagataatgcacaaaatgaagggactagttaaggattaactagccctttaaggattaactagttaaggattaatagcaaaagatattaaatatgctaacatagctatggaggaattgagggcaagcacccaggactgatgaggtcttaacaaaaaccagtgtggcaaaaaaaaaaaaaaaaaaaaaaaaaaaaa

SEQ ID NO: 175483 - DNA, 553 bp, Homo sapiens
  Payload ID: 14464
  Gene Symbol: RDH11
  Gene Name: retinol dehydrogenase 11 (all-trans/9-cis/11-cis)
  ENST ID: ENST00000557331
  CDS Start-End: 72-260
ctagaaagagaagccatagtcggcgagcaacgctggagcatcccgctctggtgccgctgcagccggcagagatggttgagctcatgttcccgctgttgctcctccttctgcccttccttctgtatatggctgcgccccaaatcaggagctcgagtatatttagcttgccgggatgtggaaaagggggaattggtggccaaagagatccagaccacgacagggaaccagcaggtgttggtgcggaaactggacctgtctgatactaagtctattcgagcttttgctaagggcttcttagctgaggaaaagcacctccacgttttgatcaacaatgcaggagtgatgatgtgtccgtactcgaagacagcagatggctttgagatgcacataggagtcaaccacttgggtcacttcctcctaacccatctgctgctagagaaactaaaggaatcagccccatcaaggatagtaaatgtgtcttccctcgcacatcacctgggaaggatccacttccataacctgcagggcgagaaattctacaatgcaggcctgg

SEQ ID NO: 175484 - DNA, 1833 bp, Homo sapiens
  Payload ID: 14465
  Gene Symbol: RDH12
  Gene Name: retinol dehydrogenase 12 (all-trans/9-cis/11-cis)
  Uniprot ID: Q96NR8
  ENST ID: ENST00000267502
  CDS Start-End: 281-1231
ctccagaggactgtatgctgttcttaaggactctctgcttcctggacaagctcaagctaaggactacatctcccagcaggctgtgctctgacagctcttggatttaaataggattctgggctctgctcagagtcaggctgctgctcagcacccaggacggagaggagcagagaagcagcagaagcagccaagagctggagccagaccaggaacctgagccagagctggggttgaagctggagcagcagcaaaagcaacagcagctacagaagttggaacgatgctggtcaccttgggactgctcacctccttcttctcgttcctgtatatggtagctccatccatcaggaagttctttgctggtggagtgtgtagaacaaatgtgcagcttcctggcaaggtagtggtgatcactggcgccaacacgggcattggcaaggagacggccagagagctcgctagccgaggagcccgagtctatattgcctgcagagatgtactgaagggggagtctgctgccagtgaaatccgagtggatacaaagaactcccaggtgctggtgcggaaattggacctatccgacaccaaatctatccgagcctttgctgagggctttctggcagaggaaaagcagctccatattctgatcaacaatgcgggagtaatgatgtgtccatattccaagacagctgatggctttgaaacccacctgggagtcaaccacctgggccacttcctcctcacctacctgctcctggagcggctaaaggtgtctgcccctgcacgggtggttaatgtgtcctcggtggctcaccacattggcaagattcccttccacgacctccagagcgagaagcgctacagcaggggttttgcctattgccacagcaagctggccaatgtgctttttactcgtgagctggccaagaggctccaaggcaccggggtcaccacctacgcagtgcacccaggcgtcgtccgctctgagctggtccggcactcctccctgctctgcctgctctggcggctcttctccccctttgtcaagacggcacgggagggggcgcagaccagcctgcactgcgccctggctgagggcctggagcccctgagtggcaagtacttcagtgactgcaagaggacctgggtgtctccaagggcccgaaataacaaaacagctgagcgcctatggaatgtcagctgtgagcttctaggaatccggtgggagtagctggtggaagagctgcagctttatcaggcccaatccatgccataatgaacagggaccaaggagaaggccaaccctaaaggattgtcctcttggccagctggtgctgcgaatcctgcctgctctgatcctcttgacccttctgggaatgtttgcacacctgacactcttgtgagactggcttatggcatgagttgtggacacctatagagtgttcttctctaagacctggaaagtcagcaaccctctgggggcagcaggactgggcagatcccaggctgggcatgggggtggcagaagagcccgagaaattgggtcagttccctcatcagcaccagaggctcagctgaggcaagaagagcaccatcactgcctatttctaggggctatacactccaactcttggttgatctctttctttttaaaaatatttgccaccaccctggagtctagaccaacacacaaagatcctggctaaccctggcctatttagattccttcctctcacctggaccttcccatttcaatcatgcagatggtttctttttgtaaagagttccgtttgcctttcaatttttagagaaaataaagactgcattcatctc

SEQ ID NO: 175485 - DNA, 1879 bp, Homo sapiens
  Payload ID: 14465
  Gene Symbol: RDH12
  Gene Name: retinol dehydrogenase 12 (all-trans/9-cis/11-cis)
  Uniprot ID: Q96NR8
  ENST ID: ENST00000551171
  CDS Start-End: 325-1275
gggcacaagcaatcctcccttctcagcttcctgagtggccaggactacagaggactgtatgctgttcttaaggactctctgcttcctggacaagctcaagctaaggactacatctcccagcaggctgtgctctgacagctcttggatttaaataggattctgggctctgctcagagtcaggctgctgctcagcacccaggacggagaggagcagagaagcagcagaagcagccaagagctggagccagaccaggaacctgagccagagctggggttgaagctggagcagcagcaaaagcaacagcagctacagaagttggaacgatgctggtcaccttgggactgctcacctccttcttctcgttcctgtatatggtagctccatccatcaggaagttctttgctggtggagtgtgtagaacaaatgtgcagcttcctggcaaggtagtggtgatcactggcgccaacacgggcattggcaaggagacggccagagagctcgctagccgaggagcccgagtctatattgcctgcagagatgtactgaagggggagtctgctgccagtgaaatccgagtggatacaaagaactcccaggtgctggtgcggaaattggacctatccgacaccaaatctatccgagcctttgctgagggctttctggcagaggaaaagcagctccatattctgatcaacaatgcgggagtaatgatgtgtccatattccaagacagctgatggctttgaaacccacctgggagtcaaccacctgggccacttcctcctcacctacctgctcctggagcggctaaaggtgtctgcccctgcacgggtggttaatgtgtcctcggtggctcaccacattggcaagattcccttccacgacctccagagcgagaagcgctacagcaggggttttgcctattgccacagcaagctggccaatgtgctttttactcgtgagctggccaagaggctccaaggcaccggggtcaccacctacgcagtgcacccaggcgtcgtccgctctgagctggtccggcactcctccctgctctgcctgctctggcggctcttctccccctttgtcaagacggcacgggagggggcgcagaccagcctgcactgcgccctggctgagggcctggagcccctgagtggcaagtacttcagtgactgcaagaggacctgggtgtctccaagggcccgaaataacaaaacagctgagcgcctatggaatgtcagctgtgagcttctaggaatccggtgggagtagctggtggaagagctgcagctttatcaggcccaatccatgccataatgaacagggaccaaggagaaggccaaccctaaaggattgtcctcttggccagctggtgctgcgaatcctgcctgctctgatcctcttgacccttctgggaatgtttgcacacctgacactcttgtgagactggcttatggcatgagttgtggacacctatagagtgttcttctctaagacctggaaagtcagcaaccctctgggggcagcaggactgggcagatcccaggctgggcatgggggtggcagaagagcccgagaaattgggtcagttccctcatcagcaccagaggctcagctgaggcaagaagagcaccatcactgcctatttctaggggctatacactccaactcttggttgatctctttctttttaaaaatatttgccaccaccctggagtctagaccaacacacaaagatcctggctaaccctggcctatttagattccttcctctcacctggaccttcccatttcaatcatgcagatggtttctttttgtaaagagttccgtttgcctttcaatttttagagaaaataaagactgcattcatctcat

SEQ ID NO: 175486 - DNA, 3022 bp, Homo sapiens
  Payload ID: 14466
  Gene Symbol: RDH13
  Gene Name: retinol dehydrogenase 13 (all-trans/9-cis)
  ENST ID: ENST00000291892
  CDS Start-End: 802-1464
ctaagaaaggtagttcaggcagagttcagggaagatatctctgtgcagggccagacatggggatgagattctgataatttgggaatgaatcaggcccccagcccctcctccctcagactcagcagtccaggcacccggccctcctccctcggacccagaagtccatgctcccagcccctcctcccttggacccaggagtccaggcccccagcccctcctccctcagacccaggagtccaggcccccagccgccttctcctgcaggaccccaggagcttgggtacccacaggctactagatccttgtttctgtgcatggaaattctcaaattatctccaaaagtctatgaagaaggtaaacacacatttccagatgagggaataggctgatatagttgaaagacacacagagggtcacagtctggaattgacagtggtgggattcgaacctatttcactccagaactgcgtagcgccttatacgctgcggcaagtgtgacgtcattcgaacaaaccataggccccgcccccggactagccacgcccacaggctcctgaaaccaccaatcccagctgtgacagcgctcaggaccgatgctcataggtcccgtccctaggatccccgccccctccgcccgcgccccgcccctcgcagcccagttccggacgcgggcccagccgcgcctgcgcctccgctcgcctgtggctgcgtcgcgcgctcttcctcggagctacccaggcggctggtgtgcagcaagctccgcgccgacccctgacgcctgacgcctgtccccggcccggcatgagccgctacctgctgccgctgtcggcgctgggcacggtagcaggcgccgccgtgctgctcaaggactatgtcaccggtggggcttgccccagcaaggccaccatccctgggaagacggtcatcgtgacgggtgccaacacaggcatcgggaagcagaccgccttggaactggccaggagaggaggcaacatcatcctggcctgccgagacatggagaagtgtgaggcggcagcaaaggacatccgcggggagaccctcaatcaccatgtcaacgcccggcacctggacttggcttccctcaagtctatccgagagtttgcagcaaagatcattgaagaggaggagcgagtggacattctaatcaacaacgcgggtgtgatgcggtgcccccactggaccaccgaggacggcttcgagatgcagtttggcgttaaccacctgggtcactttctcttgacaaacttgctgctggacaagctgaaagcctcagccccttcgcggatcatcaacctctcgtccctggcccatgttgctgggcacatagactttgacgacttgaactggcagacgaggaagtataacaccaaagccgcctactgccagagcaagctcgccatcgtcctcttcaccaaggagctgagccggcggctgcaaggctgatgggaggccaaacggtggatccagaacagagtcagcaaaagtagagcatgtggaccacgctgcccgcttctggtgcctgaagcagacatcactaatcgatcgttcttctgaggattgtctgttcatcccaggtggtctagtctgcctggatcagatgtccttccctgctgctgttgggcaggcagctcagccttttggctccagccagctctggtgtgactgtcaacgccctgcaccccggcgtggccaggacagagctgggcagacacacgggcatccatggctccaccttctccagcaccacactcggtgagtcccctcccagcctggggtctccacgtggagccctccacccctgctttctcagcccagggcccaggaccctccctcagagaccgtccctgaggcctcatgcctgctcctcgcctacgtcttctgaggcacagagcacaggtccctttcctccgttgacctggcctgccagcctctaacagccccgggaagcaggcagagccctgctggcggatgagaaaaccgtgtctcagaggaagaggccgtggagctgacgcctggagtcaggctgtactcaggggcccatcttctggctgctggtcaagagccccgagctggccgcccagcccagcacatacctggccgtggcggaggaactggcggatgtttccggaaagtacttcgatggactcaaacagaaggccccggcccccgaggctgaggatgaggaggtggcccggaggctttgggctgaaagtgcccgcctggtgggcttagaggctccctctgtgagggagcagcccctccccagataacctctggagcagatttgaaagccaggatggcgcctccagaccgaggacagctgtccgccatgcccgcagcttcctggcactacctgagccgggagacccaggactggcggccgccatgcccgcagtaggttctagggggcggtgctggccgcagtggactggcctgcaggtgagcactgccctgggctctggctggttccgtctgctctgctgccagcaggggagaggggccatctgatgcttcccctgggaatctaaactgggaatggccgaggaggaaggggctccgtgcacttgcaggccacgtcaggagagccagcggtgcctgtcggggagggttccaaggtgctccgtgaagagcatgggcaagttgtctgacacttggtggattcttgggtccctgtgggaccttgtgcatgcatggtcctctctgagccttggtttcttcagcagtgagatgctcagaataactgctgtctcccatgatggtgtggtacagcgagctgttgtctggctatggcatggctgtgccgggggtgtttgctgagggcttcctgtgccagagcccagccagagagcaggtgcaggtgtcatcctgagttcaggctctgcacggcatggagtgggaaccccaccagctgctgctacaggacctgggattgcctgggactcccaccttcctatcaattctcatggtagtccaaactgcagactctcaaacttgctcattt

SEQ ID NO: 175487 - DNA, 1987 bp, Homo sapiens
  Payload ID: 14466
  Gene Symbol: RDH13
  Gene Name: retinol dehydrogenase 13 (all-trans/9-cis)
  Uniprot ID: Q8NBN7
  ENST ID: ENST00000396247
  CDS Start-End: 474-1256
gttgatggtgacagcagcagtgaccgtagcagcctagaggtggccgaatgcttactctaatgggctggcccatccctgagtgtctagagttcccagcccgcttaaggaaggaaggaaaacacaggcagctctaagtgtacgacgagggaggtctcatcggcggtgaggaagcccaggcgggtccccttcccagctgaaaggggttcggaatttcactctgtcgccaggctggaatgcagtagggcaatctcggctcactgcaacctccacctcccgagttcaagtgatgctcctgcttcggcctcctgagtagctgggactacagggactatgtcaccggtggggcttgccccagcaaggccaccatccctgggaagacggtcatcgtgacgggtgccaacacaggcatcgggaagcagaccgccttggaactggccaggagaggaggcaacatcatcctggcctgccgagacatggagaagtgtgaggcggcagcaaaggacatccgcggggagaccctcaatcaccatgtcaacgcccggcacctggacttggcttccctcaagtctatccgagagtttgcagcaaagatcattgaagaggaggagcgagtggacattctaatcaacaacgcgggtgtgatgcggtgcccccactggaccaccgaggacggcttcgagatgcagtttggcgttaaccacctgggtcactttctcttgacaaacttgctgctggacaagctgaaagcctcagccccttcgcggatcatcaacctctcgtccctggcccatgttgctgggcacatagactttgacgacttgaactggcagacgaggaagtataacaccaaagccgcctactgccagagcaagctcgccatcgtcctcttcaccaaggagctgagccggcggctgcaaggctctggtgtgactgtcaacgccctgcaccccggcgtggccaggacagagctgggcagacacacgggcatccatggctccaccttctccagcaccacactcgggcccatcttctggctgctggtcaagagccccgagctggccgcccagcccagcacatacctggccgtggcggaggaactggcggatgtttccggaaagtacttcgatggactcaaacagaaggccccggcccccgaggctgaggatgaggaggtggcccggaggctttgggctgaaagtgcccgcctggtgggcttagaggctccctctgtgagggagcagcccctccccagataacctctggagcagatttgaaagccaggatggcgcctccagaccgaggacagctgtccgccatgcccgcagcttcctggcactacctgagccgggagacccaggactggcggccgccatgcccgcagtaggttctagggggcggtgctggccgcagtggactggcctgcaggtgagcactgccctgggctctggctggttccgtctgctctgctgccagcaggggagaggggccatctgatgcttcccctgggaatctaaactgggaatggccgaggaggaaggggctccgtgcacttgcaggccacgtcaggagagccagcggtgcctgtcggggagggttccaaggtgctccgtgaagagcatgggcaagttgtctgacacttggtggattcttgggtccctgtgggaccttgtgcatgcatggtcctctctgagccttggtttcttcagcagtgagatgctcagaataactgctgtctcccatgatggtgtggtacagcgagctgttgtctggctatggcatggctgtgccgggggtgtttgctgagggcttcctgtgccagagcccagccagagagcaggtgcaggtgtcatcctgagttcaggctctgcacggcatggagtgggaaccccaccagctgctgctacaggacctgggattgcctgggactcccaccttcctatcaattctcatggtagtccaaactgcagactctcaaacttgctcattt

SEQ ID NO: 175488 - DNA, 1871 bp, Homo sapiens
  Payload ID: 14466
  Gene Symbol: RDH13
  Gene Name: retinol dehydrogenase 13 (all-trans/9-cis)
  Uniprot ID: Q8NBN7
  ENST ID: ENST00000415061
  CDS Start-End: 145-1140
agttccggacgcgggcccagccgcgcctgcgcctccgctcgcctgtggctgcgtcgcgcgctcttcctcggagctacccaggcggctggtgtgcagcaagctccgcgccgacccctgacgcctgacgcctgtccccggcccggcatgagccgctacctgctgccgctgtcggcgctgggcacggtagcaggcgccgccgtgctgctcaaggactatgtcaccggtggggcttgccccagcaaggccaccatccctgggaagacggtcatcgtgacgggtgccaacacaggcatcgggaagcagaccgccttggaactggccaggagaggaggcaacatcatcctggcctgccgagacatggagaagtgtgaggcggcagcaaaggacatccgcggggagaccctcaatcaccatgtcaacgcccggcacctggacttggcttccctcaagtctatccgagagtttgcagcaaagatcattgaagaggaggagcgagtggacattctaatcaacaacgcgggtgtgatgcggtgcccccactggaccaccgaggacggcttcgagatgcagtttggcgttaaccacctgggtcactttctcttgacaaacttgctgctggacaagctgaaagcctcagccccttcgcggatcatcaacctctcgtccctggcccatgttgctgggcacatagactttgacgacttgaactggcagacgaggaagtataacaccaaagccgcctactgccagagcaagctcgccatcgtcctcttcaccaaggagctgagccggcggctgcaaggctctggtgtgactgtcaacgccctgcaccccggcgtggccaggacagagctgggcagacacacgggcatccatggctccaccttctccagcaccacactcgggcccatcttctggctgctggtcaagagccccgagctggccgcccagcccagcacatacctggccgtggcggaggaactggcggatgtttccggaaagtacttcgatggactcaaacagaaggccccggcccccgaggctgaggatgaggaggtggcccggaggctttgggctgaaagtgcccgcctggtgggcttagaggctccctctgtgagggagcagcccctccccagataacctctggagcagatttgaaagccaggatggcgcctccagaccgaggacagctgtccgccatgcccgcagcttcctggcactacctgagccgggagacccaggactggcggccgccatgcccgcagtaggttctagggggcggtgctggccgcagtggactggcctgcaggtgagcactgccctgggctctggctggttccgtctgctctgctgccagcaggggagaggggccatctgatgcttcccctgggaatctaaactgggaatggccgaggaggaaggggctccgtgcacttgcaggccacgtcaggagagccagcggtgcctgtcggggagggttccaaggtgctccgtgaagagcatgggcaagttgtctgacacttggtggattcttgggtccctgtgggaccttgtgcatgcatggtcctctctgagccttggtttcttcagcagtgagatgctcagaataactgctgtctcccatgatggtgtggtacagcgagctgttgtctggctatggcatggctgtgccgggggtgtttgctgagggcttcctgtgccagagcccagccagagagcaggtgcaggtgtcatcctgagttcaggctctgcacggcatggagtgggaaccccaccagctgctgctacaggacctgggattgcctgggactcccaccttcctatcaattctcatggtagtccaaactgcagactctcaaacttgctcattt

SEQ ID NO: 175489 - DNA, 1481 bp, Homo sapiens
  Payload ID: 14466
  Gene Symbol: RDH13
  Gene Name: retinol dehydrogenase 13 (all-trans/9-cis)
  ENST ID: ENST00000592573
  CDS Start-End: 55-717
gtgcagcaagctccgcgccgacccctgacgcctgacgcctgtccccggcccggcatgagccgctacctgctgccgctgtcggcgctgggcacggtagcaggcgccgccgtgctgctcaaggactatgtcaccggtggggcttgccccagcaaggccaccatccctgggaagacggtcatcgtgacgggtgccaacacaggcatcgggaagcagaccgccttggaactggccaggagaggaggcaacatcatcctggcctgccgagacatggagaagtgtgaggcggcagcaaaggacatccgcggggagaccctcaatcaccatgtcaacgcccggcacctggacttggcttccctcaagtctatccgagagtttgcagcaaagatcattgaagaggaggagcgagtggacattctaatcaacaacgcgggtgtgatgcggtgcccccactggaccaccgaggacggcttcgagatgcagtttggcgttaaccacctgggtcactttctcttgacaaacttgctgctggacaagctgaaagcctcagccccttcgcggatcatcaacctctcgtccctggcccatgttgctgggcacatagactttgacgacttgaactggcagacgaggaagtataacaccaaagccgcctactgccagagcaagctcgccatcgtcctcttcaccaaggagctgagccggcggctgcaaggctgatgggaggccaaacggtggatccagaacagagtcagcaaaagtagagcatgtggaccacgctgcccgcttctggtgcctgaagcagacatcactaatcgatcgttcttctgaggattgtctgttcatcccaggtggtctagtctgcctggatcagatgtccttccctgctgctgttgggcaggcagctcagccttttggctccagccagctctggtgtgactgtcaacgccctgcaccccggcgtggccaggacagagctgggcagacacacgggcatccatggctccaccttctccagcaccacactcgggcccatcttctggctgctggtcaagagccccgagctggccgcccagcccagcacatacctggccgtggcggaggaactggcggatgtttccggaaagtacttcgatggactcaaacagaaggccccggcccccgaggctgaggatgaggaggtggcccggaggctttgggctgaaagtgcccgcctggtgggcttagaggctccctctgtgagggagcagcccctccccagataacctctggagcagatttgaaagccaggatggcgcctccagaccgaggacagctgtccgccatgcccgcagcttcctggcactacctgagccgggagacccaggactggcggccgccatgcccgcagtaggttctagggggcggtgctggccgcagtggactggcctgcaggtgagcactgccctgggctctggctggttccgtctgctctgctgccagca

SEQ ID NO: 175490 - DNA, 601 bp, Homo sapiens
  Payload ID: 14466
  Gene Symbol: RDH13
  Gene Name: retinol dehydrogenase 13 (all-trans/9-cis)
  ENST ID: ENST00000586945
  CDS Start-End: 475-601
gttgatggtgacagcagcagtgaccgtagcagcctagaggtggccgaatgcttactctaatgggctggcccatccctgagtgtctagagttcccagcccgcttaaggaaggaaggaaaacacaggcagctctaagtgtacgacgagggaggtctcatcggcggtgaggaagcccaggcgggtccccttcccagctgaaaggggttcggaatctcactctgtcacccaggctggagtgcagaggtgtggtctcggctcactgcaacttccgcctcccaggctcaagcgattctcctgcctcagccttccgagtagctgggactacagggactatgtcaccggtggggcttgccccagcaaggccaccatccctgggaagacggtcatcgtgacgggtgccaacacaggcatcgggaagcagaccgccttggaactggccaggagaggaggcaacatcatcctggcctgccgagacatggagaagtgtgaggcggcagcaaaggacatccgcggggagaccctcaatcaccatgtcaacgcccggcacctggacttggcttccctcaagtctatccgagagtttgcagcaaagatcattgaag

SEQ ID NO: 175491 - DNA, 731 bp, Homo sapiens
  Payload ID: 14466
  Gene Symbol: RDH13
  Gene Name: retinol dehydrogenase 13 (all-trans/9-cis)
  ENST ID: ENST00000587721
  CDS Start-End: 117-224
gcgcctccgctcgcctgtggctgcgtcgcgcgctcttcctcggagctacccaggcggctggtgtgcagcaagctccgcgccgacccctgacgcctgacgcctgtccccggcccggcatgagccgctacctgctgccgctgtcggcgctgggcacggtagcaggcgccgccgtgctgctcaagaggcaacatcatcctggcctgccgagacatggagaagtgtgaggcggcagcaaaggacatccgcggggagaccctcaatcaccatgtcaacgcccggcacctggacttggcttccctcaagtctatccgagagtttgcagcaaagatcattgaagaggaggagcgagtggacattctaatcaacaacgcgggtgtgatgcggtgcccccactggaccaccgaggacggcttcgagatgcagtttggcgttaaccacctgggtcactttctcttgacaaacttgctgctggacaagctgaaagcctcagccccttcgcggatcatcaacctctcgtccctggcccatgttgctgggcacatagactttgacgacttgaactggcagacgaggaagtataacaccaaagccgcctactgccagagcaagctcgccatcgtcctcttcaccaaggagctgagccggcggctgcaaggctctggtgtgactgtcaacgccctgcaccccggcgtggccaggacagagctgggcagacacacgggcatccatgg

SEQ ID NO: 175492 - DNA, 610 bp, Homo sapiens
  Payload ID: 14466
  Gene Symbol: RDH13
  Gene Name: retinol dehydrogenase 13 (all-trans/9-cis)
  ENST ID: ENST00000587026
  CDS Start-End: 523-610
gagacagtcacgttgatggtgacagcagcagtgaccgtagcagcctagaggtggccgaatgcttactctaatgggctggcccatccctgagtgtctagagttcccagcccgcttaaggaaggaaggaaaacacaggcagctctaagtgtacgacgagggaggtctcatcggcggtgaggaagcccaggcgggtccccttcccagctgaaaggggttcggaatctcactctgtcacccaggctggagtgcagaggtgtggtctcggctcactgcaacttccgcctcccaggctcaagcgattctcctgcctcagccttccgagtagctgggactacaggatccccgccccctccgcccgcgccccgcccctcgcagcccagttccggacgcgggcccagccgcgcctgcgcctccgctcgcctgtggctgcgtcgcgcgctcttcctcggagctacccaggcggctggtgtgcagcaagctccgcgccgacccctgacgcctgacgcctgtccccggcccggcatgagccgctacctgctgccgctgtcggcgctgggcacggtagcaggcgccgccgtgctgctcaaggactatgtcaccggtggggctt

SEQ ID NO: 175493 - DNA, 1328 bp, Homo sapiens
  Payload ID: 14466
  Gene Symbol: RDH13
  Gene Name: retinol dehydrogenase 13 (all-trans/9-cis)
  ENST ID: ENST00000591960
  CDS Start-End: 45-152
ctccgcgccgacccctgacgcctgacgcctgtccccggcccggcatgagccgctacctgctgccgctgtcggcgctgggcacggtagcaggcgccgccgtgctgctcaagaggcaacatcatcctggcctgccgagacatggagaagtgtgaggcggcagcaaaggacatccgcggggagaccctcaatcaccatgtcaacgcccggcacctggacttggcttccctcaagtctatccgagagaagcgttctgggcttttcctgttgtgcagtgtggaagtgctctatcttcattcatatcaaggaaagtcaaaggacaaactaaagccggcagcgtctttctggcttcctagtcaggctgttcggtagcggagtgtcaccctgatttccagccccgcagcacacacagtgagagcctgcctggcgtgattcagaggcaacgtatttcccaaggtggctgtgaaggaaccagggggataaacacagcccgtgaaccgcacgccagaggacaggtccggctgcctgccgcggagtcgtcacggcgtgtcgcgtctgagcgcttctccaaagcacccaagtggcacccggggtgacagttacatcatcttgagtacagttctctcaaggaaaaagcaagcccagcatcttctgccatggcaaccctggcttggagcctccataagagagaaggccctaagaataataccattttcttgctctaagttgctcttacgggaaagaagtgataatattcttcctaaacgccatcattcgtgcatccttcccacctatatgtgtcaccggatcattctccgcctgggcggggccgtcctgtgcactgcagaatgctgagcagtgtccttggcttcgaccgaccacatgccaggagcaccccaatttctgccatcgggtgattgacttcactgttgcatttgattttttatgtatcttttaaaaggacccaatagggccaggcacagtggctcacacttgtaatcccatagctgggattacaggcacctgccaccatgcccggctaatttaacgcccagctaatttttgtatttttagtagagatggggtttcaccatgttaaccaggctggtctcggactcctgacctcaggtgatccgcccgcctcggcctcccaaagtgctgggattacaggcgtgagccactgtgcctggctgatttttattcttttagttaaggctggttgatattaccttgtgtgtatataccacatgttgtttatccattgttgttgatggacatgtgggtggtttcaccttttggctattgtgaataaagctgctatgaacactgtg

SEQ ID NO: 175494 - DNA, 1871 bp, Homo sapiens; identical to SEQ ID NO: 175488
  Payload ID: 14466
  Gene Symbol: RDH13
  Gene Name: retinol dehydrogenase 13 (all-trans/9-cis)
  Uniprot ID: Q8NBN7
  ENST ID: ENST00000615256
  CDS Start-End: 145-1140

SEQ ID NO: 175495 - DNA, 1328 bp, Homo sapiens; identical to SEQ ID NO: 175493
  Payload ID: 14466
  Gene Symbol: RDH13
  Gene Name: retinol dehydrogenase 13 (all-trans/9-cis)
  ENST ID: ENST00000622337
  CDS Start-End: 45-152

SEQ ID NO: 175496 - DNA, 1931 bp, Homo sapiens
  Payload ID: 14466
  Gene Symbol: RDH13
  Gene Name: retinol dehydrogenase 13 (all-trans/9-cis)
  Uniprot ID: Q8NBN7
  ENST ID: ENST00000610356
  CDS Start-End: 399-1181
gatccccgccccctccgcccgcgccccgcccctcgcagcccagttccggacgcgggcccagccgcgcctgcgcctccgctcgcctgtggctgcgtcgcgcgctcttcctcggagctacccaggcggctggtgtgcagcaagctccgcgccgacccctgacgcctgacgcctgtccccggcccggcatgagccgctacctgctgccgctgtcggcgctgggcacggtagcaggcgccgccgtgctgctcaaggactatgtcaccggtggggcttgccccagcaaggccaccatccctgggaagacggtcatcgtgacgggtgccaacacaggcatcgggaagcagaccgccttggaactggccaggagaggaggcaacatcatcctggcctgccgagacatggagaagtgtgaggcggcagcaaaggacatccgcggggagaccctcaatcaccatgtcaacgcccggcacctggacttggcttccctcaagtctatccgagagtttgcagcaaagatcattgaagaggaggagcgagtggacattctaatcaacaacgcgggtgtgatgcggtgcccccactggaccaccgaggacggcttcgagatgcagtttggcgttaaccacctgggtcactttctcttgacaaacttgctgctggacaagctgaaagcctcagccccttcgcggatcatcaacctctcgtccctggcccatgttgctgggcacatagactttgacgacttgaactggcagacgaggaagtataacaccaaagccgcctactgccagagcaagctcgccatcgtcctcttcaccaaggagctgagccggcggctgcaaggctctggtgtgactgtcaacgccctgcaccccggcgtggccaggacagagctgggcagacacacgggcatccatggctccaccttctccagcaccacactcgggcccatcttctggctgctggtcaagagccccgagctggccgcccagcccagcacatacctggccgtggcggaggaactggcggatgtttccggaaagtacttcgatggactcaaacagaaggccccggcccccgaggctgaggatgaggaggtggcccggaggctttgggctgaaagtgcccgcctggtgggcttagaggctccctctgtgagggagcagcccctccccagataacctctggagcagatttgaaagccaggatggcgcctccagaccgaggacagctgtccgccatgcccgcagcttcctggcactacctgagccgggagacccaggactggcggccgccatgcccgcagtaggttctagggggcggtgctggccgcagtggactggcctgcaggtgagcactgccctgggctctggctggttccgtctgctctgctgccagcaggggagaggggccatctgatgcttcccctgggaatctaaactgggaatggccgaggaggaaggggctccgtgcacttgcaggccacgtcaggagagccagcggtgcctgtcggggagggttccaaggtgctccgtgaagagcatgggcaagttgtctgacacttggtggattcttgggtccctgtgggaccttgtgcatgcatggtcctctctgagccttggtttcttcagcagtgagatgctcagaataactgctgtctcccatgatggtgtggtacagcgagctgttgtctggctatggcatggctgtgccgggggtgtttgctgagggcttcctgtgccagagcccagccagagagcaggtgcaggtgtcatcctgagttcaggctctgcacggcatggagtgggaaccccaccagctgctgctacaggacctgggattgcctgggactcccaccttcctatcaattctcatggtagtccaaactgcagactctcaaacttgctcatttaaaagaaaaaaaaaagaag

SEQ ID NO: 175497 - DNA, 1931 bp, Homo sapiens; identical to SEQ ID NO: 175496
  Payload ID: 14466
  Gene Symbol: RDH13
  Gene Name: retinol dehydrogenase 13 (all-trans/9-cis)
  ENST ID: ENST00000616348
  CDS Start-End: 399-1181

SEQ ID NO: 175498 - DNA, 731 bp, Homo sapiens; identical to SEQ ID NO: 175491
  Payload ID: 14466
  Gene Symbol: RDH13
  Gene Name: retinol dehydrogenase 13 (all-trans/9-cis)
  ENST ID: ENST00000614875
  CDS Start-End: 117-224

SEQ ID NO: 175499 - DNA, 601 bp, Homo sapiens; identical to SEQ ID NO: 175490
  Payload ID: 14466
  Gene Symbol: RDH13
  Gene Name: retinol dehydrogenase 13 (all-trans/9-cis)
  ENST ID: ENST00000616988
  CDS Start-End: 475-601

SEQ ID NO: 175500 - DNA, 1931 bp, Homo sapiens; identical to SEQ ID NO: 175496
  Payload ID: 14466
  Gene Symbol: RDH13
  Gene Name: retinol dehydrogenase 13 (all-trans/9-cis)
  ENST ID: ENST00000613257
  CDS Start-End: 399-1181

SEQ ID NO: 175501 - DNA, 1931 bp, Homo sapiens; identical to SEQ ID NO: 175496
  Payload ID: 14466
  Gene Symbol: RDH13
  Gene Name: retinol dehydrogenase 13 (all-trans/9-cis)
  Uniprot ID: Q8NBN7
  ENST ID: ENST00000621849
  CDS Start-End: 399-1181

SEQ ID NO: 175502 - DNA, 1481 bp, Homo sapiens; identical to SEQ ID NO: 175489
  Payload ID: 14466
  Gene Symbol: RDH13
  Gene Name: retinol dehydrogenase 13 (all-trans/9-cis)
  ENST ID: ENST00000621540
  CDS Start-End: 55-717

SEQ ID NO: 175503 - DNA, 1931 bp, Homo sapiens; identical to SEQ ID NO: 175496
  Payload ID: 14466
  Gene Symbol: RDH13
  Gene Name: retinol dehydrogenase 13 (all-trans/9-cis)
  ENST ID: ENST00000620423
  CDS Start-End: 399-1181

SEQ ID NO: 175504 - DNA, 610 bp, Homo sapiens; identical to SEQ ID NO: 175492
  Payload ID: 14466
  Gene Symbol: RDH13
  Gene Name: retinol dehydrogenase 13 (all-trans/9-cis)
  ENST ID: ENST00000616337
  CDS Start-End: 523-610

SEQ ID NO: 175505 - DNA, 1931 bp, Homo sapiens; identical to SEQ ID NO: 175496
  Payload ID: 14466
  Gene Symbol: RDH13
  Gene Name: retinol dehydrogenase 13 (all-trans/9-cis)
  ENST ID: ENST00000615688
  CDS Start-End: 399-1181

SEQ ID NO: 175506 - DNA, 1931 bp, Homo sapiens; identical to SEQ ID NO: 175496
  Payload ID: 14466
  Gene Symbol: RDH13
  Gene Name: retinol dehydrogenase 13 (all-trans/9-cis)
  ENST ID: ENST00000613935
  CDS Start-End: 399-1181

SEQ ID NO: 175507 - DNA, 3022 bp, Homo sapiens; identical to SEQ ID NO: 175486
  Payload ID: 14466
  Gene Symbol: RDH13
  Gene Name: retinol dehydrogenase 13 (all-trans/9-cis)
  ENST ID: ENST00000622096
  CDS Start-End: 802-1464

SEQ ID NO: 175508 - DNA, 1931 bp, Homo sapiens; identical to SEQ ID NO: 175496
  Payload ID: 14466
  Gene Symbol: RDH13
  Gene Name: retinol dehydrogenase 13 (all-trans/9-cis)
  ENST ID: ENST00000622200
  CDS Start-End: 399-1181

SEQ ID NO: 175509 - DNA, 1931 bp, Homo sapiens; identical to SEQ ID NO: 175496
  Payload ID: 14466
  Gene Symbol: RDH13
  Gene Name: retinol dehydrogenase 13 (all-trans/9-cis)
  ENST ID: ENST00000622572
  CDS Start-End: 399-1181

SEQ ID NO: 175510 - DNA, 1987 bp, Homo sapiens; identical to SEQ ID NO: 175487
  Payload ID: 14466
  Gene Symbol: RDH13
  Gene Name: retinol dehydrogenase 13 (all-trans/9-cis)
  Uniprot ID: Q8NBN7
  ENST ID: ENST00000621614
  CDS Start-End: 474-1256

SEQ ID NO: 175511 - DNA, 1587 bp, Homo sapiens
  Payload ID: 14467
  Gene Symbol: RDH14
  Gene Name: retinol dehydrogenase 14 (all-trans/9-cis/11-cis)
  Uniprot ID: Q9HBH5
  ENST ID: ENST00000381249
  CDS Start-End: 109-1119
gacccgccgcgccccagcgttctccgcgtacaggtggtctcttgggttccggtaaggcggcggctgcggaactcccgtggaggggccggtgggccctcgggcctgacgatggcagtggccactgcggcggcagtactggccgctctgggcggggcgctgtggctggcggcccgccggttcgtggggcccagggtccagcggctgcgcagaggcggggaccccggcctcatgcacgggaagactgtgctgatcaccggggcgaacagcggcctgggccgcgccacggccgccgagctactgcgcctgggagcgcgggtgatcatgggctgccgggaccgcgcgcgcgccgaggaggcggcgggtcagctccgccgcgagctccgccaggccgcggagtgcggcccagagcctggcgtcagcggggtgggcgagctcatagtccgggagctggacctcgcctcgctgcgctcggtgcgcgccttctgccaggaaatgctccaggaagagcctaggctggatgtcttgatcaataacgcagggatcttccagtgcccttacatgaagactgaagatgggtttgagatgcagttcggagtgaaccatctggggcactttctactcaccaatcttctccttggactcctcaaaagttcagctcccagcaggattgtggtagtttcttccaaactttataaatacggagacatcaattttgatgacttgaacagtgaacaaagctataataaaagcttttgttatagccggagcaaactggctaacattctttttaccagggaactagcccgccgcttagaaggcacaaatgtcaccgtcaatgtgttgcatcctggtattgtacggacaaatctggggaggcacatacacattccactgttggtcaaaccactcttcaatttggtgtcatgggcttttttcaaaactccagtagaaggtgcccagacttccatttatttggcctcttcacctgaggtagaaggagtgtcaggaagatactttggggattgtaaagaggaagaactgttgcccaaagctatggatgaatctgttgcaagaaaactctgggatatcagtgaagtgatggttggcctgctaaaataggaacaaggagtaaaagagctgtttataaaactgcatatcagttatatctgtgatcaggaatggtgtggattgagaacttgttacttgaagaaaaagaattttgatattggaatagcctgctaagaggtacatgtgggtattttggagttactgaaaaattatttttgggataagagaatttcagcaaagatgttttaaatatatatagtaagtataatgaataataagtacaatgaaaaatacaattatattgtaaaattataactgggcaagcatggatgacatattaatatttgtcagaattaagtgactcaaagtgctatcgagaggtttttcaagtatctttgagtttcatggccaaagtgttaactagttttactacaatgtttggtgtttgtgtggaaattatctgcctggtgtgtgcacacaagtcttacttggaataaatttactggtacaaattcttaa

SEQ ID NO: 175512 - DNA, 2409 bp, Homo sapiens
  Payload ID: 14468
  Gene Symbol: RDH16
  Gene Name: retinol dehydrogenase 16 (all-trans)
  Uniprot ID: O75452
  ENST ID: ENST00000398138
  CDS Start-End: 858-1811
atcacccattttctgcatcagtcacactgggagctgcagaccggagctgttcctatttgcccatcctctccctgctttctttacctctgaggttggattctccctgtgggatcctgcaatccttctgccccaaaaaactattatagcaggagggaacctgttcctgctcactctttgccttctccttctcatcctagacagcctgaccgtgccctagttttcagaggagtgattgattctggggtgcggagcaggatgaggaaactcaggctcagagagggatttccacctaatgtgcctggaaaccatgggtagctacccaataaggcctttctatgttcagaaggtcatggaccaggagtgttggtatcggagctttgtagagacagttttgacccctgtacttagagcagaggggtgtgtttgccatggagagtgtgtgtgggcagctgtgtgtaagcctgtgtgagttctgtgtatgttcctgtgtgaatatatgtgtgtgctccttcatggacacagcatgcatgtagtgggcatagcaaggcagagagaaatcaggagactaggggcacattgcccagtaggaagatagtatcttcctactgggcaggacttgaggtgtgcaaaggtgtgcatgagtactgcaaaagcagttcaaagagcagagaggtggggccagaataaatatgttgcagaaaggcagtcatcagggaggaaagtgaggattccctgccaaaatgcctgagggcttccctgcctaccacagccctctgtgttcttaaatcctcctgtctgaacagaggccagactctggtttcccccacagcctgtctgtgtctgtcctctgcaaagccatgtggctctacctggcggttttcgtgggcctgtactaccttctgcactggtaccgggagaggcaggtgctgagccacctgagagataagtatgtgttcatcacgggctgtgactctggcttcgggaaactgctggccagacagctggatgcacgaggcttgcgggtgctggctgcatgtctgacggagaaaggagccgagcagctgaggggccagacttcagacaggctggagacggtgaccctggatgttaccaagacagagagcgttgctgcagccgcccagtgggtgaaggagtgcgtgagagacaaaggactctggggcctggtgaataatgctggcatctccttgcccacggctcccaatgagttgctcaccaagcaggacttcgtgaccatactggacgtgaacttgttgggggtgattgatgtgactctgagcctgctgcccttagtgaggagggccaggggccgtgtggtcaacgtctccagtgtcatgggccgggtgtcactttttggtggaggctactgcatctccaagtatggcgtggaagccttctctgactccctcaggagggaactctcctactttggggtgaaggtggctatgattgaacctggctatttcaagactgctgtgaccagtaaggagagattcttaaagagcttcctggagatttgggaccggtccagtccagaggtcaaggaggcctatggcgagaagtttgttgcagactataagaaatcagctgaacaaatggagcagaagtgcacacaggatctgtcgttggtgaccaactgcatggagcatgcgctgattgcctgccacccccgtactcgctactcagctggctgggatgccaagcttctctacctccccatgagctacatgcccaccttcctggtggatgccattatgtactgggtctctccaagcccggccaaggctctatgaagctaaggttggatgcatggttgcatggatttggggtgtgctatgaggggtggtgtatccttgggagagatataaagtggagggagggagccgtccggtcagtagggcaccaatcccacctccttcattacctcctggccatgattctcctgggagataattctgctctctggagatgttggtaggaaagtttcaagttacgcagctgagaaacagggaccaaatagtgctcctgggtgcattgtcaccgtgggtggccactcaagggtccaagcctctagggccatccttgggctaacaactggggtgggtgtgagcaggtggaaggagcctcagcccatgccattacctcctgcttccttatcaggctgtgtgttaattctgggccagtctacaccctcccacggggtggaaatggcctggaggatgtgagggcacccctcctctgaagatccctgtacacgtggtgttgggactggaaccattatgcggccccataggcctcaggagtcatcccagaagcagtggctgggaggtggtgtcctaagtaaggatctgtgcagaggacaaataaatcagtttttgatttgtcttgaaa

SEQ ID NO: 175513 - DNA, 1269 bp, Homo sapiens
  Payload ID: 14469
  Gene Symbol: RDH5
  Gene Name: retinol dehydrogenase 5 (11-cis/9-cis)
  Uniprot ID: Q92781
  ENST ID: ENST00000257895
  CDS Start-End: 153-1109
ggactttggccttagcagtagttagtgtgggaggctgggaagactgggagcagtctcttaaacaaaagcaaaagaataagcttcgggcgctgtagtacctgccagctttcgccacaggaggctgccacctgtaggtcacttgggctccagctatgtggctgcctcttctgctgggtgccttactctgggcagtgctgtggttgctcagggaccggcagagcctgcccgccagcaatgcctttgtcttcatcaccggctgtgactcaggctttgggcgccttctggcactgcagctggaccagagaggcttccgagtcctggccagctgcctgaccccctccggggccgaggacctgcagcgggtggcctcctcccgcctccacaccaccctgttggatatcactgatccccagagcgtccagcaggcagccaagtgggtggagatgcacgttaaggaagcagggctttttggtctggtgaataatgctggtgtggctggtatcatcggacccacaccatggctgacccgggacgatttccagcgggtgctgaatgtgaacacaatgggtcccatcggggtcacccttgccctgctgcctctgctgcagcaagcccggggccgggtgatcaacatcaccagcgtcctgggtcgcctggcagccaatggtgggggctactgtgtctccaaatttggcctggaggccttctctgacagcctgaggcgggatgtagctcattttgggatacgagtctccatcgtggagcctggcttcttccgaacccctgtgaccaacctggagagtctggagaaaaccctgcaggcctgctgggcacggctgcctcctgccacacaggcccactatgggggggccttcctcaccaagtacctgaaaatgcaacagcgcatcatgaacctgatctgtgacccggacctaaccaaggtgagccgatgcctggagcatgccctgactgctcgacacccccgaacccgctacagcccaggttgggatgccaagctgctctggctgcctgcctcctacctgccagccagcctggtggatgctgtgctcacctgggtccttcccaagcctgcccaagcagtctactgaatccagccttccagcaagagattgtttttcaaggacaaggactttgatttatttctgcccccaccctggtactgcctggtgcctgccacaaaataagcactaacaaaagtgtattgtttaaaaaataaaaagaaggtgggcagaaatgtgcccagtggaa

SEQ ID NO: 175514 - DNA, 1259 bp, Homo sapiens
  Payload ID: 14469
  Gene Symbol: RDH5
  Gene Name: retinol dehydrogenase 5 (11-cis/9-cis)
  Uniprot ID: Q92781
  ENST ID: ENST00000548082
  CDS Start-End: 143-1099
cagtagttagtgtgggaggctgggaagactgggagcagtctcttaaacaaaagcaaaagaataagcttcgggcgctgtagtacctgccagctttcgccacaggagcctaggctgccacctgtaggtcacttgggctccagctatgtggctgcctcttctgctgggtgccttactctgggcagtgctgtggttgctcagggaccggcagagcctgcccgccagcaatgcctttgtcttcatcaccggctgtgactcaggctttgggcgccttctggcactgcagctggaccagagaggcttccgagtcctggccagctgcctgaccccctccggggccgaggacctgcagcgggtggcctcctcccgcctccacaccaccctgttggatatcactgatccccagagcgtccagcaggcagccaagtgggtggagatgcacgttaaggaagcagggctttttggtctggtgaataatgctggtgtggctggtatcatcggacccacaccatggctgacccgggacgatttccagcgggtgctgaatgtgaacacaatgggtcccatcggggtcacccttgccctgctgcctctgctgcagcaagcccggggccgggtgatcaacatcaccagcgtcctgggtcgcctggcagccaatggtgggggctactgtgtctccaaatttggcctggaggccttctctgacagcctgaggcgggatgtagctcattttgggatacgagtctccatcgtggagcctggcttcttccgaacccctgtgaccaacctggagagtctggagaaaaccctgcaggcctgctgggcacggctgcctcctgccacacaggcccactatgggggggccttcctcaccaagtacctgaaaatgcaacagcgcatcatgaacctgatctgtgacccggacctaaccaaggtgagccgatgcctggagcatgccctgactgctcgacacccccgaacccgctacagcccaggttgggatgccaagctgctctggctgcctgcctcctacctgccagccagcctggtggatgctgtgctcacctgggtccttcccaagcctgcccaagcagtctactgaatccagccttccagcaagagattgtttttcaaggacaaggactttgatttatttctgcccccaccctggtactgcctggtgcctgccacaaaataagcactaacaaaagtgtattgtttaaaaaataaaaagaaggtgggcagaaatgtgcccagtggaa

SEQ ID NO: 175515 - DNA, 581 bp, Homo sapiens
  Payload ID: 14469
  Gene Symbol: RDH5
  Gene Name: retinol dehydrogenase 5 (11-cis/9-cis)
  ENST ID: ENST00000548123
  CDS Start-End: 1-311
ctcttctgctgggtgccttactctgggcagtgctgtggttgctcagggaccggcagagcctgcccgccagcaatgcctttgtcttcatcaccggctgtgactcaggctttgggcgccttctggcactgcagctggaccagagaggcttccgagtcctggccagctgcctgaccccctccggggccgaggacctgcagcgggtggcctcctcccgcctccacaccaccctgttggatatcactgatccccagagcgtccagcaggcagccaagtgggtggagatgcacgttaaggaagcaggcgggatgtagctcattttgggatacgagtctccatcgtggagcctggcttcttccgaacccctgtgaccaacctggagagtctggagaaaaccctgcaggcctgctgggcacggctgcctcctgccacacaggcccactatgggggggccttcctcaccaagtacctgaaaatgcaacagcgcatcatgaacctgatctgtgacccggacctaaccaaggtgagccgatgcctggagcatgccctgactgctcgacacccccgaacccgctacagcccag

SEQ ID NO: 175516 - DNA, 527 bp, Homo sapiens
  Payload ID: 14469
  Gene Symbol: RDH5
  Gene Name: retinol dehydrogenase 5 (11-cis/9-cis)
  ENST ID: ENST00000552930
  CDS Start-End: 361-527
actccggactttggccttagcagtagttagtgtgggaggctgggaagactgggagcagtctcttaaacaaaagcaaaagaataagcttcgggcgctgtagtacctgccagctttcgccacaggagggaccggcagagcctgcccgccagcaatgcctttgtcttcatcaccggctgtgactcaggctttgggcgccttctggcactgcagctggaccagagaggcttccgagtcctggccagctgcctgaccccctccggggccgaggacctgcagcgggtggcctcctcccgcctccacaccaccctgttggatatcactgatccccagagcgtccagcaggcagccaagtgggtggagatgcacgttaaggaagcagggctttttggtctggtgaataatgctggtgtggctggtatcatcggacccacaccatggctgacccgggacgatttccagcgggtgctgaatgtgaacacaatgggtcccatcggggtcacccttgccctgctgcctctgctgcagca

SEQ ID NO: 175517 - DNA, 1054 bp, Homo sapiens
  Payload ID: 14469
  Gene Symbol: RDH5
  Gene Name: retinol dehydrogenase 5 (11-cis/9-cis)
  ENST ID: ENST00000547072
  CDS Start-End: 328-993
aatacgcctggcatccaagtccacccactccggactttggccttagcagtagttagtgtgggaggctgggaagactgggagcagtctcttaaacaaaagcaaaagaataagcttcgggcgctgtagtacctgccagctttcgccacaggaggctttgggcgccttctggcactgcagctggaccagagaggcttccgagtcctggccagctgcctgaccccctccggggccgaggacctgcagcgggtggcctcctcccgcctccacaccaccctgttggatatcactgatccccagagcgtccagcaggcagccaagtgggtggagatgcacgttaaggaagcagggctttttggtctggtgaataatgctggtgtggctggtatcatcggacccacaccatggctgacccgggacgatttccagcgggtgctgaatgtgaacacaatgggtcccatcggggtcacccttgccctgctgcctctgctgcagcaagcccggggccgggtgatcaacatcaccagcgtcctgggtcgcctggcagccaatggtgggggctactgtgtctccaaatttggcctggaggccttctctgacagcctgaggcgggatgtagctcattttgggatacgagtctccatcgtggagcctggcttcttccgaacccctgtgaccaacctggagagtctggagaaaaccctgcaggcctgctgggcacggctgcctcctgccacacaggcccactatgggggggccttcctcaccaagtacctgaaaatgcaacagcgcatcatgaacctgatctgtgacccggacctaaccaaggtgagccgatgcctggagcatgccctgactgctcgacacccccgaacccgctacagcccaggttgggatgccaagctgctctggctgcctgcctcctacctgccagccagcctggtggatgctgtgctcacctgggtccttcccaagcctgcccaagcagtctactgaatccagccttccagcaagagattgtttttcaaggacaaggactttgatttatttctgcccc

SEQ ID NO: 175518 - DNA, 702 bp, Homo sapiens
  Payload ID: 14470
  Gene Symbol: RDH8
  Gene Name: retinol dehydrogenase 8 (all-trans)
  ENST ID: ENST00000587782
  CDS Start-End: 1-238
cttcgaaagcctcgctatccagctgctgcagttcaacatcttgtttctatggctgagttcccaggcactgaccctgagaccctgcactacttccgggacctctatctcccagcctccaggaagctgttttgctccgtgggacagaacccacaggacgtggttcaggccattgtcaacgtcatcagctcgactcgaccacccctgcgccgacagaccaacatccgctactcgccgctgaccacgctcaaaaccgtggattcctctggcagcctgtatgtgcgaacgacccaccgcctcctcttccgctgtccacgcctcctcaaccttggccttcaatgtctgtcctgcggctgcctcccaacgcgggtgcggccaagatgagcagaacagagcttcacgatccccatccctgaacaaccagacctcttcattccacatctaattcaaaggatgaacagactcttcatttattcattctgcaaactccccctcccctcctctgtgcctagacatggctagaatcccagaagggcctttattttcaggcatagactcctctgtggtcacagctggagcacagagagggaccctgggaacttggcctgggaagcccagagcaggaagccacagctgtctctgggaaagcaagggaggcttcctggaggaagcggcattgttatgagccttgaaggaagagacaga

SEQ ID NO: 175519 - DNA, 1715 bp, Homo sapiens
  Payload ID: 14470
  Gene Symbol: RDH8
  Gene Name: retinol dehydrogenase 8 (all-trans)
  ENST ID: ENST00000591589
  CDS Start-End: 190-1185
tgtctatagtaggtgcggagaagaaatgtttggcagatgaagaaaatgaggtgcagagaggatttaagagattctctcttactgcctgttcagggtcagtccagaattgagggtctccgggggagggcagaggctttgccctgcaggggatctgtgggagggggttaggagggagcagatgagcccaggatgaatggtcagagtcaggtgctgcccggcggaggtcacgagtccagggaggggatcaacatggccgctgcaccccggactgtgttgatctccggctgctcatcaggaattggtctggaacttgcagtgcaactggcccatgaccccaagaagcgctaccaggtcgtggccaccatgagggacctggggaagaaggagacactggaggcagctgctggggaggctctggggcagaccctcaccgtggcccagctggacgtgtgcagtgatgagtcggtggcccagtgtctcagctgtatccagggagaagtggacgtgctggtgaataatgctggaatgggcctggtggggcccctggaggggctcagccttgctgccatgcagaatgtctttgacaccaactttttcggagctgtccgtctcgtcaaagctgtgcttccaggcatgaagaggaggcggcagggccacatcgtggtgatcagcagtgtcatgggcctgcagggtgtcatcttcaacgatgtctatgcagcttccaagttcgccctggagggattcttcgaaagcctcgctatccagctgctgcagttcaacatcttcatctccctggtggagccaggccccgtggtcaccgagtttgaggggaagcttctggcgcaggtttctatggctgagttcccaggcactgaccctgagaccctgcactacttccgggacctctatctcccagcctccaggaagctgttttgctccgtgggacagaacccacaggacgtggttcaggccattgtcaacgtcatcagctcgactcgaccacccctgcgccgacagaccaacatccgctactcgccgctgaccacgctcaaaaccgtggattcctctggcagcctgtatgtgcgaacgacccaccgcctcctcttccgctgtccacgcctcctcaaccttggccttcaatgtctgtcctgcggctgcctcccaacgcgggtgcggccaagatgagcagaacagagcttcacgatccccatccctgaacaaccagacctcttcattccacatctaattcaaaggatgaacagactcttcatttattcattctgcaaactccccctcccctcctctgtgcctagacatggctagaatcccagaagggcctttattttcaggcatagactcctctgtggtcacagctggagcacagagagggaccctgggaacttggcctgggaagcccagagcaggaagccacagctgtctctgggaaagcaagggaggcttcctggaggaagcggcattgttatgagccttgaaggaagagacagactctgctacattcaacctcgtgacttcatgatcctgggcctgagaacacaggaatgattcatagcccaccccccacctccatgcatacaccagagctctgtggaccaaggggtcattcctggtcacacactccatcagcaaaatgtatttgagcacacaccagcaatgtatgtatattttttccattaaatatatatttataaccacaa

SEQ ID NO: 175520 - DNA, 3100 bp, Homo sapiens
  Payload ID: 14471
  Gene Symbol: RETSAT
  Gene Name: retinol saturase (all-trans-retinol 13,14-reductase)
  Uniprot ID: Q6NUM9
  ENST ID: ENST00000295802
  CDS Start-End: 114-1946
tcaaagctgcctccgcctcctgactggagagcgaactagcccgggcggagccacagtcctagaggctgagcgcagtcggagctgtcccatttacccgacccgacgccggcgtgatgtggcttccgctggtgctgctcctggctgtgctgctgctggccgtcctctgcaaagtttacttgggactattctctggcagctccccgaatcctttctccgaagatgtcaaacggcccccagcgcccctggtaactgacaaggaggccaggaagaaggttctcaaacaagctttttcagccaaccaagtgccggagaagctggatgtggtggtaattggcagtggctttgggggcctggctgcagctgcaattctagctaaagctggcaagcgagtcctggtgctggaacaacataccaaggcagggggctgctgtcatacctttggaaagaatggccttgaatttgacacaggaatccattacattgggcgtatggaagagggcagcattggccgttttatcttggaccagatcactgaagggcagctggactgggctcccctgtcctctccttttgacatcatggtactggaagggcccaatggccgaaaggagtaccccatgtacagtggagagaaagcctacattcagggcctcaaggagaagtttccacaggaggaagctatcattgacaagtatataaagctggttaaggtggtatccagtggagcccctcatgccatcctgttgaaattcctcccattgcccgtggttcagctcctcgacaggtgtgggctgctgactcgtttctctccattccttcaagcatccacccagagcctggctgaggtcctgcagcagctgggggcctcctctgagctccaggcagtactcagctacatcttccccacttacggtgtcacccccaaccacagtgccttttccatgcacgccctgctggtcaaccactacatgaaaggaggcttttatccccgagggggttccagtgaaattgccttccacaccatccctgtgattcagcgggctgggggcgctgtcctcacaaaggccactgtgcagagtgtgttgctggactcagctgggaaagcctgtggtgtcagtgtgaagaaggggcatgagctggtgaacatctattgccccatcgtggtctccaacgcaggactgttcaacacctatgaacacctactgccggggaacgcccgctgcctgccaggtgtgaagcagcaactggggacggtgcggcccggcttaggcatgacctctgttttcatctgcctgcgaggcaccaaggaagacctgcatctgccgtccaccaactactatgtttactatgacacggacatggaccaggcgatggagcgctacgtctccatgcccagggaagaggctgcggaacacatccctcttctcttcttcgctttcccatcagccaaagatccgacctgggaggaccgattcccaggccggtccaccatgatcatgctcatacccactgcctacgagtggtttgaggagtggcaggcggagctgaagggaaagcggggcagtgactatgagaccttcaaaaactcctttgtggaagcctctatgtcagtggtcctgaaactgttcccacagctggaggggaaggtggagagtgtgactgcaggatccccactcaccaaccagttctatctggctgctccccgaggtgcctgctacggggctgaccatgacctgggccgcctgcacccttgtgtgatggcctccttgagggcccagagccccatccccaacctctatctgacaggccaggatatcttcacctgtggactggtcggggccctgcaaggtgccctgctgtgcagcagcgccatcctgaagcggaacttgtactcagaccttaagaatcttgattctaggatccgggcacagaagaaaaagaattagttccatcagggaggagtcagaggaatttgcccaatggctggggcatctcccttgacttacccataatgtctttctgcattagttccttgcacgtataaagcactctaatttggttctgatgcctgaagagaggcctagtttaaatcacaattccgaatctggggcaatggaatcactgcttccagctggggcaggtgagatctttacgccttttataacatgccatccctactaataggatattgacttggatagcttgatgtctcatgacgagcggcgctctgcatccctcacccatgcctcctaactcagtgatcaaagcgaatattccatctgtggatagaacccctggcagtgttgtcagctcaacctggtgggttcagttctgtcctgaggcttctgctctcattcatttagtgctacgctgcacagttctacactgtcaagggaaaagggagactaatgaggcttaactcaaaacctgggcgtggttttggttgccattccataggtttggagagctctagatctcttttgtgctgggttcagtggctcttcaggggacaggaaatgcctgtgtctggccagtgtggttctggagctttggggtaacagcaggatccatcagttagtagggtgcatgtcagatgatcatatccaattcatatggaagtcccgggtctgtcttccttatcatcggggtggcagctggttctcaatgtgccagcagggactcagtacctgagcctcaatcaagccttatccaccaaatacacagggaagggtgatgcagggaagggtgacatcaggagtcagggcatggactggtaagatgaatactttgctgggctgaagcaggctgcagggcattccagccaagggcacagcaggggacagtgcagggaggtgtggggtaagggagggaagtcacatcagaaaagggaaagccacggaatgtgtgtgaagcccagaaatggcatttgcagttaattagcacatgtgagggttagacaggtaggtgaatgcaagctcaaggtttggaaaaatgacttttcagttatgtctttggtatcagacatacgaaaggtctctttgtagttcgtgttaatgtaacattaataaatttattgattccattgctttaacatttgaaa

SEQ ID NO: 175521 - DNA, 765 bp, Homo sapiens
  Payload ID: 14471
  Gene Symbol: RETSAT
  Gene Name: retinol saturase (all-trans-retinol 13,14-reductase)
  ENST ID: ENST00000409984
  CDS Start-End: 1-765
tgtggcttccgctggtgctgctcctggctgtgctgctgctggccgtcctctgcaaagtttacttgggactattctctggcagctccccgaatcctttctccgaagatgtcaaacggcccccagcgcccctggtaactgacaaggaggccaggaagaaggttctcaaacaaggaatccattacattgggcgtatggaagagggcagcattggccgttttatcttggaccagatcactgaagggcagctggactgggctcccctgtcctctccttttgacatcatggtactggaagggcccaatggccgaaaggagtaccccatgtacagtggagagaaagcctacattcagggcctcaaggagaagtttccacaggaggaagctatcattgacaagtatataaagctggttaaggtggtatccagtggagcccctcatgccatcctgttgaaattcctcccattgcccgtggttcagctcctcgacaggtgtgggctgctgactcgtttctctccattccttcaagcatccacccagagcctggctgaggtcctgcagcagctgggggcctcctctgagctccaggcagtactcagctacatcttccccacttacggtgtcacccccaaccacagtgccttttccatgcacgccctgctggtcaaccactacatgaaaggaggcttttatccccgagggggttccagtgaaattgccttccacaccatccctgtgattcagcgggctgggggcgctgtcctcacaa

SEQ ID NO: 175522 - DNA, 2335 bp, Homo sapiens
  Payload ID: 14471
  Gene Symbol: RETSAT
  Gene Name: retinol saturase (all-trans-retinol 13,14-reductase)
  ENST ID: ENST00000429806
  CDS Start-End: 1-961
tggccgaaaggagtaccccatgtacagtggagagaaagcctacattcagggcctcaaggagaagtttccacaggaggaagctatcattgacaagtatataaagctggttaaggtggtatccagtggagcccctcatgccatcctgttgaaattcctcccattgcccgtggttcagctcctcgacaggtgtgggctgctgactcgtttctctccattccttcaagcatccacccagagcctggctgaggtcctgcagcagctgggggcctcctctgagctccaggcagtactcagctacatcttccccacttacggtgtcacccccaaccacagtgccttttccatgcacgccctgctggtcaaccactacatgaaaggaggcttttatccccgagggggttccagtgaaattgccttccacaccatccctgtgattcagcgggctgggggcgctgtcctcacaaaggccactgtgcagagtgtgttgctggactcagctgggaaagcctgtggtgtcagtgtgaagaaggggcatgagctggtgaacatctattgccccatcgtggtctccaacgcaggactgttcaacacctatgaacacctactgccggggaacgcccgctgcctgccaggtgtgaagcagcaactggggacggtgcggcccggcttaggcatgacctctgttttcatctgcctgcgaggcaccaaggaagacctgcatctgccgtccaccaactactatgtttactatgacacggacatggaccaggcgatggagcgctacgtctccatgcccagggaagaggctgcggaacacatccctcttctcttcttcgctttcccatcagccaaagatccgacctgggaggaccgattcccaggtggagagtgtgactgcaggatccccactcaccaaccagttctatctggctgctccccgaggtgcctgctacggggctgaccatgacctgggccgcctgcacccttgtgtgatggcctccttgagggcccagagccccatccccaacctctatctgacaggccaggatatcttcacctgtggactggtcggggccctgcaaggtgccctgctgtgcagcagcgccatcctgaagcggaacttgtactcagaccttaagaatcttgattctaggatccgggcacagaagaaaaagaattagttccatcagggaggagtcagaggaatttgcccaatggctggggcatctcccttgacttacccataatgtctttctgcattagttccttgcacgtataaagcactctaatttggttctgatgcctgaagagaggcctagtttaaatcacaattccgaatctggggcaatggaatcactgcttccagctggggcaggtgagatctttacgccttttataacatgccatccctactaataggatattgacttggatagcttgatgtctcatgacgagcggcgctctgcatccctcacccatgcctcctaactcagtgatcaaagcgaatattccatctgtggatagaacccctggcagtgttgtcagctcaacctggtgggttcagttctgtcctgaggcttctgctctcattcatttagtgctacgctgcacagttctacactgtcaagggaaaagggagactaatgaggcttaactcaaaacctgggcgtggttttggttgccattccataggtttggagagctctagatctcttttgtgctgggttcagtggctcttcaggggacaggaaatgcctgtgtctggccagtgtggttctggagctttggggtaacagcaggatccatcagttagtagggtgcatgtcagatgatcatatccaattcatatggaagtcccgggtctgtcttccttatcatcggggtggcagctggttctcaatgtgccagcagggactcagtacctgagcctcaatcaagccttatccaccaaatacacagggaagggtgatgcagggaagggtgacatcaggagtcagggcatggactggtaagatgaatactttgctgggctgaagcaggctgcagggcattccagccaagggcacagcaggggacagtgcagggaggtgtggggtaagggagggaagtcacatcagaaaagggaaagccacggaatgtgtgtgaagcccagaaatggcatttgcagttaattagcacatgtgagggttagacaggtaggtgaatgcaagctcaaggtttggaaaaatgacttttcagttatgtctttggtatcagacatacgaaaggtctctttgtagttcgtgttaatgtaacattaataaatttattgattccattgctttaacatttgaaa

SEQ ID NO: 175523 - DNA, 1759 bp, Homo sapiens
  Payload ID: 14471
  Gene Symbol: RETSAT
  Gene Name: retinol saturase (all-trans-retinol 13,14-reductase)
  ENST ID: ENST00000449375
  CDS Start-End: 1-1199
ttccgctggtgctgctcctggctgtgctgctgctggccgtcctctgcaaagtttacttgggactattctctggcagctccccgaatcctttctccgaagatgtcaaacggcccccagcgcccctggtaactgacaaggaggccaggaagaaggttctcaaacaaggtgtcacccccaaccacagtgccttttccatgcacgccctgctggtcaaccactacatgaaaggaggcttttatccccgagggggttccagtgaaattgccttccacaccatccctgtgattcagcgggctgggggcgctgtcctcacaaaggccactgtgcagagtgtgttgctggactcagctgggaaagcctgtggtgtcagtgtgaagaaggggcatgagctggtgaacatctattgccccatcgtggtctccaacgcaggactgttcaacacctatgaacacctactgccggggaacgcccgctgcctgccaggtgtgaagcagcaactggggacggtgcggcccggcttaggcatgacctctgttttcatctgcctgcgaggcaccaaggaagacctgcatctgccgtccaccaactactatgtttactatgacacggacatggaccaggcgatggagcgctacgtctccatgcccagggaagaggctgcggaacacatccctcttctcttcttcgctttcccatcagccaaagatccgacctgggaggaccgattcccaggccggtccaccatgatcatgctcatacccactgcctacgagtggtttgaggagtggcaggcggagctgaagggaaagcggggcagtgactatgagaccttcaaaaactcctttgtggaagcctctatgtcagtggtcctgaaactgttcccacagctggaggggaaggtggagagtgtgactgcaggatccccactcaccaaccagttctatctggctgctccccgaggtgcctgctacggggctgaccatgacctgggccgcctgcacccttgtgtgatggcctccttgagggcccagagccccatccccaacctctatctgacaggccaggatatcttcacctgtggactggtcggggccctgcaaggtgccctgctgtgcagcagcgccatcctgaagcggaacttgtactcagaccttaagaatcttgattctaggatccgggcacagaagaaaaagaattagttccatcagggaggagtcagaggaatttgcccaatggctggggcatctcccttgacttacccataatgtctttctgcattagttccttgcacgtataaagcactctaatttggttctgatgcctgaagagaggcctagtttaaatcacaattccgaatctggggcaatggaatcactgcttccagctggggcaggtgagatctttacgccttttataacatgccatccctactaataggatattgacttggatagcttgatgtctcatgacgagcggcgctctgcatccctcacccatgcctcctaactcagtgatcaaagcgaatattccatctgtggatagaacccctggcagtgttgtcagctcaacctggtgggttcagttctgtcctgaggcttctgctctcattcatttagtgctacgctgcacagttctacactgtcaagggaaaagggagactaatgaggcttaactcaaaacctgggcgtggttttggttgccattccataggtttggagagctctagatctcttttgtgctgggttcagtggctcttcag

SEQ ID NO: 175524 - DNA, 1500 bp, Homo sapiens
  Payload ID: 14471
  Gene Symbol: RETSAT
  Gene Name: retinol saturase (all-trans-retinol 13,14-reductase)
  ENST ID: ENST00000438611
  CDS Start-End: 1-421
cttccacaccatccctgtgattcagcgggctgggggcgctgtcctcacaaaggccactgtgcagagtgtgttgctggactcagctgggaaagcctgtggtgtcagtgtgaagaaggggcatgagctggtgaacatctattgccccatcgtggtctccaacgcaggactgttcaacacctatgaacacctactgccggggaacgcccgctgcctgccaggtaaaaggcgggtctgcactgcccctcttgcaggttccccaatgtgtccccttctggagccaacctgctccgtgtgggtcatgcttctcctcttcttggccggccctctgattgtccttaagcaacaaggtgagaacgctacctctaacatcatcctaaccctagcatttaatgttggggaaactgaggcccatacagattaattacagtcctgaggccactcagctgaaaggggcagggctgagcagagtagctggtctgatttgaaagctccgctcctcccacccttctgggctgagggggcttccagagaagaggcctcaggaagagaagcaggagagcaggcagcccacagggagcagagccgccgagccaacgcagctaagaggtcccgccaccttcatgtaactggatctgaggaagggaggccgctgggaagaggggaccagtaacccagcaggggtgtgaagcagcaactggggacggtgcggcccggcttaggcatgacctctgttttcatctgcctgcgaggcaccaaggaagacctgcatctgccgtccaccaactactatgtttactatgacacggacatggaccaggcgatggagcgctacgtctccatgcccagggaagaggctgcggaacacatccctcttctcttcttcgctttcccatcagccaaagatccgacctgggaggaccgattcccaggtggagagtgtgactgcaggatccccactcaccaaccagttctatctggctgctccccgaggtgcctgctacggggctgaccatgacctgggccgcctgcacccttgtgtgatggcctccttgagggcccagagccccatccccaacctctatctgacaggccaggatatcttcacctgtggactggtcggggccctgcaaggtgccctgctgtgcagcagcgccatcctgaagcggaacttgtactcagaccttaagaatcttgattctaggatccgggcacagaagaaaaagaattagttccatcagggaggagtcagaggaatttgcccaatggctggggcatctcccttgacttacccataatgtctttctgcattagttccttgcacgtataaagcactctaatttggttctgatgcctgaagagaggcctagtttaaatcacaattccgaatctggggcaatggaatcactgcttccagctggggcaggtgagatctttacgccttttataacatgccatccctactaataggatattgacttggatagcttgatgtctcatgac

SEQ ID NO: 175525 - DNA, 2810 bp, Homo sapiens
  Payload ID: 14472
  Gene Symbol: RS1
  Gene Name: retinoschisin 1
  Uniprot ID: O15537
  ENST ID: ENST00000379984
  CDS Start-End: 42-716
cagttcagtaaggtagagctttggccgaggacgaggggaagatgtcacgcaagatagaaggctttttgttattacttctctttggctatgaagccacattgggattatcgtctaccgaggatgaaggcgaggacccctggtaccaaaaagcatgcaagtgcgattgccaaggaggacccaatgctctgtggtctgcaggtgccacctccttggactgtataccagaatgcccatatcacaagcctctgggtttcgagtcaggggaggtcacaccggaccagatcacctgctctaacccggagcagtatgtgggctggtattcttcgtggactgcaaacaaggcccggctcaacagtcaaggctttgggtgtgcctggctctccaagttccaggacagtagccagtggttacagatagatctgaaggagatcaaagtgatttcagggatcctcacccaggggcgctgtgacatcgatgagtggatgaccaagtacagcgtgcagtacaggaccgatgagcgcctgaactggatttactacaaggaccagactggaaacaaccgggtcttctatggcaactcggaccgcacctccacggttcagaacctgctgcggccccccatcatctcccgcttcatccgcctcatcccgctgggctggcacgtccgcattgccatccggatggagctgctggagtgcgtcagcaagtgtgcctgatgcctgcctcagctcggcgcctgccagggggtgactggcacagagcgggccgtaggggaccccctcacacaccaccgagatggacagggctatatttcgcaaagcaattgtaactgcagtgctgggtagataatttttttttttttaagatatagctttctgatttcaatgaaataaaaatgaacttattccccactcagggccagagaaagtcagaacaaagaaaatgtccccgaaacgaattttcttacaaaagcctaagtagcaggggtaattttctgctcattttttgtctcagtgatactgtgaaaggtgcagtctcaggggaacacaaagcagccctgataatttgaaaattcatttgctttaccacattcaagacagaaacatacagtttcctaaagcctggctttgaatgcagaagggagcagctcctcctagttaagtttccactaaatcatcgccaaagaggacttcagagccctggggaggcagctgagggtctcaagggtgactgggtggcagggatgagtgcggtgggtgagaatcccggtgccctgagaggctatacgtgacaaatgaccaaaagcccaaggtaggggagtttcctctgctcacagttcttaccttcaaggcggatctgggcttccaccctcatgaacacagggattggggagggaccagagcgcccaatacacacagctccattatgcaatccattccagcaaattccccgtgtctgtggtcaccatttaggtgatcatacaggacaggctgcacatctcagtatatgtagggaccccaaatgaccacaacacagtacaattgccctttacctagggctaccatttcctagcaaaccaaacatagttcgagaacagctggcccaggagctaccactggctactcagaggaggctcattagctggctacatgcttcgcaggaagtgggaaggactcacatcataaaaaggaccatgtagctttttccctgaaagcttctcaccctccaccctctgccttgcaatacgcaaactgcgcctgctcctgaaaagctctctgggaaggaatgggcctggctttccgttcctggaggcggcgccttagattgggaggcctcattggccacttagagcgcagcctgagtttccaggccccttcctgggagaggctgttaacacgggggaggggcaggagagggatatggagagcaggtggtggaatcagaggacgaggctgctctaaagactgttctggccccagacacagggtagtctttgctagcagctcatttccgagttacttttcattttcaaatgccaaggcaagtgactagactcgcgctaatacagtgctggacaacacattcaccttttctgtgaacaggcagccttctaaaagccccaaacatccttcttgatgctttgggggctcaattattttatatccaacccagcatctttctagtccctatgctgtatgcttgaacttcggaaaatgcttttccccgcccaatcttctctcaaatataaacacatcacacagggtgttgggggtggggggggggggtggggggacttatccctggccttaggacacaggacaaatctattttggatagaaatgcctgaacagagacccttatttggaaaggtgaattaactttggtcacgacatggactgtcagacaaaatggcagtatcctaagagttaaggcacatcaaacacaggagtcgagagagtgcagttcagggaaaaaggagaggaggaaacagtgaggcagggagaaaggctttccaaataagagttcatgttggaaacttttgtcacggctttattgagattaagttcacatacaatttgtatccatttaaagtgtacaatttgatgacttttggtatattcagagttgtgcaaccattatcactagatcaattttagaaagtttatcaccccaaagagaaatcctgcacccatcagccaacactccccaacccatcggccaccccaagccctctgcaaccacgaatcgactgtctctgtagattggccttctggacgttctacataaatgaaatcatatagtatgtggta

SEQ ID NO: 175526 - DNA, 5426 bp, Homo sapiens
  Payload ID: 14473
  Gene Symbol: RGAG1
  Gene Name: retrotransposon gag domain containing 1
  Uniprot ID: Q8NET4
  ENST ID: ENST00000465301
  CDS Start-End: 247-4413
ggcaaagggcctcagccccgccctactgactgtgaattctacaacatatggagcgcctaccttgtgcaaggcattgtggcccttcagagacttgaagacagtgtgtgactctcctgtgagttaagagcactggctgagtcagacagacccgagtgacaagcccagcttcgctccctctcagcggtgagagccaagattttcttgcctcctgggctccctccacactatcctgtggctgtggcagatatgtcaatacccttacattcactgcgattcaacaatacaatgagggaggaaaatgttgagccccaaaacaagcagatggccttctgtagaccaatgacagagaccagagcagacgtacagattctgcattctcatgtacagttgcctatagtctcaacttcagcctcagaccctggagggacatccacacagttgatgacatctccagtctttgacaccatgtctgcacctctaatgggagtaccaaactctggagcattgtccccacccctaatgccagcctcagactctggggcactttccccattgctaatgccagcctcagactctggggcactgtccccattgctaatgccagccttagattctggaacattgtccccattgctgtccacttcagagtatggggtaatgtccccagggatgatgacaattcctgattttggaacgatgtccgcaacgctaatggtagcaccagattctgcagagatatcaccattggcaatgccagctccatcctctggagtggtgtgtacacctataatgagcacttcatcctctgaggcaatgtccacaccattaatgctagccccagattctggagagttatccccaattctaatgcaagatatgaatcctggagtgatgtctacacagccagtgccagctcccagctctgaggcaatgtccccattgcaaattacagatgaagacaccgaagcaatgtccaaagtgctaatgactgctctagcctctggagagatatcttcgctgctaatgtcaggcacggactctgaagcaatatcctcactgataatgtcagctgtagcttctggaggtacatcaccccagccaacaagcacccaaaactctgggggaatacctaccccgctcatgtcagatctagactctggaataatgtcatcgcttttaatgtcatctccaggctctgaagtaatgtccacaccgctactgtcagtcccagatgctggagaaatgtccacattaccaaagccagctccagatgctgaagcaatgtccccagcactaatgacggccctaccctctggagtgatgcccacccaaacgatgccagccccaggctctggggcgatgtccccatggtcaacacaaaatgtagactctgaaatgatgtctaatccgccagtgagagcaacagcctctggggtgatgtctgcaccaccagtaagagctttagattctggagcaatgtccacaccgctaatgggagccccagcctctggaaatatgtctacattgcaaaagacagttccagcctctggagccatgaccacctcactgatgacagtcccaagctctggagtgatgtccacagagcaaatgtcagccacagcctctagagtaatgtccgcacagttaacaatggccaaaacttctggagcaatgcccacaggctctatgaaagccgtggcaaaacaatacaagagagccacagcctctggaaagatgtccacgccactgaggagagctccaacttctggagcaatgtccacccaaccagttacggcaacagcctctgaaacaatgtccatgccacaattgacagtcccagcctctggatcaatgtccatgctgcaaatgagagcccctgtctctgaagcaatgtccatgccacaaatgagaaccatggcctcaggattgacatctgcagcacagatgaaagccatgacttctggagcaatgtccaccccactaatgacagcccaaacctctggatcaacatccacgctgttaatgagagacacagcctcaggagtgatgtcctgtccacaaatgagatctctggcctctggagcattgtccaagccactaatgacacccaaagcctcaggaacgatgttcacggagaaaatgacaaccacagcttctgaagcaatgcccacactgctaatgagagacacagtttctggagctctgtccatgccgcaaatgacagacacagcctctggagggttgtctgcatcgctaatgagagacacagcttctggagcaatgtccacatcacaaatgacagccacagtctctggagggatgtccatgccactaatgagagctcaagacccaggagtaatgcctgcctcactaatgagagccaaagtgtctggaaagatgctcagtcagccaatgagcacccaagatcctggagggatgtccatgtcgcccatgaagtccatgaccgctggagggatgcagatgaattccccaacctctgatgtgatgtccacaccaacagtgagagcctggacctctgaaacaatgtccacaccactaatgagaacctcagaccctggagagaggccctcactgctcacaagagcttcatcctctggagagatgtccctaccactaatgagagctccagcttctggagagatagccacgcctctgagatccccagcttatggagccatgtctgctccacaaatgacagccacagcctctggaatgatgtcatccatgccacaagtgaaggctcccatctctggagcaatgtccatgccactaacaagatccacagcctctggagggatgtccatgccactgatgagagccccagactctagagtgacatccacatcacaaatgatgcccacagcttctggagacatgtgcacactaccagtgcgagccccagcctctggaggggtgtcctcaccactagtaagagctccagcctctggaactatgtccacaccactaaggagaccctcagcctgtgagactgtgtccacagagttaatgagagcttcagcctctggacatatgtccactgcacaaacaacagccatggtctctggagggatgtccaagccattaatgagagccccggcctctggaacaatgcccatgcctttaatgtcagccatggcttctggagagatgtctatgccgctaatggaaaccatggcctctggagcaacgtccacattgcaaaccagtgttgcgaactctagatctatgtccttgtcacaaacaacatataccgtgtctggaaggatggccacagcgccaattagagcctctgcttctggagcaaggtccacatcatttatgagagcctcagtttctggatcgatgcccatgccactaccaagagccacagcctctggatgtggcatgggtatgtccatgccacaaatgacagccacagactctagagggatgtccacaccactaatgagggcctcaggccctggaacaatgtccacaccacagacagcctttggagtgatgtccactccggaaatcaaagccacagactctggagaggcatccacctctcacattaacatcacagcctctggatcaaagcccacatcgcacatgactgccacaactcctgaaactgcgaaaccaccaccaaaggaagtgccatccttcggaatgttgaccccagcactctgctacctcttagaagagcaggaagcagcccggggctcatgctctgtggaggaagagatggagattgatgaggagaagcaaatgaaggggtttttggacgattcagagagaatggcatttctggtatctcttcatctgggagcagcagagaggtggttcatcttgcaaatggaggtaggagaacctctctcacatgaaaataaatctttcctgagaagatcccagggcatatatgactccctatctgagatagacatcctcagtgctgttctttgccatcccaaacagggccaaaagtcagtcaggcagtatgccactgacttcctgctgctggcccgacatttgtcttggtctgatgccattctacggaccaggtttctggaaggactctcagaagctgttaccaccaaaatgggtcggatcttcctgaaggtggctggcagcctaaaggagctgatagacaggtctctgtacaccgagtgccagctggctgaagagaaggattccccaggcaactcaagccaggttctgccaacagcctgtaagcggaataatgaggaggccatggggaatgaactgagctctcagcagcagactgaggagcaccagcatgtttccaaacgctgttactacctgaaagagcatggagacccccaagaaggtcttcatgatcaccttggacagagcacaggccatcatcagaaggcccataccaacaagtaaaactccatggaatcttctcctgtgatatctgactcgaccgctaactggaggactggttcctggacccattccattaaactacattataaaccttgttgccttcacccttcagcctcccgctccaggcacatcccaccttacctctcacttggctgatttgaccttctctttcacccacatgcctaagacctgccctgacaatcagagtagggactacaagagtgtatggtgtatgaggttctgaactcccatcaccaccgaggccagtcctagttcttggtccagggagaagtctaggcaggataaatcatatcttacctcaaaaaacccttagcgtatcttgccatgtgtcagcaggcaaacttgaggaagccctggttctatttcacctggcaggggagcctataaggagagcgatgcccactcctataccacccttgtaacccagtagacttgccccatatgccccaactcatagcacctaaaatgggtctccagggtccttgccctgtttatagtatccatcctgaaccattcgttttgacccataataatagtgatagtataatggctaccagttattgataatgtatcatgtgacaggcattgggctaaactcttgacaagcaccatctcactacattcttacagtaacacaacttgttcttgtgttgtcagcttctgacctcttgatctgttgtttatggcctttgtcttgtccctcagtgggggttctctagctctgacctctgggtgaccccctcagttgttgattgctctcactccccttggctgttgtgcttcatggccagcactcttgatgagggtcttggtctataaacaggcatagatagctagaacataatgtgagcagtgtttgccttcaggtggtggggttatgggtagtttttattttcttccttctacttctctatacatttcagattctctacagtaagcatgtgttacatttgtaattataaaagtaagtaaacttcatttatgaaaaaaga

SEQ ID NO: 175527 - DNA, 532 bp, Homo sapiens
  Payload ID: 14473
  Gene Symbol: RGAG1
  Gene Name: retrotransposon gag domain containing 1
  ENST ID: ENST00000520821
  CDS Start-End: 269-532
ggaaaggagacgtgcccactggagagcaagtcagaactttcgtgagccctgctccaggtcccaggagaaagtgccagccatgaggactggagtattgcctgcccttcagagacttgaagacagtgtgtgactctcctgtgagttaagagcactggctgagtcagacagacccgagtgacaagcccagcttcgctccctctcagcggtgagagccaagattttcttgcctcctgggctccctccacactatcctgtggctgtggcagatatgtcaatacccttacattcactgcgattcaacaatacaatgagggaggaaaatgttgagccccaaaacaagcagatggccttctgtagaccaatgacagagaccagagcagacgtacagattctgcattctcatgtacagttgcctatagtctcaacttcagcctcagaccctggagggacatccacacagttgatgacatctccagtctttgacaccatgtctgcacctctaatgggagtaccaaactctggagcattgtcc

SEQ ID NO: 175528 - DNA, 5225 bp, Homo sapiens
  Payload ID: 14473
  Gene Symbol: RGAG1
  Gene Name: retrotransposon gag domain containing 1
  Uniprot ID: Q8NET4
  ENST ID: ENST00000540313
  CDS Start-End: 54-4220
agattttcttgcctcctgggctccctccacactatcctgtggctgtggcagatatgtcaatacccttacattcactgcgattcaacaatacaatgagggaggaaaatgttgagccccaaaacaagcagatggccttctgtagaccaatgacagagaccagagcagacgtacagattctgcattctcatgtacagttgcctatagtctcaacttcagcctcagaccctggagggacatccacacagttgatgacatctccagtctttgacaccatgtctgcacctctaatgggagtaccaaactctggagcattgtccccacccctaatgccagcctcagactctggggcactttccccattgctaatgccagcctcagactctggggcactgtccccattgctaatgccagccttagattctggaacattgtccccattgctgtccacttcagagtatggggtaatgtccccagggatgatgacaattcctgattttggaacgatgtccgcaacgctaatggtagcaccagattctgcagagatatcaccattggcaatgccagctccatcctctggagtggtgtgtacacctataatgagcacttcatcctctgaggcaatgtccacaccattaatgctagccccagattctggagagttatccccaattctaatgcaagatatgaatcctggagtgatgtctacacagccagtgccagctcccagctctgaggcaatgtccccattgcaaattacagatgaagacaccgaagcaatgtccaaagtgctaatgactgctctagcctctggagagatatcttcgctgctaatgtcaggcacggactctgaagcaatatcctcactgataatgtcagctgtagcttctggaggtacatcaccccagccaacaagcacccaaaactctgggggaatacctaccccgctcatgtcagatctagactctggaataatgtcatcgcttttaatgtcatctccaggctctgaagtaatgtccacaccgctactgtcagtcccagatgctggagaaatgtccacattaccaaagccagctccagatgctgaagcaatgtccccagcactaatgacggccctaccctctggagtgatgcccacccaaacgatgccagccccaggctctggggcgatgtccccatggtcaacacaaaatgtagactctgaaatgatgtctaatccgccagtgagagcaacagcctctggggtgatgtctgcaccaccagtaagagctttagattctggagcaatgtccacaccgctaatgggagccccagcctctggaaatatgtctacattgcaaaagacagttccagcctctggagccatgaccacctcactgatgacagtcccaagctctggagtgatgtccacagagcaaatgtcagccacagcctctagagtaatgtccgcacagttaacaatggccaaaacttctggagcaatgcccacaggctctatgaaagccgtggcaaaacaatacaagagagccacagcctctggaaagatgtccacgccactgaggagagctccaacttctggagcaatgtccacccaaccagttacggcaacagcctctgaaacaatgtccatgccacaattgacagtcccagcctctggatcaatgtccatgctgcaaatgagagcccctgtctctgaagcaatgtccatgccacaaatgagaaccatggcctcaggattgacatctgcagcacagatgaaagccatgacttctggagcaatgtccaccccactaatgacagcccaaacctctggatcaacatccacgctgttaatgagagacacagcctcaggagtgatgtcctgtccacaaatgagatctctggcctctggagcattgtccaagccactaatgacacccaaagcctcaggaacgatgttcacggagaaaatgacaaccacagcttctgaagcaatgcccacactgctaatgagagacacagtttctggagctctgtccatgccgcaaatgacagacacagcctctggagggttgtctgcatcgctaatgagagacacagcttctggagcaatgtccacatcacaaatgacagccacagtctctggagggatgtccatgccactaatgagagctcaagacccaggagtaatgcctgcctcactaatgagagccaaagtgtctggaaagatgctcagtcagccaatgagcacccaagatcctggagggatgtccatgtcgcccatgaagtccatgaccgctggagggatgcagatgaattccccaacctctgatgtgatgtccacaccaacagtgagagcctggacctctgaaacaatgtccacaccactaatgagaacctcagaccctggagagaggccctcactgctcacaagagcttcatcctctggagagatgtccctaccactaatgagagctccagcttctggagagatagccacgcctctgagatccccagcttatggagccatgtctgctccacaaatgacagccacagcctctggaatgatgtcatccatgccacaagtgaaggctcccatctctggagcaatgtccatgccactaacaagatccacagcctctggagggatgtccatgccactgatgagagccccagactctagagtgacatccacatcacaaatgatgcccacagcttctggagacatgtgcacactaccagtgcgagccccagcctctggaggggtgtcctcaccactagtaagagctccagcctctggaactatgtccacaccactaaggagaccctcagcctgtgagactgtgtccacagagttaatgagagcttcagcctctggacatatgtccactgcacaaacaacagccatggtctctggagggatgtccaagccattaatgagagccccggcctctggaacaatgcccatgcctttaatgtcagccatggcttctggagagatgtctatgccgctaatggaaaccatggcctctggagcaacgtccacattgcaaaccagtgttgcgaactctagatctatgtccttgtcacaaacaacatataccgtgtctggaaggatggccacagcgccaattagagcctctgcttctggagcaaggtccacatcatttatgagagcctcagtttctggatcgatgcccatgccactaccaagagccacagcctctggatgtggcatgggtatgtccatgccacaaatgacagccacagactctagagggatgtccacaccactaatgagggcctcaggccctggaacaatgtccacaccacagacagcctttggagtgatgtccactccggaaatcaaagccacagactctggagaggcatccacctctcacattaacatcacagcctctggatcaaagcccacatcgcacatgactgccacaactcctgaaactgcgaaaccaccaccaaaggaagtgccatccttcggaatgttgaccccagcactctgctacctcttagaagagcaggaagcagcccggggctcatgctctgtggaggaagagatggagattgatgaggagaagcaaatgaaggggtttttggacgattcagagagaatggcatttctggtatctcttcatctgggagcagcagagaggtggttcatcttgcaaatggaggtaggagaacctctctcacatgaaaataaatctttcctgagaagatcccagggcatatatgactccctatctgagatagacatcctcagtgctgttctttgccatcccaaacagggccaaaagtcagtcaggcagtatgccactgacttcctgctgctggcccgacatttgtcttggtctgatgccattctacggaccaggtttctggaaggactctcagaagctgttaccaccaaaatgggtcggatcttcctgaaggtggctggcagcctaaaggagctgatagacaggtctctgtacaccgagtgccagctggctgaagagaaggattccccaggcaactcaagccaggttctgccaacagcctgtaagcggaataatgaggaggccatggggaatgaactgagctctcagcagcagactgaggagcaccagcatgtttccaaacgctgttactacctgaaagagcatggagacccccaagaaggtcttcatgatcaccttggacagagcacaggccatcatcagaaggcccataccaacaagtaaaactccatggaatcttctcctgtgatatctgactcgaccgctaactggaggactggttcctggacccattccattaaactacattataaaccttgttgccttcacccttcagcctcccgctccaggcacatcccaccttacctctcacttggctgatttgaccttctctttcacccacatgcctaagacctgccctgacaatcagagtagggactacaagagtgtatggtgtatgaggttctgaactcccatcaccaccgaggccagtcctagttcttggtccagggagaagtctaggcaggataaatcatatcttacctcaaaaaacccttagcgtatcttgccatgtgtcagcaggcaaacttgaggaagccctggttctatttcacctggcaggggagcctataaggagagcgatgcccactcctataccacccttgtaacccagtagacttgccccatatgccccaactcatagcacctaaaatgggtctccagggtccttgccctgtttatagtatccatcctgaaccattcgttttgacccataataatagtgatagtataatggctaccagttattgataatgtatcatgtgacaggcattgggctaaactcttgacaagcaccatctcactacattcttacagtaacacaacttgttcttgtgttgtcagcttctgacctcttgatctgttgtttatggcctttgtcttgtccctcagtgggggttctctagctctgacctctgggtgaccccctcagttgttgattgctctcactccccttggctgttgtgcttcatggccagcactcttgatgagggtcttggtctataaacaggcatagatagctagaacataatgtgagcagtgtttgccttcaggtggtggggttatgggtagtttttattttcttccttctacttctctatacatttcagattctctacagtaagcatgtgttacatttgtaattataaaagtaagtaaacttcatttatg

SEQ ID NO: 175529 - DNA, 4339 bp, Homo sapiens
  Payload ID: 14474
  Gene Symbol: RGAG4
  Gene Name: retrotransposon gag domain containing 4
  Uniprot ID: Q5HYW3
  ENST ID: ENST00000479991
  CDS Start-End: 362-2071
ccgcagtccgctccctcccgctccgctcgcccctgcccgcccgcccgcccggtcgcgcggtcgccgccgccaccgtgtcgcccgcatcctccgcctggcgcctccgggccccgtgcctccgcccgccctctccggccccggcgacgaggtaacgcgccctgggccgagccgccgggccctccgcccagagcgccgccctccgagctcgccccggtgggtgtggcccggcctggcccgtgccccgctgccgcacttcggtccctcccgagccccgccgccgcatttcggcctcctccggccgcccgtagttccagttcccctttccccaccacggagccccagggcccctgggcttgtcgagatgtctgaggcgtcaggaaatctcaacagcctccgcatggcgaatgtggccctgcgcgaagaattaaatgcccttcgcggggagaatgccaatttgggcctccagctcgggagagccctggccgaggttaattccttgcggggcaatgtctccagctacatccgctggccagtacccatagtgcccgtccttgcggaggagaacttggagttcgcgctcagtgagatcgaagtcattcccgggggagaactgcccttcttgtgccggcctcccccacgcgcggagcccgactgtatctcggatgatcttttgattaacgtgatccaggatcgcagcacccccgacgggcccgctgacccccctctgctgcccatcccgcccccgccggcgctgcctccgcccgcgtcaaaggaaccgcccccgcaaccccctctggcaccgctggagcggcctgagatagagcccttttcaggagacccagtctacctggctgaattcctgatgcagctagagaccttcatagccgaccatgaggttcatttccccgggggcgccgagcgggtggcctttctgatctcctttttcactggcgaagccaaggactgggccatctcggtcacccaggaaggaagccccttgcatgccaacttcccgcgcttcctggatgaaatccgtaaggaattctgtggccccatccccccacgtgtggctaaaaaggccattcgcaagctcaagcagggccactgtaccctcggcagctatgcagatgcttttcagttcctggcccaattcttgtcttgggatgactgccgcctccaaaaccaattcctcaaaggcctgtcggaattcttccgcaaagagctcttatggtcaacagaaatggccgacctggatgagctgattctcgaatgtgtggagatagaaagaaaagtgcgcgttcccaagcctatcccgctccctggagttcgaaatatcatcttcccttttgctccgagtcccaatgaggaagaaagtgaagatgaagagtactacagtgaagatgaagaccaagaggcacgcaggcacaggcttcactccaaggaccagaggaagcgcatgagggcttttcagcaagagatgaaggagaaggaggaggaggagatgaagaaggaggaagaaatgaagaagaaggaagagaaggaggaggaggaggaagaggaaatgaaacagaaagaggaggaggaggagataaggaacaagaatgaggaggaaggagagagtaaggatgaagaagatgaagatgaggatgggggccagaaaccagaaggagagccacagcaggatccagggactgaggagacctatggtgaggtggaggaggagccactggatgaggcccaagatgatgacctagatgagctgatggagatggagccgacctttgttcacgcgtcatcccagacttctggccccacaagtggttaccacgccgaaaacttcctgggtgcatcacctcccataatacagcctagcagacggaggaaccagaatcgagtcccacttctggaaggccttccaggcaccaattcaccattctacagctccccccaactgattcgccgcacaggtcgtttaggacaacgccaagttcgaagacgcccccctgtgcttttccgcctcactccgagacaggggggccaccgagctgctcgtggccgaattcgagtttgagtgctggggccagatggccacccagaacacacccttcttttgcatcccccgcccctgctattgctgccatacctgccccatttgctgaccaggacttcagggagtttcagacctgcagaacctgaagaagacctgcagaattccagaccatcttgcaaccgtgaccagagagcgacgtgtgcccaaccagggccacctgggaaaggagggatcagcaatagctgccctcttggcatgtactctgctcagtccggccacgagctggagagcaagtttctgggcctgttcccataaatgaactggtcaccctcttgtatttcccctctggttgttcctaaccctcacctctcctgcgtttcttcaccctatgttctacagttttattctctgactgacccaccaggacttcacccaatgcctcactgatctgccccaatgagcaagaggacaggctaccctgaactcctaaagccactgaggccagttgctagatataatcgatggtgagcaggatggtatccagaaatgtccctagaatcctacactcatttcatgccacacctccagcagagggcctggaagaggacccgacatctagcccagtgagagtgtgcaaagccacatgtcaaatggacaacttgacggagatttgcccttgactgactgtgcaggctggttccacttacagcacttgagtttacctttgcacagattcctgtatcagggctcttggactgacttgccacacatctggagccctttcctctcaccacattgccctcctgggcacccccggtggacagcgcccaacattgcaggctccacaactttccttgatgttgcctaaagggtagccagttagggttccggagaggagaaggaggaagaagaggaggaggagaaagaagcagcaacgatcattctgccattgtaaagagtgactctttccttagggatggtggtcttctccccttgccaggccttggactgcagcccccagtcaaaggtctttgcaggacactttctatccttggagttgcagaggaggcctgattggccattccttctgggacagacagagagagggcccatggcctgctctgagctcccttcaatttcaaggaacccttagttctgagaggagagaggaaggctgcacctaccgtggcctcacagctgggacccctcatgggggccaacccctggcctgctgctgtgcttcagtgacacagtaaagcttaagagggtggctgcctcctaggaactcctgggacttctaggtacaaactcaggtgcccttataaagagacccactgcttgccttgagtccagaaagcactgcttctgcagtgaaaaacacacacttactatgtcagttttggccataaaatgccagccaaatccactgctggcctgaactgcccctggacactggactttctgcacagtgactggcagcagagcaagtgcagccagggtttgtggccaaagggaagaaagcatagtaaattcaacctctgttcctcatgggagtctgaccgataatctcaggcggaccttaggatcttgggcctggaggcaagagaaaaaagctggaggaagaggagtcgcagagaaacccagtcctctgactggtttctggtgaggtctctattcatcagtgggagctgattttatctgatttcctcaagagtgcattccagaaggggacctgctattcttcgaggggacctgctattcttcgaggcagtggaccctgtttgctgatggtcaacactctggccctgctgccccatgtccctgtggagaagtgtgaaggacgggtgccttaaacccacacttccagggacccttcagcacaggtcctgcctgttcccatggtgcttctcaccctgaaccctcagagctacagccagggatagagcagatgagcagtgagctggtttccaccctctggggcaggaggggcttgggcttccctttgaccctcttccttcctttcccagatcttcaatatttgttgtgatgtaacagccataagagctgtaagaggaactgtgggctttgggagctttcttgggttgaaagaggggtggggggaggggatgcatgcaggggtatgaaggcagcccaaggtctcccagaggctcgggaggaaacccttttggaatacatgtgttattgttgcattactgtgttgtgaagataagaagctgctctgtatgctaaagctttctctcctcaataaaaatataaagggtgtgtaaa

SEQ ID NO: 175530 - DNA, 4105 bp, Homo sapiens
  Payload ID: 14474
  Gene Symbol: RGAG4
  Gene Name: retrotransposon gag domain containing 4
  Uniprot ID: Q5HYW3
  ENST ID: ENST00000609883
  CDS Start-End: 289-1998
cgtgtcgcccgcatcctccgcctggcgcctccgggccccgtgcctccgcccgccctctccggccccggcgacgaggtaacgcgccctgggccgagccgccgggccctccgcccagagcgccgccctccgagctcgccccggtgggtgtggcccggcctggcccgtgccccgctgccgcacttcggtccctcccgagccccgccgccgcatttcggcctcctccggccgcccgtagttccagttcccctttccccaccacggagccccagggcccctgggcttgtcgagatgtctgaggcgtcaggaaatctcaacagcctccgcatggcgaatgtggccctgcgcgaagaattaaatgcccttcgcggggagaatgccaatttgggcctccagctcgggagagccctggccgaggttaattccttgcggggcaatgtctccagctacatccgctggccagtacccatagtgcccgtccttgcggaggagaacttggagttcgcgctcagtgagatcgaagtcattcccgggggagaactgcccttcttgtgccggcctcccccacgcgcggagcccgactgtatctcggatgatcttttgattaacgtgatccaggatcgcagcacccccgacgggcccgctgacccccctctgctgcccatcccgcccccgccggcgctgcctccgcccgcgtcaaaggaaccgcccccgcaaccccctctggcaccgctggagcggcctgagatagagcccttttcaggagacccagtctacctggctgaattcctgatgcagctagagaccttcatagccgaccatgaggttcatttccccgggggcgccgagcgggtggcctttctgatctcctttttcactggcgaagccaaggactgggccatctcggtcacccaggaaggaagccccttgcatgccaacttcccgcgcttcctggatgaaatccgtaaggaattctgtggccccatccccccacgtgtggctaaaaaggccattcgcaagctcaagcagggccactgtaccctcggcagctatgcagatgcttttcagttcctggcccaattcttgtcttgggatgactgccgcctccaaaaccaattcctcaaaggcctgtcggaattcttccgcaaagagctcttatggtcaacagaaatggccgacctggatgagctgattctcgaatgtgtggagatagaaagaaaagtgcgcgttcccaagcctatcccgctccctggagttcgaaatatcatcttcccttttgctccgagtcccaatgaggaagaaagtgaagatgaagagtactacagtgaagatgaagaccaagaggcacgcaggcacaggcttcactccaaggaccagaggaagcgcatgagggcttttcagcaagagatgaaggagaaggaggaggaggagatgaagaaggaggaagaaatgaagaagaaggaagagaaggaggaggaggaggaagaggaaatgaaacagaaagaggaggaggaggagataaggaacaagaatgaggaggaaggagagagtaaggatgaagaagatgaagatgaggatgggggccagaaaccagaaggagagccacagcaggatccagggactgaggagacctatggtgaggtggaggaggagccactggatgaggcccaagatgatgacctagatgagctgatggagatggagccgacctttgttcacgcgtcatcccagacttctggccccacaagtggttaccacgccgaaaacttcctgggtgcatcacctcccataatacagcctagcagacggaggaaccagaatcgagtcccacttctggaaggccttccaggcaccaattcaccattctacagctccccccaactgattcgccgcacaggtcgtttaggacaacgccaagttcgaagacgcccccctgtgcttttccgcctcactccgagacaggggggccaccgagctgctcgtggccgaattcgagtttgagtgctggggccagatggccacccagaacacacccttcttttgcatcccccgcccctgctattgctgccatacctgccccatttgctgaccaggacttcagggagtttcagacctgcagaacctgaagaagacctgcagaattccagaccatcttgcaaccgtgaccagagagcgacgtgtgcccaaccagggccacctgggaaaggagggatcagcaatagctgccctcttggcatgtactctgctcagtccggccacgagctggagagcaagtttctgggcctgttcccataaatgaactggtcaccctcttgtatttcccctctggttgttcctaaccctcacctctcctgcgtttcttcaccctatgttctacagttttattctctgactgacccaccaggacttcacccaatgcctcactgatctgccccaatgagcaagaggacaggctaccctgaactcctaaagccactgaggccagttgctagatataatcgatggtgagcaggatggtatccagaaatgtccctagaatcctacactcatttcatgccacacctccagcagagggcctggaagaggacccgacatctagcccagtgagagtgtgcaaagccacatgtcaaatggacaacttgacggagatttgcccttgactgactgtgcaggctggttccacttacagcacttgagtttacctttgcacagattcctgtatcagggctcttggactgacttgccacacatctggagccctttcctctcaccacattgccctcctgggcacccccggtggacagcgcccaacattgcaggctccacaactttccttgatgttgcctaaagggtagccagttagggttccggagaggagaaggaggaagaagaggaggaggagaaagaagcagcaacgatcattctgccattgtaaagagtgactctttccttagggatggtggtcttctccccttgccaggccttggactgcagcccccagtcaaaggtctttgcaggacactttctatccttggagttgcagaggaggcctgattggccattccttctgggacagacagagagagggcccatggcctgctctgagctcccttcaatttcaaggaacccttagttctgagaggagagaggaaggctgcacctaccgtggcctcacagctgggacccctcatgggggccaacccctggcctgctgctgtgcttcagtgacacagtaaagcttaagagggtggctgcctcctaggaactcctgggacttctaggtacaaactcaggtgcccttataaagagacccactgcttgccttgagtccagaaagcactgcttctgcagtgaaaaacacacacttactatgtcagttttggccataaaatgccagccaaatccactgctggcctgaactgcccctggacactggactttctgcacagtgactggcagcagagcaagtgcagccagggtttgtggccaaagggaagaaagcatagtaaattcaacctctgttcctcatgggagtctgaccgataatctcaggcggaccttaggatcttgggcctggaggcaagagaaaaaagctggaggaagaggagtcgcagagaaacccagtcctctgactggtttctggtgaggtctctattcatcagtgggaggtaagatgcccttttcattagcgcttttgtttctcagcctggggatcagtggatttggattcctataacctgttgctaccttttaaaaagatcccctctctccaaagagaaaagtaatacataatcattaaagaaagtttggaaaatagagaaaactatgaggacaaaaaccccccagccattcagagtcccaccacacagaggcaagcactattaacactttgctgctttcctttctagtgtgttcttgctatgtcttgtcaaagctgagatcaccctgccagttcttgatcagcaggatttaaaatggctgccacctgtgcagtcatgcatactgaataattcatttaagcattctcctaatttgttggacctttcaattgtctggttttccccatccccaccagggcaggagtaaacaactttgtaaagaaaatttt

SEQ ID NO: 175531 - DNA, 4193 bp, Homo sapiens
  Payload ID: 14475
  Gene Symbol: RTL1
  Gene Name: retrotransposon-like 1
  Uniprot ID: A6NKG5
  ENST ID: ENST00000534062
  CDS Start-End: 60-4136
gactggacgccatcacaaccttaccaatcttcagaatacactcctttccatccgacgaaatgatagaaccctctgaagactcatttgagacgatgatggagcataagaatccatcatcaaaacaaatggagtcctccgagggctcatccaacaccaccgaggcgacgtcgggcagtggagtgcggggagaggcagggccagccagcggcccagcccaggaaaagaaggagccccccagtggcccactccaggaaatggaagagctgcccactgatctactccaagacatggaggagccatccagtggcccacgtaaggaaatagaggatccacccaatgacctactccaagacctggaggagtcatgcaacggttcacaccaggcaaggggggatccactcagtggagcatctgataggatgaaagaagcatcagtcaacccatcgggagcccgagaagaacaagaggctcacactgacctgaaggaatcgggaagggaggagactcctcaagagcaaaaccagaccgagcactcaaccgcagaacttatggccatggtgaggtccatcatctcgctgtacttccgaatgcaagacctcaaagagcaacagagagtagcagaagagatcttgatcaaagggatcaatgcaggccaactgcccgccccaaagcacttctctggcgatcgcagagaattccacgagttcatcgtactctgccaactgaccttacagagctacccaagaatgttctataacgaccgtctgagagttggctatgtcatcaatcacctgtccggcttggcattagaatgggccaaagctctactgcaggaaaacagccccctgatcggagacttcccagccttcctggaggccatgtccgaagtgtttgagtaccgccaggcactgcgtgtggcagaagaggccatgttcaccatcaggcagggcggccgctctgccactgagtacatcgatgagttccagagcctggtacccatcttgggctggccagatgaagtcctgcaggcccacttgtgccaggggctcaacgaggagatcaggcactatctattccgggtccctcagccggattccctagacagtctgattgtgctcatcctgcaaatagaagagaagctggcagagagaagagctatgctcaggctgccccccgaggcccgcccccggaacctgacctggatcgactcacctgctccagagaggtggatggtcagcagctggttgcccagcgaagtccatccggacatcaatcgcgcccacctcttcctgctgctcatggtgagagtgaacccctaccacagcgtcgcggtccaggccctggtggattcgggagctgacggcaacttcatggatgagaagttcgcccaagagcactacgtcgagctctacgagaagccgtacccacagccggtccaatccgtggacggctcgctgattggcaacgagcctgtctggctctacacggagcccctggtgtgtatccaccagaaccaccaggagtccatcgaatttgacatcgtaccttcaccgaacttctctgtggtcctaggcatccgctggctccgagtccacgcccccgaagtcgactggatcaaaggccgctgcaccttccactctccctactgcctgaagaactgcttccgcccgcccccgccatgcattgccctagagaggcacggcatgagcctgctacccggactgccacacccatactcagacctggccgacgtgtttaacccgaaggaagcagatgatgagacttccgaccagccaagctcagacggatccgatgatctttctgaatcagagccctctgagcttcagcaggctggagacagtgatcacagcgagaccttttacgagtgtccctccaccgcgccttgggaacctgtgggtgccaggatgcaagaaagagccaggctacaggaggaatactgggacctgcaggacatgctgaccaacagacaggactacatacagatgattccggaactgtttgaccagttacacggagccgagtggttcacaaaactggagctgcgtgggaccattgtggaggaaagcgtgaacgggcaccgcaccgaagatgtgtggaaagcagcgtttggtttggagcttgaagagatgaagagctaccagccgtttgcgctctccccagaccctatcatacctcagaacgtgattcacttcatcctaaaggacatgctagggttctttgtgctttcttatggccaggaagtcctgatctactcaatgagtcaggaggagcacctccaccacgtccgccaagtcctggtccgcttccgccatcacaacgtctactgctccctggacaagagccagttccaccgccaaaccgtggaattcctgggcttcgtcgtcacccccaaaggggtgaaactgaacaagaacgtcatgaccatcataacagggtaccctacccctggctccaagctatctctgcgaaacttcatcgaattcgtcttcccctaccgccacttcgtggagcgcttcagcatcatcgcagagcccctggtgcggcagctgctgagctcctaccagttctactggggagtcgaggagcaagaggccttcgagtgcctgaagagggctttccgcaaggcgcctctcctccaccaccccaagccccagaacccattctacttggaaaccggcgtcaccggcacggccctgcacgcctccctgatccaaatcgacgaccaaaccggcaagagagcctgctgcgctttctactcccgcaacatctcccctatcgaggttgagtactctcaagcggagatgaagattcttccaatacgggctgccttcatggtgtggtgccgctacctggagaacaccgaggagcccatcatgatccttctcaacacagaggatctagcctctctgaataatgacaggctcaccgtacttctccccgggcattgggtcttcttcttctcccacttcaactttgacgtcatggagctgccagaacaagacggcggccgagctctgccacctgtgagaaacctccggtggaggagagccttccagaggaacactgccgccaggcaaaccctgctgctggcctcaaggggattccccagggatccatcgacggaatccggggaagaagagaatgaagaacaggatgagctcaatgaacagatcctacggcaagagctgctggccatgatacccatcgaccagatcctcaacagcttcctcgcccacttcagcatggcccagatcagggccgtcattctgcacttcttccgaggcctcctgtactggaagaacaccctagccctggcagccatcctcgtgctactgcgcgtgaggcaatgcctctcgctgcggccggcacccgccatgcgggtggctcggccccagccccagcgctccctacgactcatcctggattcgtccctcatcgcaggcagcagcatcacgacagccatcacccagctgctcacccagatgcccgctctcgtaggtgcaaacaccatcccagcccaggagctggctgagctgttcctgggccctggccgctggcagcgaaatgctctgcactcccaggcccaccgaggcctgcagttcacccctggcttctggctgacgctgtgtgagttcttcggtgtcagagtcaccccccaggagggccacctccctgccctgcgtcagaaccgctacctggagctgcacgtcgttggtgatgaggatgtcgtcttgcgagaagccctgcaagacgacctgcaacgttaccgtcagtgtggcctgcatgacggcctgcaagacacctcgcaggacaagcaggacaacgacgtgcaggaggccccacccagccacacagcagccacccacccaccccgcccacgccacctgatggatccccaggtcctggaattccttggtagccgcctgctccacatccacagtgcagatggccagctgcacctgctcagccgggagcaggcagccagggccctgagccagttcctgaccctgatctacaggcgggccctgcccatccccgcctgggagagccagcccagggagcaggcaaggctagaagagctgcctgatgaggacgaagatgctaacctcgactgaagacgcctccctgtctccagcaaagagtcccctctatttctcaccccaacacctccc

SEQ ID NO: 175532 - DNA, 4751 bp, Homo sapiens
  Payload ID: 14476
  Gene Symbol: REV1
  Gene Name: REV1, polymerase (DNA directed)
  Uniprot ID: Q9UBZ9
  ENST ID: ENST00000258428
  CDS Start-End: 230-3985
cggagggggaggggcggagagccaccgcggagcgcgcgcggggttggttgccgcgagcgtgggggagcgtggaccgcggcgctgctcagcggtggggctgccttcccccggccctcctccctggtccctggcgagggcactggcggcggcggggccggggtccgcaaggccggagaaggccgccgggcccgggcatggtggtctggggcaacgcggaagaagctccaccatgaggcgaggtggatggaggaagcgagctgaaaatgatggctgggaaacatggggtgggtatatggctgccaaggtccagaaattggaggaacagtttcgatcagatgctgctatgcagaaggatgggacttcatctacaatttttagtggagttgccatctatgttaatggatacacagatccttccgctgaggaattgagaaaactaatgatgttgcatggaggtcaataccatgtatattattccagatctaaaacaacacatattattgccacaaatcttcccaatgccaaaattaaagaattaaagggggaaaaagtaattcgaccagaatggattgtggaaagcatcaaagctggacgactcctctcctacattccatatcagctgtacaccaagcagtccagtgtgcagaaaggtctcagctttaatcctgtatgcagacctgaggatcctctgccaggtccaagcaatatagccaaacagctcaacaacagggtaaatcacatcgttaagaagattgaaacggaaaatgaagtcaaagtcaatggcatgaacagttggaatgaagaagatgaaaataatgattttagttttgtggatctggagcagacctctccgggaaggaaacagaatggaattccgcatcccagagggagcactgccatttttaatggacacactcctagctctaatggtgccttaaagacacaggattgcttggtgcccatggtcaacagtgttgccagcaggctttctccagccttttcccaggaggaggataaggctgagaagagcagcactgatttcagagactgcactctgcagcagttgcagcaaagcaccagaaacacagatgctttgcggaatccacacagaactaattctttctcattatcacctttgcacagtaacactaaaatcaatggtgctcaccactccactgttcaggggccttcaagcacaaaaagcacttcttcagtatctacgtttagcaaggcagcaccttcagtgccatccaaaccttcagactgcaattttatttcaaacttctattctcattcaagactgcatcacatatcaatgtggaagtgtgaattgactgagtttgtcaataccctacaaagacaaagtaatggtatctttccaggaagggaaaagttaaaaaaaatgaaaacaggcaggtctgcacttgttgtaactgacacaggagatatgtcagtattgaattctcccagacatcagagctgtataatgcatgttgatatggattgcttctttgtatcagtgggtatacgaaatagaccagatctcaaaggaaaaccagtggctgttacaagtaacagaggcacaggaagggcacctttacgtcctggcgctaacccccagctggagtggcagtattaccagaataaaatcctgaaaggcaaagcagcagatataccagattcatcattgtgggagaatccagattctgcgcaagcaaatggaattgattctgttttgtcaagggctgaaattgcatcttgtagttatgaggccaggcaacttggcattaagaacggaatgttttttgggcatgctaaacaactatgtcctaatcttcaagctgttccatacgattttcatgcatataaggaagtcgcacaaacattgtatgaaacattggcaagctacactcataacattgaagctgtcagttgtgatgaagcgctggtagacattaccgaaatccttgcagagaccaaacttactcctgatgaatttgcaaatgctgttcgtatggaaatcaaagaccagacgaaatgtgctgcctctgttggaattggttctaatattctcctggctagaatggcaactagaaaagcaaaaccagatgggcagtaccacctaaaaccagaagaagtagatgattttatcagaggccagctagtgaccaatctaccaggagttggacattcaatggaatctaagttggcatctttgggaattaaaacttgtggagacttgcagtatatgaccatggcaaaactccaaaaagaatttggtcccaaaacaggtcagatgctttataggttctgccgtggcttggatgatagaccagttcgaactgaaaaggaaagaaaatctgtttcagctgagatcaactatggaataaggtttactcagccaaaagaggcagaagcttttcttctgagtctttcagaagaaattcaaagaagactagaagccactggcatgaagggtaaacgtctaactctcaaaatcatggtacgaaagcctggggctcctgtagaaactgcaaaatttggaggccatggaatttgtgataacattgccaggactgtaactcttgaccaggcaacagataatgcaaaaataattggaaaggcgatgctaaacatgtttcatacaatgaaactaaatatatcagatatgagaggggttgggattcacgtgaatcagttggttccaactaatctgaacccttccacatgtcccagtcgcccatcagttcagtcaagccactttcctagtgggtcatactctgtccgtgatgtcttccaagttcagaaagctaagaaatccaccgaagaggagcacaaagaagtatttcgggctgctgtggatctggaaatatcatctgcttctagaacttgcactttcttgccaccttttcctgcacatctgccgaccagtcctgatactaacaaggctgagtcttcagggaaatggaatggtctacatactcctgtcagtgtgcagtcgagacttaacctgagtatagaggtcccgtcaccttcccagctggatcagtctgttttagaagcacttccacctgatctccgggaacaagtagagcaagtctgtgctgtccagcaagcagagtcacatggcgacaaaaagaaagaaccagtaaatggctgtaatacaggaattttgccacaaccagttgggacagtcttgttgcaaataccagaacctcaagaatcgaacagtgacgcaggaataaatttaatagcccttccagcattttcacaggtggaccctgaggtatttgctgcccttcctgctgaacttcagagggagctgaaagcagcgtatgatcaaagacaaaggcagggcgagaacagcactcaccagcagtcagccagcgcatctgtgccaaagaatcctttacttcatctaaaggcagcagtgaaagaaaagaaaagaaacaagaagaaaaaaaccattggttcaccaaaaaggattcagagtcctttgaataacaagctgcttaacagtcctgcaaaaactctgccaggggcctgtggcagtccccagaagttaattgatgggtttctaaaacatgaaggacctcctgcagagaaacccctggaagaactctctgcttctacttcaggtgtgccaggcctttctagtttgcagtctgacccagctggctgtgtgagacctccagcacccaatctagctggagctgttgaattcaatgatgtgaagaccttgctcagagaatggataactacaatttcagatccaatggaagaagacattctccaagttgtgaaatactgtactgatctaatagaagaaaaagatttggaaaaactggatctagttataaaatacatgaaaaggctgatgcagcaatcggtggaatcggtttggaatatggcatttgactttattcttgacaatgtccaggtggttttacaacaaacttatggaagcacattaaaagttacataaatattaccagagagcctgatgctctctgatagctgtgccataagtgcttgtgaggtatttgcaaagtgcatgatagtaatgctcggagtttttataattttaaatttcttttaaagcaagtgttttgtacatttcttttcaaaaagtgccaaatttgtcagtattgcatgtaaataattgtgttaattattttactgtagcatagattctatttacaaaatgtttgtttataaagttttatggatttttacagtgaagtgtttacagttgtttaataaagaactgtatgtatattttgtacaggctcctttttgtgaatccttaaaaactcaactctaggaagcaactactgtttattatactaaaaggctgaaaaacctccaggccagactgctaagctctgaaattcctgagaggtctcagaccgggattctacttgttccaagaaagggtaaagcttctaaaccatcttattcttgtctccaagcatgaacacaggagcatgttaagaaaatctttactacttcttccatgcggagaaatctacatattttgaattagaaacaccctcacacccacttgaagatttttttcctgggaacattatgtcccgtagatcagaggtggtgttgtctttttgcttctactggccattgagaaactttgatgataaaaaagaacggtatagatttttcaaacgtatataaaatatttttatgttatatgttatgccataactttaaaataaaaatagtttaaaattcta

SEQ ID NO: 175533 - DNA, 4686 bp, Homo sapiens
  Payload ID: 14476
  Gene Symbol: REV1
  Gene Name: REV1, polymerase (DNA directed)
  Uniprot ID: Q9UBZ9
  ENST ID: ENST00000393445
  CDS Start-End: 168-3920
gggagcgtggaccgcggcgctgctcagcggtggggctgccttcccccggccctcctccctggtccctggcgagggcactggcggcggcggggccggggtccgcaaggccggagaaggccgccgggcccgggcatggtggtctggggcaacgcggaagaagctccaccatgaggcgaggtggatggaggaagcgagctgaaaatgatggctgggaaacatggggtgggtatatggctgccaaggtccagaaattggaggaacagtttcgatcagatgctgctatgcagaaggatgggacttcatctacaatttttagtggagttgccatctatgttaatggatacacagatccttccgctgaggaattgagaaaactaatgatgttgcatggaggtcaataccatgtatattattccagatctaaaacaacacatattattgccacaaatcttcccaatgccaaaattaaagaattaaagggggaaaaagtaattcgaccagaatggattgtggaaagcatcaaagctggacgactcctctcctacattccatatcagctgtacaccaagcagtccagtgtgcagaaaggtctcagctttaatcctgtatgcagacctgaggatcctctgccaggtccaagcaatatagccaaacagctcaacaacagggtaaatcacatcgttaagaagattgaaacggaaaatgaagtcaaagtcaatggcatgaacagttggaatgaagaagatgaaaataatgattttagttttgtggatctggagcagacctctccgggaaggaaacagaatggaattccgcatcccagagggagcactgccatttttaatggacacactcctagctctaatggtgccttaaagacacaggattgcttggtgcccatggtcaacagtgttgccagcaggctttctccagccttttcccaggaggaggataaggctgagaagagcagcactgatttcagagactgcactctgcagcagttgcagcaaagcaccagaaacacagatgctttgcggaatccacacagaactaattctttctcattatcacctttgcacagtaacactaaaatcaatggtgctcaccactccactgttcaggggccttcaagcacaaaaagcacttcttcagtatctacgtttagcaaggcagcaccttcagtgccatccaaaccttcagactgcaattttatttcaaacttctattctcattcaagactgcatcacatatcaatgtggaagtgtgaattgactgagtttgtcaataccctacaaagacaaagtaatggtatctttccaggaagggaaaagttaaaaaaaatgaaaacaggcaggtctgcacttgttgtaactgacacaggagatatgtcagtattgaattctcccagacatcagagctgtataatgcatgttgatatggattgcttctttgtatcagtgggtatacgaaatagaccagatctcaaaggaaaaccagtggctgttacaagtaacagaggcacaggaagggcacctttacgtcctggcgctaacccccagctggagtggcagtattaccagaataaaatcctgaaaggcaaagcagatataccagattcatcattgtgggagaatccagattctgcgcaagcaaatggaattgattctgttttgtcaagggctgaaattgcatcttgtagttatgaggccaggcaacttggcattaagaacggaatgttttttgggcatgctaaacaactatgtcctaatcttcaagctgttccatacgattttcatgcatataaggaagtcgcacaaacattgtatgaaacattggcaagctacactcataacattgaagctgtcagttgtgatgaagcgctggtagacattaccgaaatccttgcagagaccaaacttactcctgatgaatttgcaaatgctgttcgtatggaaatcaaagaccagacgaaatgtgctgcctctgttggaattggttctaatattctcctggctagaatggcaactagaaaagcaaaaccagatgggcagtaccacctaaaaccagaagaagtagatgattttatcagaggccagctagtgaccaatctaccaggagttggacattcaatggaatctaagttggcatctttgggaattaaaacttgtggagacttgcagtatatgaccatggcaaaactccaaaaagaatttggtcccaaaacaggtcagatgctttataggttctgccgtggcttggatgatagaccagttcgaactgaaaaggaaagaaaatctgtttcagctgagatcaactatggaataaggtttactcagccaaaagaggcagaagcttttcttctgagtctttcagaagaaattcaaagaagactagaagccactggcatgaagggtaaacgtctaactctcaaaatcatggtacgaaagcctggggctcctgtagaaactgcaaaatttggaggccatggaatttgtgataacattgccaggactgtaactcttgaccaggcaacagataatgcaaaaataattggaaaggcgatgctaaacatgtttcatacaatgaaactaaatatatcagatatgagaggggttgggattcacgtgaatcagttggttccaactaatctgaacccttccacatgtcccagtcgcccatcagttcagtcaagccactttcctagtgggtcatactctgtccgtgatgtcttccaagttcagaaagctaagaaatccaccgaagaggagcacaaagaagtatttcgggctgctgtggatctggaaatatcatctgcttctagaacttgcactttcttgccaccttttcctgcacatctgccgaccagtcctgatactaacaaggctgagtcttcagggaaatggaatggtctacatactcctgtcagtgtgcagtcgagacttaacctgagtatagaggtcccgtcaccttcccagctggatcagtctgttttagaagcacttccacctgatctccgggaacaagtagagcaagtctgtgctgtccagcaagcagagtcacatggcgacaaaaagaaagaaccagtaaatggctgtaatacaggaattttgccacaaccagttgggacagtcttgttgcaaataccagaacctcaagaatcgaacagtgacgcaggaataaatttaatagcccttccagcattttcacaggtggaccctgaggtatttgctgcccttcctgctgaacttcagagggagctgaaagcagcgtatgatcaaagacaaaggcagggcgagaacagcactcaccagcagtcagccagcgcatctgtgccaaagaatcctttacttcatctaaaggcagcagtgaaagaaaagaaaagaaacaagaagaaaaaaaccattggttcaccaaaaaggattcagagtcctttgaataacaagctgcttaacagtcctgcaaaaactctgccaggggcctgtggcagtccccagaagttaattgatgggtttctaaaacatgaaggacctcctgcagagaaacccctggaagaactctctgcttctacttcaggtgtgccaggcctttctagtttgcagtctgacccagctggctgtgtgagacctccagcacccaatctagctggagctgttgaattcaatgatgtgaagaccttgctcagagaatggataactacaatttcagatccaatggaagaagacattctccaagttgtgaaatactgtactgatctaatagaagaaaaagatttggaaaaactggatctagttataaaatacatgaaaaggctgatgcagcaatcggtggaatcggtttggaatatggcatttgactttattcttgacaatgtccaggtggttttacaacaaacttatggaagcacattaaaagttacataaatattaccagagagcctgatgctctctgatagctgtgccataagtgcttgtgaggtatttgcaaagtgcatgatagtaatgctcggagtttttataattttaaatttcttttaaagcaagtgttttgtacatttcttttcaaaaagtgccaaatttgtcagtattgcatgtaaataattgtgttaattattttactgtagcatagattctatttacaaaatgtttgtttataaagttttatggatttttacagtgaagtgtttacagttgtttaataaagaactgtatgtatattttgtacaggctcctttttgtgaatccttaaaaactcaactctaggaagcaactactgtttattatactaaaaggctgaaaaacctccaggccagactgctaagctctgaaattcctgagaggtctcagaccgggattctacttgttccaagaaagggtaaagcttctaaaccatcttattcttgtctccaagcatgaacacaggagcatgttaagaaaatctttactacttcttccatgcggagaaatctacatattttgaattagaaacaccctcacacccacttgaagatttttttcctgggaacattatgtcccgtagatcagaggtggtgttgtctttttgcttctactggccattgagaaactttgatgataaaaaagaacggtatagatttttcaaacgtatataaaatatttttatgttatatgttatgccataactttaaaataaaaatagtttaaaattcta

SEQ ID NO: 175534 - DNA, 545 bp, Homo sapiens
  Payload ID: 14476
  Gene Symbol: REV1
  Gene Name: REV1, polymerase (DNA directed)
  ENST ID: ENST00000438366
  CDS Start-End: 1-292
ttttcttctgagtctttcagaagaaattcaaagaagactagaagccactggcatgaagggtaaacgtctaactctcaaaatcatggtacgaaagcctggggctcctgtagaaactgcaaaatttggaggccatggaatttgtgataacattgccaggactgtaactcttgaccaggcaacagataatgcaaaaataattggaaaggcgatgctaaacatgtttcatacaatgaaactaaatatatcagatatgagagggtcgcccatcagttcagtcaagccactttcctagtgggtcatactctgtccgtgatgtcttccaagttcagaaagctaagaaatccaccgaagaggagcacaaagaagtatttcgggctgctgtggatctggaaatatcatctgcttctagaacttgcactttcttgccaccttttcctgcacatctgccgaccagtcctgatactaacaaggctgagtcttcagggaaatggaatggtctacatactcctgtcagtgtgcagtcgagacttaacctgagtatagag

SEQ ID NO: 175535 - DNA, 577 bp, Homo sapiens
  Payload ID: 14476
  Gene Symbol: REV1
  Gene Name: REV1, polymerase (DNA directed)
  ENST ID: ENST00000450415
  CDS Start-End: 1-577
atgtggaagtgtgaattgactgagtttgtcaataccctacaaagacaaagtaatggtatctttccaggaagggaaaagttaaaaaaaatgaaaacaggcaggtctgcacttgttgtaactgacacaggagatatgtcagtattgaattctcccagacatcagagctgtataatgcatgttgatatggattgcttctttgtatcagtgggtatacgaaatagaccagatctcaaaggaaaaccagtggctgttacaagtaacagaggcacaggaagggcacctttacgtcctggcgctaacccccagctggagtggcagtattaccagaataaaatcctgaaaggcaaagcagatataccagattcatcattgtgggagaatccagattctgcgcaagcaaatggaattgattctgttttgtcaagggctgaaattgcatcttgtagttatgaggccaggtccctcaaagttctggaaccctggctcctgcccagagtgatgtcctaccatgtacaatgctgttggcatctcaaccactgtggagccacttcaggagcatggaattggtcaattggga

SEQ ID NO: 175536 - DNA, 4727 bp, Homo sapiens
  Payload ID: 14476
  Gene Symbol: REV1
  Gene Name: REV1, polymerase (DNA directed)
  ENST ID: ENST00000413697
  CDS Start-End: 230-439
cggagggggaggggcggagagccaccgcggagcgcgcgcggggttggttgccgcgagcgtgggggagcgtggaccgcggcgctgctcagcggtggggctgccttcccccggccctcctccctggtccctggcgagggcactggcggcggcggggccggggtccgcaaggccggagaaggccgccgggcccgggcatggtggtctggggcaacgcggaagaagctccaccatgaggcgaggtggatggaggaagcgagctgaaaatgatggctgggaaacatggggtgggtatatggctgccaaggtccagaaattggaggaacagtttcgatcagatgctgctatgcagaaggatgggacttcatctacaatttttagtggagttgccatctatgttaatggatacacagattggttttcatgcttcacttcacactgaagaatatgtaagagctttcagaagtgaacttcaaagagccctcttaacttcatccagtagaagggcaatgtattttccagttccaaatttctggagtaattagttttcaaagagcagctagtagacggatccttccgctgaggaattgagaaaactaatgatgttgcatggaggtcaataccatgtatattattccagatctaaaacaacacatattattgccacaaatcttcccaatgccaaaattaaagaattaaagggggaaaaagtaattcgaccagaatggattgtggaaagcatcaaagctggacgactcctctcctacattccatatcagctgtacaccaagcagtccagtgtgcagaaaggtctcagctttaatcctgtatgcagacctgaggatcctctgccaggtccaagcaatatagccaaacagctcaacaacagggtaaatcacatcgttaagaagattgaaacggaaaatgaagtcaaagtcaatggcatgaacagttggaatgaagaagatgaaaataatgattttagttttgtggatctggagcagacctctccgggaaggaaacagaatggaattccgcatcccagagggagcactgccatttttaatggacacactcctagctctaatggtgccttaaagacacaggattgcttggtgcccatggtcaacagtgttgccagcaggctttctccagccttttcccaggaggaggataaggctgagaagagcagcactgatttcagagactgcactctgcagcagttgcagcaaagcaccagaaacacagatgctttgcggaatccacacagaactaattctttctcattatcacctttgcacagtaacactaaaatcaatggtgctcaccactccactgttcaggggccttcaagcacaaaaagcacttcttcagtatctacgtttagcaaggcagcaccttcagtgccatccaaaccttcagactgcaattttatttcaaacttctattctcattcaagactgcatcacatatcaatgtggaagtgtgaattgactgagtttgtcaataccctacaaagacaaagtaatggtatctttccaggaagggaaaagttaaaaaaaatgaaaacaggcaggtctgcacttgttgtaactgacacaggagatatgtcagtattgaattctcccagacatcagagctgtataatgcatgttgatatggattgcttctttgtatcagtgggtatacgaaatagaccagatctcaaaggaaaaccagtggctgttacaagtaacagaggcacaggaagggcacctttacgtcctggcgctaacccccagctggagtggcagtattaccagaataaaatcctgaaaggcaaagcagatataccagattcatcattgtgggagaatccagattctgcgcaagcaaatggaattgattctgttttgtcaagggctgaaattgcatcttgtagttatgaggccaggcaacttggcattaagaacggaatgttttttgggcatgctaaacaactatgtcctaatcttcaagctgttccatacgattttcatgcatataaggaagtcgcacaaacattgtatgaaacattggcaagctacactcataacattgaagctgtcagttgtgatgaagcgctggtagacattaccgaaatccttgcagagaccaaacttactcctgatgaatttgcaaatgctgttcgtatggaaatcaaagaccagacgaaatgtgctgcctctgttggaattggttctaatattctcctggctagaatggcaactagaaaagcaaaaccagatgggcagtaccacctaaaaccagaagaagtagatgattttatcagaggccagctagtgaccaatctaccaggagttggacattcaatggaatctaagttggcatctttgggaattaaaacttgtggagacttgcagtatatgaccatggcaaaactccaaaaagaatttggtcccaaaacaggtcagatgctttataggttctgccgtggcttggatgatagaccagttcgaactgaaaaggaaagaaaatctgtttcagctgagatcaactatggaataaggtttactcagccaaaagaggcagaagcttttcttctgagtctttcagaagaaattcaaagaagactagaagccactggcatgaagggtaaacgtctaactctcaaaatcatggtacgaaagcctggggctcctgtagaaactgcaaaatttggaggccatggaatttgtgataacattgccaggactgtaactcttgaccaggcaacagataatgcaaaaataattggaaaggcgatgctaaacatgtttcatacaatgaaactaaatatatcagatatgagaggggttgggattcacgtgaatcagttggttccaactaatctgaacccttccacatgtcccagtcgcccatcagttcagtcaagccactttcctagtgggtcatactctgtccgtgatgtcttccaagttcagaaagctaagaaatccaccgaagaggagcacaaagaagtatttcgggctgctgtggatctggaaatatcatctgcttctagaacttgcactttcttgccaccttttcctgcacatctgccgaccagtcctgatactaacaaggctgagtcttcagggaaatggaatggtctacatactcctgtcagtgtgcagtcgagacttaacctgagtatagaggtcccgtcaccttcccagctggatcagtctgttttagaagcacttccacctgatctccgggaacaagtagagcaagtctgtgctgtccagcaagcagagtcacatggcgacaaaaagaaagaaccagtaaatggctgtaatacaggaattttgccacaaccagttgggacagtcttgttgcaaataccagaacctcaagaatcgaacagtgacgcaggaataaatttaatagcccttccagcattttcacaggtggaccctgaggtatttgctgcccttcctgctgaacttcagagggagctgaaagcagcgtatgatcaaagacaaaggcagggcgagaacagcactcaccagcagtcagccagcgcatctgtgccaaagaatcctttacttcatctaaaggcagcagtgaaagaaaagaaaagaaacaagaagaaaaaaaccattggttcaccaaaaaggattcagagtcctttgaataacaagctgcttaacagtcctgcaaaaactctgccaggggcctgtggcagtccccagaagttaattgatgggtttctaaaacatgaaggacctcctgcagagaaacccctggaagaactctctgcttctacttcaggtgtgccaggcctttctagtttgcagtctgacccagctggctgtgtgagacctccagcacccaatctagctggagctgttgaattcaatgatgtgaagaccttgctcagagaatggataactacaatttcaggttggcttggcctgtgttagatggcccaaggctgagatgtagtcgtctcatgatttgagaacataaacagactaaactatgcagatttaacccatttctctaactctgataagcttaaagcagctacccccaaatcttttaaattctgggacttgctttgaaaagtaacaaagcccattcctttgatagctgttagtgacatagttgtagaaatgcagttttcctttatccatgcagatctctgactttctccttcaaaaagactggtcctcatttgaagtttttcccccttcctagatccaatggaagaagacattctccaagttgtgaaatactgtactgatctaatagaagaaaaagatttggaaaaactggatctagttataaaatacatgaaaaggctgatgcagcaatcggtggaatcggtttggaatatggcatttgactttattcttgacaatgtccaggtggttttacaacaaacttatggaagcacattaaaagttacataaatattaccagagagcctgatgctctctgatagctgtgccataagtgcttgtgaggtatttgcaaagtgcatgatagtaatgctcggagtttttataattttaaatttcttttaaagcaagtgttttgtacatttcttttcaaaaagtgccaaatttgtcagtattgcatgtaaataattgtgttaattattttactgtagcatagattctatttacaaaatgtttgtttataaagttttatggatttttacagtgaagtgtttacagttgtttaataaagaactgtatgta

SEQ ID NO: 175537 - DNA, 10815 bp, Homo sapiens
  Payload ID: 14477
  Gene Symbol: REV3L
  Gene Name: REV3-like, polymerase (DNA directed), zeta, catalytic subunit
  Uniprot ID: O60673
  ENST ID: ENST00000358835
  CDS Start-End: 459-9851
gcacgagatctgcgcctcgcctccctcctcacgcgggcggattttcttaccttgtgaaaaaccgtctcagcggctgcccccgcctcctctgctggatgtgaaatggcggtcggcgagtggttgcgtccgtgacatcatcatcatggcaacaagagctgcagcctgggaccgaggagcccgtgtgattcccggcggtggcggcagtggcggcagcaccagcaccgacgaaagctcgagggcttctctcctgcggccccttgccgggtgctcctgaggaggcggcggcagcagcgcctacaccgccccgcccgccgctcctcgaggtgcctctgtgtgaggggagggggccgtgccgagaaggggagggggcgccgccgccgctgcggagggagccgccgccgctgctgctgccgctgccgggtcgccagtgaagggaggcagtggcggcggcggcgaacatgttttcagtaaggatagtgactgcagactactacatggccagcccgctgcaggggctggatacctgccaatcccccctcacccaggcccctgtcaagaaggtgccggtggtgcgagtcttcggagcgaccccggcaggtcagaagacatgtcttcatctacatggcatctttccttacctctatgtgccatacgatggttatggacagcagccagaaagctatctttctcagatggcattcagtatcgacagagcacttaatgtggctttaggcaatccatcttccactgctcagcatgtgttcaaagtgtcattagtatcaggaatgcctttttatggttatcatgagaaggaaagacactttatgaagatctatctttacaatcctacaatggtgaaaaggatatgtgaacttttgcaaagcggagccataatgaataaattttaccagcctcatgaagcgcatattccctacctcctacagctcttcattgactacaatctttatggcatgaatttaataaatctggctgctgtcaagttccgaaaagcaagaaggaaaagtaatacattgcatgcaactggatcctgcaagaatcatttatcaggaaattctcttgctgatactttatttcggtgggaacaagatgaaataccaagctctttaatattggaaggtgttgaaccacagagtacatgtgaattagaagtggatgctgtagctgctgatatcttaaatcgtctggacattgaagctcaaattggtggaaaccctggtctacaggccatatgggaagatgaaaagcaacggcgaagaaacagaaatgaaacttctcaaatgagccaacctgagtcacaagatcacaggtttgtgccagcaacagaaagtgaaaaaaaatttcagaagagacttcaggaaattctcaaacagaatgatttctctgtaacattatcaggatctgtggactacagcgatggatcccaggagttctctgctgagttaacattgcactctgaggttctgtctcctgaaatgcttcagtgtacaccagccaatatggtagaagttcacaaagacaaagagtcaagcaaaggtcacactagacacaaagtggaagaagctcttattaatgaagaagcaattttgaaccttatggaaaatagtcagacttttcagcctttgacccaaagactgagtgagtcacctgttttcatggacagtagtcctgatgaggctctggtacatcttcttgctggtttggaaagtgatggatatcggggggaaagaaataggatgccatcaccatgtcgctcctttggaaataataaatatccacaaaatagtgatgatgaagaaaatgaaccacagattgaaaaagaggaaatggagcttagtttggtgatgtcccagagatgggacagcaatattgaagaacattgtgccaaaaagagatcactgtgcagaaatacccacagaagttcaactgaagatgatgactcatcttcaggagaagaaatggaatggagtgataacagtttgcttctagccagtctttctatacctcagttagatggaactgcagatgaaaatagtgacaatccattgaacaatgaaaattctagaacccactcttctgtaattgcaacaagcaagctttcagttaaaccctccatctttcacaaagatgctgctacattagaaccctcatcttctgctaagattacctttcagtgtaaacacacaagtgccctttcttcccatgttttgaacaaggaagatttaattgaagacctttcacagacaaacaaaaatacagaaaaaggtctagataactcagtcacttcttttacaaacgaaagcacttattctatgaaataccctggatctttaagcagtactgttcattcagaaaattctcataaagagaatagtaagaaagagatcctcccagtatcttcctgtgaaagtagtatttttgattatgaagaagatattccatctgttacaagacaagtaccaagtagaaaatatacaaacattagaaaaatcgaaaaggattccccttttatacatatgcaccgtcaccctaacgagaatacattgggcaaaaattctttcaacttttctgacttaaatcattcaaaaaataaagtatcctctgaaggaaatgaaaaaggaaacagcacagctctgagtagtttattcccttcatcatttactgaaaattgtgaattactgtcatgctcaggggagaatagaactatggtgcattctcttaatagcactgctgatgaaagtggactaaataaacttaaaattaggtatgaagaatttcaagaacataaaacagaaaagccaagcctcagccagcaagcagcacactatatgttttttcccagtgttgttctttctaactgtcttactagaccacagaaactatctcctgtcacatataaattacaacctggcaataaaccatcccggttaaaattgaataaaaggaaacttgcaggtcatcaggagacttctaccaaaagtagtgagactggatccacaaaagataattttatacaaaataatccttgtaatagtaatcctgagaaggataatgcattggctagtgatttaactaaaaccactcgtggagcttttgaaaataaaacacccacagatggttttatagactgtcactttggagatggaacgttagaaactgagcagtcctttggactatatggaaataaatacacacttagagccaaacgcaaggtaaattatgagactgaagacagtgagtcaagttttgtaactcacaactcaaaaattagtctacctcatcccatggaaattggtgaaagtttagatggaactctcaaatcccgaaaacgaagaaaaatgtctaaaaagctgccccctgtcatcataaagtatattattattaatagatttagagggagaaaaaatatgcttgtgaagctaggaaaaatagactctaaagaaaaacaagtaatattaacagaagaaaaaatggaactatataaaaagcttgcacctttgaaggacttttggccaaaagttcccgactcccctgcaaccaaatatcccatttatccactaacaccaaagaaaagtcacagaagaaagtcaaaacataaatctgctaagaaaaaaactggtaaacaacaaaggacaaataatgaaaatattaaaagaactttgtctttcaggaaaaaacggtcacatgctattctttctcctccctcaccatcttacaatgctgaaaccgaagattgtgacctgaattatagtgatgttatgtctaaactaggttttctttctgagagaagcacaagtcccataaattcttctccacctcgctgctggtctcccacagatccaagagctgaagaaatcatggctgctgcagaaaaagaggcaatgctttttaagggtcctaatgtatataagaagactgttaattctcgtataggaaaaactagtcgcgcaagagcacagattaagaaatcaaaagcaaagcttgctaatccctctatagttactaagaaaaggaacaaacgaaatcagacaaataaactagtagatgatggaaaaaagaaaccaagagcaaaacaaaaaacaaatgagaaaggtacatcgagaaagcatacaacacttaaggatgaaaaaataaaatctcagtctggtgctgaggttaagtttgtactgaaacaccagaatgtgtctgaatttgcaagtagttctggaggctctcaactactttttaaacagaaagatatgccactaatgggctctgctgtagatcatcccctttctgcttccctacccactggaattaatgcacaacagaagttatctggctgcttttcttctttcttagaaagcaagaagtctgtagatttgcagacattccccagttcacgagatgatttgcatccatcagttgtttgtaattctataggacctggagtctcaaaaattaatgttcaaaggcctcataatcaaagtgctatgtttactctaaaggaatcaacgttaattcaaaaaaatatatttgacctttccaatcatttatctcaggtagcacagaatacacagatatcttctggtatgtcctcaaagatagaagataatgcaaataatatacaaagaaactatttgtcatcaatcggaaagttaagtgaatatcgcaattccctagaatcaaagctggaccaagcatatacccctaattttttgcattgcaaagacagtcagcagcagattgtgtgcatagcggaacagtcaaagcacagtgaaacttgttctccgggaaatacagcttcagaggaaagccaaatgcctaataattgctttgtaacttccttgagaagtccaatcaaacaaatagcatgggagcaaaagcaaaggggctttattttagatatgtcaaattttaaacctgaaagagtaaaaccgaggtcgttatcagaagcaatttcacaaaccaaagcactttctcagtgtaaaaatcgaaatgtgtcaacaccttcagcatttggtgaaggacagtctggactggcagttctaaaagaattgttacaaaaaagacagcagaaagcacaaaatgcaaatactacacaagacccattatccaataaacatcaaccaaataaaaatatttctggttcccttgagcataacaaagcaaataaacggacacgatcggtaacgtccccaagaaaacctcgaactcccagaagtacaaaacaaaaagaaaaaatccccaaacttctcaaagtagactctttaaatttacaaaactctagccagttggataactctgtatcagatgatagtcccatctttttttcagatccaggctttgaaagttgttactcacttgaagatagtttatctcctgaacataattataattttgatattaacacaataggtcagactggattttgtagcttttattctggaagtcagtttgtcccagctgatcagaatttgcctcagaagttcctaagtgatgctgttcaggatctttttccaggacaagctatagaaaaaaatgagtttttaagtcatgacaaccagaaatgtgatgaagacaagcatcataccacagactcagcctcatggattagatctggtactttaagtcctgaaatttttgagaagtcaaccatagatagcaatgagaatcgtcgccacaaccagtggaaaaatagctttcatcctctaacaactcggtctaactcaataatggattctttctgtgttcagcaggcagaagactgtctaagtgaaaaatctagattgaataggagttcagtaagcaaagaagtgtttcttagcctcccacagccaaacaattcagactggattcaaggtcacaccagaaaagaaatgggacagtctcttgactcagccaatacctcttttactgcaatactctcctcccctgatggtgaacttgtagacgtggcctgtgaagatttagaactgtatgtttcaagaaacaatgatatgttgacaccaactcctgatagttcaccaagatctactagctctccttcacaatctaaaaatggcagcttcacccctcgaactgctaacattctgaaaccacttatgtcccccccaagtagggaagaaattatggcaactttgttggatcatgacctgtctgagactatttaccaggaaccattttgcagtaatccttctgatgtaccagaaaagcccagggagattggtggacggctcctcatggtagaaactcgacttgcaaatgatctggctgagtttgagggagacttttccttggaaggacttcgtctttggaaaacagcattctcagcaatgactcagaatccaaggccagggtcaccccttcgcagtggccaaggagttgtcaataaagggtcaagtaatagccctaagatggttgaagataaaaaaattgtgattatgccttgcaaatgtgccccaagtcgacaactggttcaagtgtggcttcaagccaaagaagaatacgaacgttccaagaaactgcctaaaaccaagccaactggagttgtaaaatctgctgagaactttagctcttcagttaacccagatgacaaacctgtagtgcctccaaaaatggatgtaagtccatgtatactccccactacagcacataccaaggaggatgttgataattctcagattgctttacaagcaccaaccacgggatgtagtcaaactgcaagtgaaagtcagatgctgccaccagttgcctctgcaagtgatcccgaaaaagatgaagatgatgatgataactattacattagttatagctcccctgattctccagtaattcccccttggcaacaaccaatatccccagattccaaagcattaaatggagatgatagaccctcatcaccagtagaggagctgccttcattggcttttgagaacttcttaaagccaataaaagatggtatacaaaaaagcccctgcagtgagcctcaagagcctctagtgatatctccaattaatactagggcaagaactgggaaatgtgaatcactttgctttcatagtacaccaatcatacagagaaaacttctggaaaggcttcctgaagcacctggccttagcccattatcaacagaaccaaaaacacagaagttgagtaataagaaaggaagtaatactgacactcttagaagagtactgttaacacaagcaaagaatcaatttgcagcagtaaataccccacagaaagaaacttctcagattgatggaccatctttaaacaatacttacggtttcaaagtcagcatacaaaacttacaggaggcaaaagctttacatgagatacaaaatcttaccctaatcagtgtggagttgcatgctcgaactagacgagacttagaaccggatcctgaatttgacccaatctgtgctctgttctactgcatctcatctgacactccactgccagatacagaaaaaacagaactcacaggtgtaatagtgattgataaagacaagacagttttcagtcaagatatcagatatcagactccattacttattagatctggaattacaggactcgaagtcacctatgctgctgatgagaaggcactttttcatgaaattgcaaatataataaagaggtatgatcctgatattctgctaggatatgagattcagatgcattcctggggttacctcttacaaagggctgccgctttaagtattgacttatgtcggatgatctctcgggtgccagatgacaaaattgagaacagatttgcagctgaaagagatgagtatggatcatatacaatgagtgagataaatattgttggccgaattacactaaatctttggagaatcatgagaaatgaggtggctctaactaactacacctttgaaaatgtgagctttcatgttcttcatcagcgttttcccctctttacctttcgagtcttgtcagactggtttgataacaagacagatctatacagatggaaaatggttgatcattatgttagccgtgtccgtggaaatctccaaatgttagaacagctggacctgattgggaaaaccagtgagatggctagactttttggcattcagtttttacatgtactgacaaggggttcacagtaccgtgtggaatcaatgatgttgcgtattgctaaaccaatgaactatattcctgtgacacctagtgttcagcaaagatcccagatgagagccccacagtgtgttcctctaattatggagcctgaatcccgcttctatagcaactctgttctcgttttggatttccaatcactttatccttctattgtgattgcatataactactgcttttccacctgccttggccatgtggagaacttgggaaagtatgatgagttcaaatttggctgtacctctctgagagtacctccagatttactttaccaagttaggcatgatatcacagtgtcccccaatggagtagcttttgtcaagccttcagtaagaaaaggtgtactaccaagaatgcttgaagaaattttgaagactagatttatggtgaagcagtcaatgaaggcttacaagcaagacagagccctgtcacgaatgcttgatgcgcgtcagttgggacttaagctgatagcaaatgtcacatttggctatacatctgctaatttttctgggagaatgccatgcattgaggttggcgatagtattgttcacaaagccagagagaccttggaacgagctattaaactggtgaatgataccaagaaatggggggctagggttgtatatggcgatactgacagtatgtttgtgctactgaaaggagccactaaggagcagtcttttaagattggtcaggaaattgccgaagctgtaactgctaccaatcctaaaccagtgaaattgaagtttgaaaaggtatatttgccctgtgttttacaaacaaaaaagaggtatgtgggttacatgtatgaaacactggatcagaaggacccagtatttgatgcaaaaggaatagaaacagtcagaagagattcctgccctgctgtttctaagatacttgagcgttctctaaagctgctatttgaaacgagagatataagtctaattaaacagtatgttcagcgacaatgtatgaagcttctggaaggaaaggccagcatacaagactttatctttgccaaggaatacagaggaagtttttcttataaaccaggagcttgtgtgccagcccttgaacttacaaggaaaatgctgacttatgaccggcgctctgagcctcaggttggggagcgagtgccatacgtcatcatttatgggacccccggagtaccacttatccagcttgtaaggcgcccagtggaagtcctgcaggacccaactctgagactgaatgctacttactatattaccaagcaaatccttccacccttggcaagaatcttctcacttattggtattgatgtcttcagctggtatcatgaattaccaaggatccataaagctaccagctcctcgcgaagtgaacctgaagggcggaaaggcactatttcacaatattttactaccttacactgtcctgtgtgtgatgacctaactcagcatggcatctgtagtaaatgtcggagccaacctcagcatgttgcagtcatcctcaaccaagaaatccgggagttggaacgtcaacaggagcaacttgtaaagatatgcaagaactgtacaggttgctttgatcgacacatcccatgtgtttctctgaactgcccagtacttttcaaactctcccgagtaaatagagaattgtccaaggcaccatatctccggcagttattagaccagttttaaattgtcaatatcacagtattacaggtgctatttttttcagtgcttaccactaaactgttgtgcatggtgctttttaactttcatcgagtcaaggatgttcactgtctgttatctgaagactatgaagacttctatgctaaccgaattaaaatgtacttgttgatctctgaatagctcacttcttacaatgtacaaattcctcattctgtcaccttttaaacattgttttataatgcaggtgttggatttgctccagtatgtgtaccatcttgtaaattcatttgagtagatcatgtttacttcccagtggaaggagcactgaaaacctcttaaagaaaaagcatttgtgtgttttccttgaactgtctgtatcaagacgtgttacttcgagatatccattcactttataattttgactgcaaaatattttgtaaatacacttttttacttttcaaacgagcaaaataatgtgcaatgatttttatacaaatgattttcaagttgtttggtatatttcctctaggttttgcttgactcaaagtagatcgttattttgatcaaactgtgcaaacagtagtaccacgtgtagcattttgaaacattatttttttttaaaaaatgctgtcttgctttagctattaatggggcattgtgaggaactgtgcaaagacatttttgttacaaacctgtgggcctgttgcaatactttaaaaataaaaaattttattccatttgcttgttttgtatagacatttctattgcttctaaatatacttaaaatattttctttccttatgtactgtacagttaatcttatttgccatcatcttgaacacaaaatgtgtatttagaatatttgtataactgtgtaaaataaaaaaggaattatgtggtcagtgcattgttttttaaactggaaatcattttgttttaaaagttaataatggaaaccatattaaaattg

SEQ ID NO: 175538 - DNA, 10701 bp, Homo sapiens
  Payload ID: 14477
  Gene Symbol: REV3L
  Gene Name: REV3-like, polymerase (DNA directed), zeta, catalytic subunit
  Uniprot ID: O60673
  ENST ID: ENST00000368802
  CDS Start-End: 324-9716
catcatcatggcaacaagagctgcagcctgggaccgaggagcccgtgtgattcccggcggtggcggcagtggcggcagcaccagcaccgacgaaagctcgagggcttctctcctgcggccccttgccgggtgctcctgaggaggcggcggcagcagcgcctacaccgccccgcccgccgctcctcgaggtgcctctgtgtgaggggagggggccgtgccgagaaggggagggggcgccgccgccgctgcggagggagccgccgccgctgctgctgccgctgccgggtcgccagtgaagggaggcagtggcggcggcggcgaacatgttttcagtaaggatagtgactgcagactactacatggccagcccgctgcaggggctggatacctgccaatcccccctcacccaggcccctgtcaagaaggtgccggtggtgcgagtcttcggagcgaccccggcaggtcagaagacatgtcttcatctacatggcatctttccttacctctatgtgccatacgatggttatggacagcagccagaaagctatctttctcagatggcattcagtatcgacagagcacttaatgtggctttaggcaatccatcttccactgctcagcatgtgttcaaagtgtcattagtatcaggaatgcctttttatggttatcatgagaaggaaagacactttatgaagatctatctttacaatcctacaatggtgaaaaggatatgtgaacttttgcaaagcggagccataatgaataaattttaccagcctcatgaagcgcatattccctacctcctacagctcttcattgactacaatctttatggcatgaatttaataaatctggctgctgtcaagttccgaaaagcaagaaggaaaagtaatacattgcatgcaactggatcctgcaagaatcatttatcaggaaattctcttgctgatactttatttcggtgggaacaagatgaaataccaagctctttaatattggaaggtgttgaaccacagagtacatgtgaattagaagtggatgctgtagctgctgatatcttaaatcgtctggacattgaagctcaaattggtggaaaccctggtctacaggccatatgggaagatgaaaagcaacggcgaagaaacagaaatgaaacttctcaaatgagccaacctgagtcacaagatcacaggtttgtgccagcaacagaaagtgaaaaaaaatttcagaagagacttcaggaaattctcaaacagaatgatttctctgtaacattatcaggatctgtggactacagcgatggatcccaggagttctctgctgagttaacattgcactctgaggttctgtctcctgaaatgcttcagtgtacaccagccaatatggtagaagttcacaaagacaaagagtcaagcaaaggtcacactagacacaaagtggaagaagctcttattaatgaagaagcaattttgaaccttatggaaaatagtcagacttttcagcctttgacccaaagactgagtgagtcacctgttttcatggacagtagtcctgatgaggctctggtacatcttcttgctggtttggaaagtgatggatatcggggggaaagaaataggatgccatcaccatgtcgctcctttggaaataataaatatccacaaaatagtgatgatgaagaaaatgaaccacagattgaaaaagaggaaatggagcttagtttggtgatgtcccagagatgggacagcaatattgaagaacattgtgccaaaaagagatcactgtgcagaaatacccacagaagttcaactgaagatgatgactcatcttcaggagaagaaatggaatggagtgataacagtttgcttctagccagtctttctatacctcagttagatggaactgcagatgaaaatagtgacaatccattgaacaatgaaaattctagaacccactcttctgtaattgcaacaagcaagctttcagttaaaccctccatctttcacaaagatgctgctacattagaaccctcatcttctgctaagattacctttcagtgtaaacacacaagtgccctttcttcccatgttttgaacaaggaagatttaattgaagacctttcacagacaaacaaaaatacagaaaaaggtctagataactcagtcacttcttttacaaacgaaagcacttattctatgaaataccctggatctttaagcagtactgttcattcagaaaattctcataaagagaatagtaagaaagagatcctcccagtatcttcctgtgaaagtagtatttttgattatgaagaagatattccatctgttacaagacaagtaccaagtagaaaatatacaaacattagaaaaatcgaaaaggattccccttttatacatatgcaccgtcaccctaacgagaatacattgggcaaaaattctttcaacttttctgacttaaatcattcaaaaaataaagtatcctctgaaggaaatgaaaaaggaaacagcacagctctgagtagtttattcccttcatcatttactgaaaattgtgaattactgtcatgctcaggggagaatagaactatggtgcattctcttaatagcactgctgatgaaagtggactaaataaacttaaaattaggtatgaagaatttcaagaacataaaacagaaaagccaagcctcagccagcaagcagcacactatatgttttttcccagtgttgttctttctaactgtcttactagaccacagaaactatctcctgtcacatataaattacaacctggcaataaaccatcccggttaaaattgaataaaaggaaacttgcaggtcatcaggagacttctaccaaaagtagtgagactggatccacaaaagataattttatacaaaataatccttgtaatagtaatcctgagaaggataatgcattggctagtgatttaactaaaaccactcgtggagcttttgaaaataaaacacccacagatggttttatagactgtcactttggagatggaacgttagaaactgagcagtcctttggactatatggaaataaatacacacttagagccaaacgcaaggtaaattatgagactgaagacagtgagtcaagttttgtaactcacaactcaaaaattagtctacctcatcccatggaaattggtgaaagtttagatggaactctcaaatcccgaaaacgaagaaaaatgtctaaaaagctgccccctgtcatcataaagtatattattattaatagatttagagggagaaaaaatatgcttgtgaagctaggaaaaatagactctaaagaaaaacaagtaatattaacagaagaaaaaatggaactatataaaaagcttgcacctttgaaggacttttggccaaaagttcccgactcccctgcaaccaaatatcccatttatccactaacaccaaagaaaagtcacagaagaaagtcaaaacataaatctgctaagaaaaaaactggtaaacaacaaaggacaaataatgaaaatattaaaagaactttgtctttcaggaaaaaacggtcacatgctattctttctcctccctcaccatcttacaatgctgaaaccgaagattgtgacctgaattatagtgatgttatgtctaaactaggttttctttctgagagaagcacaagtcccataaattcttctccacctcgctgctggtctcccacagatccaagagctgaagaaatcatggctgctgcagaaaaagaggcaatgctttttaagggtcctaatgtatataagaagactgttaattctcgtataggaaaaactagtcgcgcaagagcacagattaagaaatcaaaagcaaagcttgctaatccctctatagttactaagaaaaggaacaaacgaaatcagacaaataaactagtagatgatggaaaaaagaaaccaagagcaaaacaaaaaacaaatgagaaaggtacatcgagaaagcatacaacacttaaggatgaaaaaataaaatctcagtctggtgctgaggttaagtttgtactgaaacaccagaatgtgtctgaatttgcaagtagttctggaggctctcaactactttttaaacagaaagatatgccactaatgggctctgctgtagatcatcccctttctgcttccctacccactggaattaatgcacaacagaagttatctggctgcttttcttctttcttagaaagcaagaagtctgtagatttgcagacattccccagttcacgagatgatttgcatccatcagttgtttgtaattctataggacctggagtctcaaaaattaatgttcaaaggcctcataatcaaagtgctatgtttactctaaaggaatcaacgttaattcaaaaaaatatatttgacctttccaatcatttatctcaggtagcacagaatacacagatatcttctggtatgtcctcaaagatagaagataatgcaaataatatacaaagaaactatttgtcatcaatcggaaagttaagtgaatatcgcaattccctagaatcaaagctggaccaagcatatacccctaattttttgcattgcaaagacagtcagcagcagattgtgtgcatagcggaacagtcaaagcacagtgaaacttgttctccgggaaatacagcttcagaggaaagccaaatgcctaataattgctttgtaacttccttgagaagtccaatcaaacaaatagcatgggagcaaaagcaaaggggctttattttagatatgtcaaattttaaacctgaaagagtaaaaccgaggtcgttatcagaagcaatttcacaaaccaaagcactttctcagtgtaaaaatcgaaatgtgtcaacaccttcagcatttggtgaaggacagtctggactggcagttctaaaagaattgttacaaaaaagacagcagaaagcacaaaatgcaaatactacacaagacccattatccaataaacatcaaccaaataaaaatatttctggttcccttgagcataacaaagcaaataaacggacacgatcggtaacgtccccaagaaaacctcgaactcccagaagtacaaaacaaaaagaaaaaatccccaaacttctcaaagtagactctttaaatttacaaaactctagccagttggataactctgtatcagatgatagtcccatctttttttcagatccaggctttgaaagttgttactcacttgaagatagtttatctcctgaacataattataattttgatattaacacaataggtcagactggattttgtagcttttattctggaagtcagtttgtcccagctgatcagaatttgcctcagaagttcctaagtgatgctgttcaggatctttttccaggacaagctatagaaaaaaatgagtttttaagtcatgacaaccagaaatgtgatgaagacaagcatcataccacagactcagcctcatggattagatctggtactttaagtcctgaaatttttgagaagtcaaccatagatagcaatgagaatcgtcgccacaaccagtggaaaaatagctttcatcctctaacaactcggtctaactcaataatggattctttctgtgttcagcaggcagaagactgtctaagtgaaaaatctagattgaataggagttcagtaagcaaagaagtgtttcttagcctcccacagccaaacaattcagactggattcaaggtcacaccagaaaagaaatgggacagtctcttgactcagccaatacctcttttactgcaatactctcctcccctgatggtgaacttgtagacgtggcctgtgaagatttagaactgtatgtttcaagaaacaatgatatgttgacaccaactcctgatagttcaccaagatctactagctctccttcacaatctaaaaatggcagcttcacccctcgaactgctaacattctgaaaccacttatgtcccccccaagtagggaagaaattatggcaactttgttggatcatgacctgtctgagactatttaccaggaaccattttgcagtaatccttctgatgtaccagaaaagcccagggagattggtggacggctcctcatggtagaaactcgacttgcaaatgatctggctgagtttgagggagacttttccttggaaggacttcgtctttggaaaacagcattctcagcaatgactcagaatccaaggccagggtcaccccttcgcagtggccaaggagttgtcaataaagggtcaagtaatagccctaagatggttgaagataaaaaaattgtgattatgccttgcaaatgtgccccaagtcgacaactggttcaagtgtggcttcaagccaaagaagaatacgaacgttccaagaaactgcctaaaaccaagccaactggagttgtaaaatctgctgagaactttagctcttcagttaacccagatgacaaacctgtagtgcctccaaaaatggatgtaagtccatgtatactccccactacagcacataccaaggaggatgttgataattctcagattgctttacaagcaccaaccacgggatgtagtcaaactgcaagtgaaagtcagatgctgccaccagttgcctctgcaagtgatcccgaaaaagatgaagatgatgatgataactattacattagttatagctcccctgattctccagtaattcccccttggcaacaaccaatatccccagattccaaagcattaaatggagatgatagaccctcatcaccagtagaggagctgccttcattggcttttgagaacttcttaaagccaataaaagatggtatacaaaaaagcccctgcagtgagcctcaagagcctctagtgatatctccaattaatactagggcaagaactgggaaatgtgaatcactttgctttcatagtacaccaatcatacagagaaaacttctggaaaggcttcctgaagcacctggccttagcccattatcaacagaaccaaaaacacagaagttgagtaataagaaaggaagtaatactgacactcttagaagagtactgttaacacaagcaaagaatcaatttgcagcagtaaataccccacagaaagaaacttctcagattgatggaccatctttaaacaatacttacggtttcaaagtcagcatacaaaacttacaggaggcaaaagctttacatgagatacaaaatcttaccctaatcagtgtggagttgcatgctcgaactagacgagacttagaaccggatcctgaatttgacccaatctgtgctctgttctactgcatctcatctgacactccactgccagatacagaaaaaacagaactcacaggtgtaatagtgattgataaagacaagacagttttcagtcaagatatcagatatcagactccattacttattagatctggaattacaggactcgaagtcacctatgctgctgatgagaaggcactttttcatgaaattgcaaatataataaagaggtatgatcctgatattctgctaggatatgagattcagatgcattcctggggttacctcttacaaagggctgccgctttaagtattgacttatgtcggatgatctctcgggtgccagatgacaaaattgagaacagatttgcagctgaaagagatgagtatggatcatatacaatgagtgagataaatattgttggccgaattacactaaatctttggagaatcatgagaaatgaggtggctctaactaactacacctttgaaaatgtgagctttcatgttcttcatcagcgttttcccctctttacctttcgagtcttgtcagactggtttgataacaagacagatctatacagatggaaaatggttgatcattatgttagccgtgtccgtggaaatctccaaatgttagaacagctggacctgattgggaaaaccagtgagatggctagactttttggcattcagtttttacatgtactgacaaggggttcacagtaccgtgtggaatcaatgatgttgcgtattgctaaaccaatgaactatattcctgtgacacctagtgttcagcaaagatcccagatgagagccccacagtgtgttcctctaattatggagcctgaatcccgcttctatagcaactctgttctcgttttggatttccaatcactttatccttctattgtgattgcatataactactgcttttccacctgccttggccatgtggagaacttgggaaagtatgatgagttcaaatttggctgtacctctctgagagtacctccagatttactttaccaagttaggcatgatatcacagtgtcccccaatggagtagcttttgtcaagccttcagtaagaaaaggtgtactaccaagaatgcttgaagaaattttgaagactagatttatggtgaagcagtcaatgaaggcttacaagcaagacagagccctgtcacgaatgcttgatgcgcgtcagttgggacttaagctgatagcaaatgtcacatttggctatacatctgctaatttttctgggagaatgccatgcattgaggttggcgatagtattgttcacaaagccagagagaccttggaacgagctattaaactggtgaatgataccaagaaatggggggctagggttgtatatggcgatactgacagtatgtttgtgctactgaaaggagccactaaggagcagtcttttaagattggtcaggaaattgccgaagctgtaactgctaccaatcctaaaccagtgaaattgaagtttgaaaaggtatatttgccctgtgttttacaaacaaaaaagaggtatgtgggttacatgtatgaaacactggatcagaaggacccagtatttgatgcaaaaggaatagaaacagtcagaagagattcctgccctgctgtttctaagatacttgagcgttctctaaagctgctatttgaaacgagagatataagtctaattaaacagtatgttcagcgacaatgtatgaagcttctggaaggaaaggccagcatacaagactttatctttgccaaggaatacagaggaagtttttcttataaaccaggagcttgtgtgccagcccttgaacttacaaggaaaatgctgacttatgaccggcgctctgagcctcaggttggggagcgagtgccatacgtcatcatttatgggacccccggagtaccacttatccagcttgtaaggcgcccagtggaagtcctgcaggacccaactctgagactgaatgctacttactatattaccaagcaaatccttccacccttggcaagaatcttctcacttattggtattgatgtcttcagctggtatcatgaattaccaaggatccataaagctaccagctcctcgcgaagtgaacctgaagggcggaaaggcactatttcacaatattttactaccttacactgtcctgtgtgtgatgacctaactcagcatggcatctgtagtaaatgtcggagccaacctcagcatgttgcagtcatcctcaaccaagaaatccgggagttggaacgtcaacaggagcaacttgtaaagatatgcaagaactgtacaggttgctttgatcgacacatcccatgtgtttctctgaactgcccagtacttttcaaactctcccgagtaaatagagaattgtccaaggcaccatatctccggcagttattagaccagttttaaattgtcaatatcacagtattacaggtgctatttttttcagtgcttaccactaaactgttgtgcatggtgctttttaactttcatcgagtcaaggatgttcactgtctgttatctgaagactatgaagacttctatgctaaccgaattaaaatgtacttgttgatctctgaatagctcacttcttacaatgtacaaattcctcattctgtcaccttttaaacattgttttataatgcaggtgttggatttgctccagtatgtgtaccatcttgtaaattcatttgagtagatcatgtttacttcccagtggaaggagcactgaaaacctcttaaagaaaaagcatttgtgtgttttccttgaactgtctgtatcaagacgtgttacttcgagatatccattcactttataattttgactgcaaaatattttgtaaatacacttttttacttttcaaacgagcaaaataatgtgcaatgatttttatacaaatgattttcaagttgtttggtatatttcctctaggttttgcttgactcaaagtagatcgttattttgatcaaactgtgcaaacagtagtaccacgtgtagcattttgaaacattatttttttttaaaaaatgctgtcttgctttagctattaatggggcattgtgaggaactgtgcaaagacatttttgttacaaacctgtgggcctgttgcaatactttaaaaataaaaaattttattccatttgcttgttttgtatagacatttctattgcttctaaatatacttaaaatattttctttccttatgtactgtacagttaatcttatttgccatcatcttgaacacaaaatgtgtatttagaatatttgtataactgtgtaaaataaaaaaggaattatgtggtcagtgcattgttttttaaactggaaatcattttgttttaaaagttaataatggaaaccatattaaaattgaataaaatataaaataatata

SEQ ID NO: 175539 - DNA, 10461 bp, Homo sapiens
  Payload ID: 14477
  Gene Symbol: REV3L
  Gene Name: REV3-like, polymerase (DNA directed), zeta, catalytic subunit
  Uniprot ID: O60673
  ENST ID: ENST00000368805
  CDS Start-End: 84-9476
tggttgcgtccgtgacatcatcatcatggcaacaagagctgccgggtcgccagtgaagggaggcagtggcggcggcggcgaacatgttttcagtaaggatagtgactgcagactactacatggccagcccgctgcaggggctggatacctgccaatcccccctcacccaggcccctgtcaagaaggtgccggtggtgcgagtcttcggagcgaccccggcaggtcagaagacatgtcttcatctacatggcatctttccttacctctatgtgccatacgatggttatggacagcagccagaaagctatctttctcagatggcattcagtatcgacagagcacttaatgtggctttaggcaatccatcttccactgctcagcatgtgttcaaagtgtcattagtatcaggaatgcctttttatggttatcatgagaaggaaagacactttatgaagatctatctttacaatcctacaatggtgaaaaggatatgtgaacttttgcaaagcggagccataatgaataaattttaccagcctcatgaagcgcatattccctacctcctacagctcttcattgactacaatctttatggcatgaatttaataaatctggctgctgtcaagttccgaaaagcaagaaggaaaagtaatacattgcatgcaactggatcctgcaagaatcatttatcaggaaattctcttgctgatactttatttcggtgggaacaagatgaaataccaagctctttaatattggaaggtgttgaaccacagagtacatgtgaattagaagtggatgctgtagctgctgatatcttaaatcgtctggacattgaagctcaaattggtggaaaccctggtctacaggccatatgggaagatgaaaagcaacggcgaagaaacagaaatgaaacttctcaaatgagccaacctgagtcacaagatcacaggtttgtgccagcaacagaaagtgaaaaaaaatttcagaagagacttcaggaaattctcaaacagaatgatttctctgtaacattatcaggatctgtggactacagcgatggatcccaggagttctctgctgagttaacattgcactctgaggttctgtctcctgaaatgcttcagtgtacaccagccaatatggtagaagttcacaaagacaaagagtcaagcaaaggtcacactagacacaaagtggaagaagctcttattaatgaagaagcaattttgaaccttatggaaaatagtcagacttttcagcctttgacccaaagactgagtgagtcacctgttttcatggacagtagtcctgatgaggctctggtacatcttcttgctggtttggaaagtgatggatatcggggggaaagaaataggatgccatcaccatgtcgctcctttggaaataataaatatccacaaaatagtgatgatgaagaaaatgaaccacagattgaaaaagaggaaatggagcttagtttggtgatgtcccagagatgggacagcaatattgaagaacattgtgccaaaaagagatcactgtgcagaaatacccacagaagttcaactgaagatgatgactcatcttcaggagaagaaatggaatggagtgataacagtttgcttctagccagtctttctatacctcagttagatggaactgcagatgaaaatagtgacaatccattgaacaatgaaaattctagaacccactcttctgtaattgcaacaagcaagctttcagttaaaccctccatctttcacaaagatgctgctacattagaaccctcatcttctgctaagattacctttcagtgtaaacacacaagtgccctttcttcccatgttttgaacaaggaagatttaattgaagacctttcacagacaaacaaaaatacagaaaaaggtctagataactcagtcacttcttttacaaacgaaagcacttattctatgaaataccctggatctttaagcagtactgttcattcagaaaattctcataaagagaatagtaagaaagagatcctcccagtatcttcctgtgaaagtagtatttttgattatgaagaagatattccatctgttacaagacaagtaccaagtagaaaatatacaaacattagaaaaatcgaaaaggattccccttttatacatatgcaccgtcaccctaacgagaatacattgggcaaaaattctttcaacttttctgacttaaatcattcaaaaaataaagtatcctctgaaggaaatgaaaaaggaaacagcacagctctgagtagtttattcccttcatcatttactgaaaattgtgaattactgtcatgctcaggggagaatagaactatggtgcattctcttaatagcactgctgatgaaagtggactaaataaacttaaaattaggtatgaagaatttcaagaacataaaacagaaaagccaagcctcagccagcaagcagcacactatatgttttttcccagtgttgttctttctaactgtcttactagaccacagaaactatctcctgtcacatataaattacaacctggcaataaaccatcccggttaaaattgaataaaaggaaacttgcaggtcatcaggagacttctaccaaaagtagtgagactggatccacaaaagataattttatacaaaataatccttgtaatagtaatcctgagaaggataatgcattggctagtgatttaactaaaaccactcgtggagcttttgaaaataaaacacccacagatggttttatagactgtcactttggagatggaacgttagaaactgagcagtcctttggactatatggaaataaatacacacttagagccaaacgcaaggtaaattatgagactgaagacagtgagtcaagttttgtaactcacaactcaaaaattagtctacctcatcccatggaaattggtgaaagtttagatggaactctcaaatcccgaaaacgaagaaaaatgtctaaaaagctgccccctgtcatcataaagtatattattattaatagatttagagggagaaaaaatatgcttgtgaagctaggaaaaatagactctaaagaaaaacaagtaatattaacagaagaaaaaatggaactatataaaaagcttgcacctttgaaggacttttggccaaaagttcccgactcccctgcaaccaaatatcccatttatccactaacaccaaagaaaagtcacagaagaaagtcaaaacataaatctgctaagaaaaaaactggtaaacaacaaaggacaaataatgaaaatattaaaagaactttgtctttcaggaaaaaacggtcacatgctattctttctcctccctcaccatcttacaatgctgaaaccgaagattgtgacctgaattatagtgatgttatgtctaaactaggttttctttctgagagaagcacaagtcccataaattcttctccacctcgctgctggtctcccacagatccaagagctgaagaaatcatggctgctgcagaaaaagaggcaatgctttttaagggtcctaatgtatataagaagactgttaattctcgtataggaaaaactagtcgcgcaagagcacagattaagaaatcaaaagcaaagcttgctaatccctctatagttactaagaaaaggaacaaacgaaatcagacaaataaactagtagatgatggaaaaaagaaaccaagagcaaaacaaaaaacaaatgagaaaggtacatcgagaaagcatacaacacttaaggatgaaaaaataaaatctcagtctggtgctgaggttaagtttgtactgaaacaccagaatgtgtctgaatttgcaagtagttctggaggctctcaactactttttaaacagaaagatatgccactaatgggctctgctgtagatcatcccctttctgcttccctacccactggaattaatgcacaacagaagttatctggctgcttttcttctttcttagaaagcaagaagtctgtagatttgcagacattccccagttcacgagatgatttgcatccatcagttgtttgtaattctataggacctggagtctcaaaaattaatgttcaaaggcctcataatcaaagtgctatgtttactctaaaggaatcaacgttaattcaaaaaaatatatttgacctttccaatcatttatctcaggtagcacagaatacacagatatcttctggtatgtcctcaaagatagaagataatgcaaataatatacaaagaaactatttgtcatcaatcggaaagttaagtgaatatcgcaattccctagaatcaaagctggaccaagcatatacccctaattttttgcattgcaaagacagtcagcagcagattgtgtgcatagcggaacagtcaaagcacagtgaaacttgttctccgggaaatacagcttcagaggaaagccaaatgcctaataattgctttgtaacttccttgagaagtccaatcaaacaaatagcatgggagcaaaagcaaaggggctttattttagatatgtcaaattttaaacctgaaagagtaaaaccgaggtcgttatcagaagcaatttcacaaaccaaagcactttctcagtgtaaaaatcgaaatgtgtcaacaccttcagcatttggtgaaggacagtctggactggcagttctaaaagaattgttacaaaaaagacagcagaaagcacaaaatgcaaatactacacaagacccattatccaataaacatcaaccaaataaaaatatttctggttcccttgagcataacaaagcaaataaacggacacgatcggtaacgtccccaagaaaacctcgaactcccagaagtacaaaacaaaaagaaaaaatccccaaacttctcaaagtagactctttaaatttacaaaactctagccagttggataactctgtatcagatgatagtcccatctttttttcagatccaggctttgaaagttgttactcacttgaagatagtttatctcctgaacataattataattttgatattaacacaataggtcagactggattttgtagcttttattctggaagtcagtttgtcccagctgatcagaatttgcctcagaagttcctaagtgatgctgttcaggatctttttccaggacaagctatagaaaaaaatgagtttttaagtcatgacaaccagaaatgtgatgaagacaagcatcataccacagactcagcctcatggattagatctggtactttaagtcctgaaatttttgagaagtcaaccatagatagcaatgagaatcgtcgccacaaccagtggaaaaatagctttcatcctctaacaactcggtctaactcaataatggattctttctgtgttcagcaggcagaagactgtctaagtgaaaaatctagattgaataggagttcagtaagcaaagaagtgtttcttagcctcccacagccaaacaattcagactggattcaaggtcacaccagaaaagaaatgggacagtctcttgactcagccaatacctcttttactgcaatactctcctcccctgatggtgaacttgtagacgtggcctgtgaagatttagaactgtatgtttcaagaaacaatgatatgttgacaccaactcctgatagttcaccaagatctactagctctccttcacaatctaaaaatggcagcttcacccctcgaactgctaacattctgaaaccacttatgtcccccccaagtagggaagaaattatggcaactttgttggatcatgacctgtctgagactatttaccaggaaccattttgcagtaatccttctgatgtaccagaaaagcccagggagattggtggacggctcctcatggtagaaactcgacttgcaaatgatctggctgagtttgagggagacttttccttggaaggacttcgtctttggaaaacagcattctcagcaatgactcagaatccaaggccagggtcaccccttcgcagtggccaaggagttgtcaataaagggtcaagtaatagccctaagatggttgaagataaaaaaattgtgattatgccttgcaaatgtgccccaagtcgacaactggttcaagtgtggcttcaagccaaagaagaatacgaacgttccaagaaactgcctaaaaccaagccaactggagttgtaaaatctgctgagaactttagctcttcagttaacccagatgacaaacctgtagtgcctccaaaaatggatgtaagtccatgtatactccccactacagcacataccaaggaggatgttgataattctcagattgctttacaagcaccaaccacgggatgtagtcaaactgcaagtgaaagtcagatgctgccaccagttgcctctgcaagtgatcccgaaaaagatgaagatgatgatgataactattacattagttatagctcccctgattctccagtaattcccccttggcaacaaccaatatccccagattccaaagcattaaatggagatgatagaccctcatcaccagtagaggagctgccttcattggcttttgagaacttcttaaagccaataaaagatggtatacaaaaaagcccctgcagtgagcctcaagagcctctagtgatatctccaattaatactagggcaagaactgggaaatgtgaatcactttgctttcatagtacaccaatcatacagagaaaacttctggaaaggcttcctgaagcacctggccttagcccattatcaacagaaccaaaaacacagaagttgagtaataagaaaggaagtaatactgacactcttagaagagtactgttaacacaagcaaagaatcaatttgcagcagtaaataccccacagaaagaaacttctcagattgatggaccatctttaaacaatacttacggtttcaaagtcagcatacaaaacttacaggaggcaaaagctttacatgagatacaaaatcttaccctaatcagtgtggagttgcatgctcgaactagacgagacttagaaccggatcctgaatttgacccaatctgtgctctgttctactgcatctcatctgacactccactgccagatacagaaaaaacagaactcacaggtgtaatagtgattgataaagacaagacagttttcagtcaagatatcagatatcagactccattacttattagatctggaattacaggactcgaagtcacctatgctgctgatgagaaggcactttttcatgaaattgcaaatataataaagaggtatgatcctgatattctgctaggatatgagattcagatgcattcctggggttacctcttacaaagggctgccgctttaagtattgacttatgtcggatgatctctcgggtgccagatgacaaaattgagaacagatttgcagctgaaagagatgagtatggatcatatacaatgagtgagataaatattgttggccgaattacactaaatctttggagaatcatgagaaatgaggtggctctaactaactacacctttgaaaatgtgagctttcatgttcttcatcagcgttttcccctctttacctttcgagtcttgtcagactggtttgataacaagacagatctatacagatggaaaatggttgatcattatgttagccgtgtccgtggaaatctccaaatgttagaacagctggacctgattgggaaaaccagtgagatggctagactttttggcattcagtttttacatgtactgacaaggggttcacagtaccgtgtggaatcaatgatgttgcgtattgctaaaccaatgaactatattcctgtgacacctagtgttcagcaaagatcccagatgagagccccacagtgtgttcctctaattatggagcctgaatcccgcttctatagcaactctgttctcgttttggatttccaatcactttatccttctattgtgattgcatataactactgcttttccacctgccttggccatgtggagaacttgggaaagtatgatgagttcaaatttggctgtacctctctgagagtacctccagatttactttaccaagttaggcatgatatcacagtgtcccccaatggagtagcttttgtcaagccttcagtaagaaaaggtgtactaccaagaatgcttgaagaaattttgaagactagatttatggtgaagcagtcaatgaaggcttacaagcaagacagagccctgtcacgaatgcttgatgcgcgtcagttgggacttaagctgatagcaaatgtcacatttggctatacatctgctaatttttctgggagaatgccatgcattgaggttggcgatagtattgttcacaaagccagagagaccttggaacgagctattaaactggtgaatgataccaagaaatggggggctagggttgtatatggcgatactgacagtatgtttgtgctactgaaaggagccactaaggagcagtcttttaagattggtcaggaaattgccgaagctgtaactgctaccaatcctaaaccagtgaaattgaagtttgaaaaggtatatttgccctgtgttttacaaacaaaaaagaggtatgtgggttacatgtatgaaacactggatcagaaggacccagtatttgatgcaaaaggaatagaaacagtcagaagagattcctgccctgctgtttctaagatacttgagcgttctctaaagctgctatttgaaacgagagatataagtctaattaaacagtatgttcagcgacaatgtatgaagcttctggaaggaaaggccagcatacaagactttatctttgccaaggaatacagaggaagtttttcttataaaccaggagcttgtgtgccagcccttgaacttacaaggaaaatgctgacttatgaccggcgctctgagcctcaggttggggagcgagtgccatacgtcatcatttatgggacccccggagtaccacttatccagcttgtaaggcgcccagtggaagtcctgcaggacccaactctgagactgaatgctacttactatattaccaagcaaatccttccacccttggcaagaatcttctcacttattggtattgatgtcttcagctggtatcatgaattaccaaggatccataaagctaccagctcctcgcgaagtgaacctgaagggcggaaaggcactatttcacaatattttactaccttacactgtcctgtgtgtgatgacctaactcagcatggcatctgtagtaaatgtcggagccaacctcagcatgttgcagtcatcctcaaccaagaaatccgggagttggaacgtcaacaggagcaacttgtaaagatatgcaagaactgtacaggttgctttgatcgacacatcccatgtgtttctctgaactgcccagtacttttcaaactctcccgagtaaatagagaattgtccaaggcaccatatctccggcagttattagaccagttttaaattgtcaatatcacagtattacaggtgctatttttttcagtgcttaccactaaactgttgtgcatggtgctttttaactttcatcgagtcaaggatgttcactgtctgttatctgaagactatgaagacttctatgctaaccgaattaaaatgtacttgttgatctctgaatagctcacttcttacaatgtacaaattcctcattctgtcaccttttaaacattgttttataatgcaggtgttggatttgctccagtatgtgtaccatcttgtaaattcatttgagtagatcatgtttacttcccagtggaaggagcactgaaaacctcttaaagaaaaagcatttgtgtgttttccttgaactgtctgtatcaagacgtgttacttcgagatatccattcactttataattttgactgcaaaatattttgtaaatacacttttttacttttcaaacgagcaaaataatgtgcaatgatttttatacaaatgattttcaagttgtttggtatatttcctctaggttttgcttgactcaaagtagatcgttattttgatcaaactgtgcaaacagtagtaccacgtgtagcattttgaaacattatttttttttaaaaaatgctgtcttgctttagctattaatggggcattgtgaggaactgtgcaaagacatttttgttacaaacctgtgggcctgttgcaatactttaaaaataaaaaattttattccatttgcttgttttgtatagacatttctattgcttctaaatatacttaaaatattttctttccttatgtactgtacagttaatcttatttgccatcatcttgaacacaaaatgtgtatttagaatatttgtataactgtgtaaaataaaaaaggaattatgtggtcagtgcattgttttttaaactggaaatcattttgttttaaaagttaataatggaaaccatattaaaattgaataaaatataaaataatata

SEQ ID NO: 175540 - DNA, 10644 bp, Homo sapiens
  Payload ID: 14477
  Gene Symbol: REV3L
  Gene Name: REV3-like, polymerase (DNA directed), zeta, catalytic subunit
  ENST ID: ENST00000434009
  CDS Start-End: 32-175
gtgaagggaggcagtggcggcggcggcgaacatgttttcagtaaggatagtgactgcagactactacatggccagcccgctgcaggggctggatacctgccaatcccccctcacccaggcccctgtcaagaaggtgccggtggtgcgagtcttcggagcgaccccggcagaataaaacccaagacaagccacataaaagcaacctaaaaattaaactgtcatcatattatttgttttaaaactatggaataatatatctgaggaagatttctctcaaaattgtttttctcaatttcaaattccgggtgtacctgtgcaggtttattacaaaggtatattgcataatgctgaggtttgaagtacgactgaacccgtcacctaggaagtgagcatagtactcaataggtcagaagacatgtcttcatctacatggcatctttccttacctctatgtgccatacgatggttatggacagcagccagaaagctatctttctcagatggcattcagtatcgacagagcacttaatgtggctttaggcaatccatcttccactgctcagcatgtgttcaaagtgtcattagtatcaggaatgcctttttatggttatcatgagaaggaaagacactttatgaagatctatctttacaatcctacaatggtgaaaaggatatgtgaacttttgcaaagcggagccataatgaataaattttaccagcctcatgaagcgcatattccctacctcctacagctcttcattgactacaatctttatggcatgaatttaataaatctggctgctgtcaagttccgaaaagcaagaaggaaaagtaatacattgcatgcaactggatcctgcaagaatcatttatcaggaaattctcttgctgatactttatttcggtgggaacaagatgaaataccaagctctttaatattggaaggtgttgaaccacagagtacatgtgaattagaagtggatgctgtagctgctgatatcttaaatcgtctggacattgaagctcaaattggtggaaaccctggtctacaggccatatgggaagatgaaaagcaacggcgaagaaacagaaatgaaacttctcaaatgagccaacctgagtcacaagatcacaggtttgtgccagcaacagaaagtgaaaaaaaatttcagaagagacttcaggaaattctcaaacagaatgatttctctgtaacattatcaggatctgtggactacagcgatggatcccaggagttctctgctgagttaacattgcactctgaggttctgtctcctgaaatgcttcagtgtacaccagccaatatggtagaagttcacaaagacaaagagtcaagcaaaggtcacactagacacaaagtggaagaagctcttattaatgaagaagcaattttgaaccttatggaaaatagtcagacttttcagcctttgacccaaagactgagtgagtcacctgttttcatggacagtagtcctgatgaggctctggtacatcttcttgctggtttggaaagtgatggatatcggggggaaagaaataggatgccatcaccatgtcgctcctttggaaataataaatatccacaaaatagtgatgatgaagaaaatgaaccacagattgaaaaagaggaaatggagcttagtttggtgatgtcccagagatgggacagcaatattgaagaacattgtgccaaaaagagatcactgtgcagaaatacccacagaagttcaactgaagatgatgactcatcttcaggagaagaaatggaatggagtgataacagtttgcttctagccagtctttctatacctcagttagatggaactgcagatgaaaatagtgacaatccattgaacaatgaaaattctagaacccactcttctgtaattgcaacaagcaagctttcagttaaaccctccatctttcacaaagatgctgctacattagaaccctcatcttctgctaagattacctttcagtgtaaacacacaagtgccctttcttcccatgttttgaacaaggaagatttaattgaagacctttcacagacaaacaaaaatacagaaaaaggtctagataactcagtcacttcttttacaaacgaaagcacttattctatgaaataccctggatctttaagcagtactgttcattcagaaaattctcataaagagaatagtaagaaagagatcctcccagtatcttcctgtgaaagtagtatttttgattatgaagaagatattccatctgttacaagacaagtaccaagtagaaaatatacaaacattagaaaaatcgaaaaggattccccttttatacatatgcaccgtcaccctaacgagaatacattgggcaaaaattctttcaacttttctgacttaaatcattcaaaaaataaagtatcctctgaaggaaatgaaaaaggaaacagcacagctctgagtagtttattcccttcatcatttactgaaaattgtgaattactgtcatgctcaggggagaatagaactatggtgcattctcttaatagcactgctgatgaaagtggactaaataaacttaaaattaggtatgaagaatttcaagaacataaaacagaaaagccaagcctcagccagcaagcagcacactatatgttttttcccagtgttgttctttctaactgtcttactagaccacagaaactatctcctgtcacatataaattacaacctggcaataaaccatcccggttaaaattgaataaaaggaaacttgcaggtcatcaggagacttctaccaaaagtagtgagactggatccacaaaagataattttatacaaaataatccttgtaatagtaatcctgagaaggataatgcattggctagtgatttaactaaaaccactcgtggagcttttgaaaataaaacacccacagatggttttatagactgtcactttggagatggaacgttagaaactgagcagtcctttggactatatggaaataaatacacacttagagccaaacgcaaggtaaattatgagactgaagacagtgagtcaagttttgtaactcacaactcaaaaattagtctacctcatcccatggaaattggtgaaagtttagatggaactctcaaatcccgaaaacgaagaaaaatgtctaaaaagctgccccctgtcatcataaagtatattattattaatagatttagagggagaaaaaatatgcttgtgaagctaggaaaaatagactctaaagaaaaacaagtaatattaacagaagaaaaaatggaactatataaaaagcttgcacctttgaaggacttttggccaaaagttcccgactcccctgcaaccaaatatcccatttatccactaacaccaaagaaaagtcacagaagaaagtcaaaacataaatctgctaagaaaaaaactggtaaacaacaaaggacaaataatgaaaatattaaaagaactttgtctttcaggaaaaaacggtcacatgctattctttctcctccctcaccatcttacaatgctgaaaccgaagattgtgacctgaattatagtgatgttatgtctaaactaggttttctttctgagagaagcacaagtcccataaattcttctccacctcgctgctggtctcccacagatccaagagctgaagaaatcatggctgctgcagaaaaagaggcaatgctttttaagggtcctaatgtatataagaagactgttaattctcgtataggaaaaactagtcgcgcaagagcacagattaagaaatcaaaagcaaagcttgctaatccctctatagttactaagaaaaggaacaaacgaaatcagacaaataaactagtagatgatggaaaaaagaaaccaagagcaaaacaaaaaacaaatgagaaaggtacatcgagaaagcatacaacacttaaggatgaaaaaataaaatctcagtctggtgctgaggttaagtttgtactgaaacaccagaatgtgtctgaatttgcaagtagttctggaggctctcaactactttttaaacagaaagatatgccactaatgggctctgctgtagatcatcccctttctgcttccctacccactggaattaatgcacaacagaagttatctggctgcttttcttctttcttagaaagcaagaagtctgtagatttgcagacattccccagttcacgagatgatttgcatccatcagttgtttgtaattctataggacctggagtctcaaaaattaatgttcaaaggcctcataatcaaagtgctatgtttactctaaaggaatcaacgttaattcaaaaaaatatatttgacctttccaatcatttatctcaggtagcacagaatacacagatatcttctggtatgtcctcaaagatagaagataatgcaaataatatacaaagaaactatttgtcatcaatcggaaagttaagtgaatatcgcaattccctagaatcaaagctggaccaagcatatacccctaattttttgcattgcaaagacagtcagcagcagattgtgtgcatagcggaacagtcaaagcacagtgaaacttgttctccgggaaatacagcttcagaggaaagccaaatgcctaataattgctttgtaacttccttgagaagtccaatcaaacaaatagcatgggagcaaaagcaaaggggctttattttagatatgtcaaattttaaacctgaaagagtaaaaccgaggtcgttatcagaagcaatttcacaaaccaaagcactttctcagtgtaaaaatcgaaatgtgtcaacaccttcagcatttggtgaaggacagtctggactggcagttctaaaagaattgttacaaaaaagacagcagaaagcacaaaatgcaaatactacacaagacccattatccaataaacatcaaccaaataaaaatatttctggttcccttgagcataacaaagcaaataaacggacacgatcggtaacgtccccaagaaaacctcgaactcccagaagtacaaaacaaaaagaaaaaatccccaaacttctcaaagtagactctttaaatttacaaaactctagccagttggataactctgtatcagatgatagtcccatctttttttcagatccaggctttgaaagttgttactcacttgaagatagtttatctcctgaacataattataattttgatattaacacaataggtcagactggattttgtagcttttattctggaagtcagtttgtcccagctgatcagaatttgcctcagaagttcctaagtgatgctgttcaggatctttttccaggacaagctatagaaaaaaatgagtttttaagtcatgacaaccagaaatgtgatgaagacaagcatcataccacagactcagcctcatggattagatctggtactttaagtcctgaaatttttgagaagtcaaccatagatagcaatgagaatcgtcgccacaaccagtggaaaaatagctttcatcctctaacaactcggtctaactcaataatggattctttctgtgttcagcaggcagaagactgtctaagtgaaaaatctagattgaataggagttcagtaagcaaagaagtgtttcttagcctcccacagccaaacaattcagactggattcaaggtcacaccagaaaagaaatgggacagtctcttgactcagccaatacctcttttactgcaatactctcctcccctgatggtgaacttgtagacgtggcctgtgaagatttagaactgtatgtttcaagaaacaatgatatgttgacaccaactcctgatagttcaccaagatctactagctctccttcacaatctaaaaatggcagcttcacccctcgaactgctaacattctgaaaccacttatgtcccccccaagtagggaagaaattatggcaactttgttggatcatgacctgtctgagactatttaccaggaaccattttgcagtaatccttctgatgtaccagaaaagcccagggagattggtggacggctcctcatggtagaaactcgacttgcaaatgatctggctgagtttgagggagacttttccttggaaggacttcgtctttggaaaacagcattctcagcaatgactcagaatccaaggccagggtcaccccttcgcagtggccaaggagttgtcaataaagggtcaagtaatagccctaagatggttgaagataaaaaaattgtgattatgccttgcaaatgtgccccaagtcgacaactggttcaagtgtggcttcaagccaaagaagaatacgaacgttccaagaaactgcctaaaaccaagccaactggagttgtaaaatctgctgagaactttagctcttcagttaacccagatgacaaacctgtagtgcctccaaaaatggatgtaagtccatgtatactccccactacagcacataccaaggaggatgttgataattctcagattgctttacaagcaccaaccacgggatgtagtcaaactgcaagtgaaagtcagatgctgccaccagttgcctctgcaagtgatcccgaaaaagatgaagatgatgatgataactattacattagttatagctcccctgattctccagtaattcccccttggcaacaaccaatatccccagattccaaagcattaaatggagatgatagaccctcatcaccagtagaggagctgccttcattggcttttgagaacttcttaaagccaataaaagatggtatacaaaaaagcccctgcagtgagcctcaagagcctctagtgatatctccaattaatactagggcaagaactgggaaatgtgaatcactttgctttcatagtacaccaatcatacagagaaaacttctggaaaggcttcctgaagcacctggccttagcccattatcaacagaaccaaaaacacagaagttgagtaataagaaaggaagtaatactgacactcttagaagagtactgttaacacaagcaaagaatcaatttgcagcagtaaataccccacagaaagaaacttctcagattgatggaccatctttaaacaatacttacggtttcaaagtcagcatacaaaacttacaggaggcaaaagctttacatgagatacaaaatcttaccctaatcagtgtggagttgcatgctcgaactagacgagacttagaaccggatcctgaatttgacccaatctgtgctctgttctactgcatctcatctgacactccactgccagatacagaaaaaacagaactcacaggtgtaatagtgattgataaagacaagacagttttcagtcaagatatcagatatcagactccattacttattagatctggaattacaggactcgaagtcacctatgctgctgatgagaaggcactttttcatgaaattgcaaatataataaagaggtatgatcctgatattctgctaggatatgagattcagatgcattcctggggttacctcttacaaagggctgccgctttaagtattgacttatgtcggatgatctctcgggtgccagatgacaaaattgagaacagatttgcagctgaaagagatgagtatggatcatatacaatgagtgagataaatattgttggccgaattacactaaatctttggagaatcatgagaaatgaggtggctctaactaactacacctttgaaaatgtgagctttcatgttcttcatcagcgttttcccctctttacctttcgagtcttgtcagactggtttgataacaagacagatctatacagatggaaaatggttgatcattatgttagccgtgtccgtggaaatctccaaatgttagaacagctggacctgattgggaaaaccagtgagatggctagactttttggcattcagtttttacatgtactgacaaggggttcacagtaccgtgtggaatcaatgatgttgcgtattgctaaaccaatgaactatattcctgtgacacctagtgttcagcaaagatcccagatgagagccccacagtgtgttcctctaattatggagcctgaatcccgcttctatagcaactctgttctcgttttggatttccaatcactttatccttctattgtgattgcatataactactgcttttccacctgccttggccatgtggagaacttgggaaagtatgatgagttcaaatttggctgtacctctctgagagtacctccagatttactttaccaagttaggcatgatatcacagtgtcccccaatggagtagcttttgtcaagccttcagtaagaaaaggtgtactaccaagaatgcttgaagaaattttgaagactagatttatggtgaagcagtcaatgaaggcttacaagcaagacagagccctgtcacgaatgcttgatgcgcgtcagttgggacttaagctgatagcaaatgtcacatttggctatacatctgctaatttttctgggagaatgccatgcattgaggttggcgatagtattgttcacaaagccagagagaccttggaacgagctattaaactggtgaatgataccaagaaatggggggctagggttgtatatggcgatactgacagtatgtttgtgctactgaaaggagccactaaggagcagtcttttaagattggtcaggaaattgccgaagctgtaactgctaccaatcctaaaccagtgaaattgaagtttgaaaaggtatatttgccctgtgttttacaaacaaaaaagaggtatgtgggttacatgtatgaaacactggatcagaaggacccagtatttgatgcaaaaggaatagaaacagtcagaagagattcctgccctgctgtttctaagatacttgagcgttctctaaagctgctatttgaaacgagagatataagtctaattaaacagtatgttcagcgacaatgtatgaagcttctggaaggaaaggccagcatacaagactttatctttgccaaggaatacagaggaagtttttcttataaaccaggagcttgtgtgccagcccttgaacttacaaggaaaatgctgacttatgaccggcgctctgagcctcaggttggggagcgagtgccatacgtcatcatttatgggacccccggagtaccacttatccagcttgtaaggcgcccagtggaagtcctgcaggacccaactctgagactgaatgctacttactatattaccaagcaaatccttccacccttggcaagaatcttctcacttattggtattgatgtcttcagctggtatcatgaattaccaaggatccataaagctaccagctcctcgcgaagtgaacctgaagggcggaaaggcactatttcacaatattttactaccttacactgtcctgtgtgtgatgacctaactcagcatggcatctgtagtaaatgtcggagccaacctcagcatgttgcagtcatcctcaaccaagaaatccgggagttggaacgtcaacaggagcaacttgtaaagatatgcaagaactgtacaggttgctttgatcgacacatcccatgtgtttctctgaactgcccagtacttttcaaactctcccgagtaaatagagaattgtccaaggcaccatatctccggcagttattagaccagttttaaattgtcaatatcacagtattacaggtgctatttttttcagtgcttaccactaaactgttgtgcatggtgctttttaactttcatcgagtcaaggatgttcactgtctgttatctgaagactatgaagacttctatgctaaccgaattaaaatgtacttgttgatctctgaatagctcacttcttacaatgtacaaattcctcattctgtcaccttttaaacattgttttataatgcaggtgttggatttgctccagtatgtgtaccatcttgtaaattcatttgagtagatcatgtttacttcccagtggaaggagcactgaaaacctcttaaagaaaaagcatttgtgtgttttccttgaactgtctgtatcaagacgtgttacttcgagatatccattcactttataattttgactgcaaaatattttgtaaatacacttttttacttttcaaacgagcaaaataatgtgcaatgatttttatacaaatgattttcaagttgtttggtatatttcctctaggttttgcttgactcaaagtagatcgttattttgatcaaactgtgcaaacagtagtaccacgtgtagcattttgaaacattatttttttttaaaaaatgctgtcttgctttagctattaatggggcattgtgaggaactgtgcaaagacatttttgttacaaacctgtgggcctgttgcaatactttaaaaataaaaaattttattccatttgcttgttttgtatagacatttctattgcttctaaatatacttaaaatattttctttccttatgtactgtacagttaatcttatttgccatcatcttgaacacaaaatgtgtatttagaatatttgtataactgtgtaaaataaaaaaggaattatgtggtcagtgcattgttttttaaactggaaatcattttgttttaaaagttaataatggaaaccatattaaaattgaataaaatataaaataatata

SEQ ID NO: 175541 - DNA, 10964 bp, Homo sapiens
  Payload ID: 14477
  Gene Symbol: REV3L
  Gene Name: REV3-like, polymerase (DNA directed), zeta, catalytic subunit
  ENST ID: ENST00000422377
  CDS Start-End: 459-602
gcacgagatctgcgcctcgcctccctcctcacgcgggcggattttcttaccttgtgaaaaaccgtctcagcggctgcccccgcctcctctgctggatgtgaaatggcggtcggcgagtggttgcgtccgtgacatcatcatcatggcaacaagagctgcagcctgggaccgaggagcccgtgtgattcccggcggtggcggcagtggcggcagcaccagcaccgacgaaagctcgagggcttctctcctgcggccccttgccgggtgctcctgaggaggcggcggcagcagcgcctacaccgccccgcccgccgctcctcgaggtgcctctgtgtgaggggagggggccgtgccgagaaggggagggggcgccgccgccgctgcggagggagccgccgccgctgctgctgccgctgccgggtcgccagtgaagggaggcagtggcggcggcggcgaacatgttttcagtaaggatagtgactgcagactactacatggccagcccgctgcaggggctggatacctgccaatcccccctcacccaggcccctgtcaagaaggtgccggtggtgcgagtcttcggagcgaccccggcagaataaaacccaagacaagccacataaaagcaacctaaaaattaaactgtcatcatattatttgttttaaaactatggaataatatatctgaggaagatttctctcaaaattgtttttctcaatttcaagtcagaagacatgtcttcatctacatggcatctttccttacctctatgtgccatacgatggttatggacagcagccagaaagctatctttctcagatggcattcagtatcgacagagcacttaatgtggctttaggcaatccatcttccactgctcagcatgtgttcaaagtgtcattagtatcaggaatgcctttttatggttatcatgagaaggaaagacactttatgaagatctatctttacaatcctacaatggtgaaaaggatatgtgaacttttgcaaagcggagccataatgaataaattttaccagcctcatgaagcgcatattccctacctcctacagctcttcattgactacaatctttatggcatgaatttaataaatctggctgctgtcaagttccgaaaagcaagaaggaaaagtaatacattgcatgcaactggatcctgcaagaatcatttatcaggaaattctcttgctgatactttatttcggtgggaacaagatgaaataccaagctctttaatattggaaggtgttgaaccacagagtacatgtgaattagaagtggatgctgtagctgctgatatcttaaatcgtctggacattgaagctcaaattggtggaaaccctggtctacaggccatatgggaagatgaaaagcaacggcgaagaaacagaaatgaaacttctcaaatgagccaacctgagtcacaagatcacaggtttgtgccagcaacagaaagtgaaaaaaaatttcagaagagacttcaggaaattctcaaacagaatgatttctctgtaacattatcaggatctgtggactacagcgatggatcccaggagttctctgctgagttaacattgcactctgaggttctgtctcctgaaatgcttcagtgtacaccagccaatatggtagaagttcacaaagacaaagagtcaagcaaaggtcacactagacacaaagtggaagaagctcttattaatgaagaagcaattttgaaccttatggaaaatagtcagacttttcagcctttgacccaaagactgagtgagtcacctgttttcatggacagtagtcctgatgaggctctggtacatcttcttgctggtttggaaagtgatggatatcggggggaaagaaataggatgccatcaccatgtcgctcctttggaaataataaatatccacaaaatagtgatgatgaagaaaatgaaccacagattgaaaaagaggaaatggagcttagtttggtgatgtcccagagatgggacagcaatattgaagaacattgtgccaaaaagagatcactgtgcagaaatacccacagaagttcaactgaagatgatgactcatcttcaggagaagaaatggaatggagtgataacagtttgcttctagccagtctttctatacctcagttagatggaactgcagatgaaaatagtgacaatccattgaacaatgaaaattctagaacccactcttctgtaattgcaacaagcaagctttcagttaaaccctccatctttcacaaagatgctgctacattagaaccctcatcttctgctaagattacctttcagtgtaaacacacaagtgccctttcttcccatgttttgaacaaggaagatttaattgaagacctttcacagacaaacaaaaatacagaaaaaggtctagataactcagtcacttcttttacaaacgaaagcacttattctatgaaataccctggatctttaagcagtactgttcattcagaaaattctcataaagagaatagtaagaaagagatcctcccagtatcttcctgtgaaagtagtatttttgattatgaagaagatattccatctgttacaagacaagtaccaagtagaaaatatacaaacattagaaaaatcgaaaaggattccccttttatacatatgcaccgtcaccctaacgagaatacattgggcaaaaattctttcaacttttctgacttaaatcattcaaaaaataaagtatcctctgaaggaaatgaaaaaggaaacagcacagctctgagtagtttattcccttcatcatttactgaaaattgtgaattactgtcatgctcaggggagaatagaactatggtgcattctcttaatagcactgctgatgaaagtggactaaataaacttaaaattaggtatgaagaatttcaagaacataaaacagaaaagccaagcctcagccagcaagcagcacactatatgttttttcccagtgttgttctttctaactgtcttactagaccacagaaactatctcctgtcacatataaattacaacctggcaataaaccatcccggttaaaattgaataaaaggaaacttgcaggtcatcaggagacttctaccaaaagtagtgagactggatccacaaaagataattttatacaaaataatccttgtaatagtaatcctgagaaggataatgcattggctagtgatttaactaaaaccactcgtggagcttttgaaaataaaacacccacagatggttttatagactgtcactttggagatggaacgttagaaactgagcagtcctttggactatatggaaataaatacacacttagagccaaacgcaaggtaaattatgagactgaagacagtgagtcaagttttgtaactcacaactcaaaaattagtctacctcatcccatggaaattggtgaaagtttagatggaactctcaaatcccgaaaacgaagaaaaatgtctaaaaagctgccccctgtcatcataaagtatattattattaatagatttagagggagaaaaaatatgcttgtgaagctaggaaaaatagactctaaagaaaaacaagtaatattaacagaagaaaaaatggaactatataaaaagcttgcacctttgaaggacttttggccaaaagttcccgactcccctgcaaccaaatatcccatttatccactaacaccaaagaaaagtcacagaagaaagtcaaaacataaatctgctaagaaaaaaactggtaaacaacaaaggacaaataatgaaaatattaaaagaactttgtctttcaggaaaaaacggtcacatgctattctttctcctccctcaccatcttacaatgctgaaaccgaagattgtgacctgaattatagtgatgttatgtctaaactaggttttctttctgagagaagcacaagtcccataaattcttctccacctcgctgctggtctcccacagatccaagagctgaagaaatcatggctgctgcagaaaaagaggcaatgctttttaagggtcctaatgtatataagaagactgttaattctcgtataggaaaaactagtcgcgcaagagcacagattaagaaatcaaaagcaaagcttgctaatccctctatagttactaagaaaaggaacaaacgaaatcagacaaataaactagtagatgatggaaaaaagaaaccaagagcaaaacaaaaaacaaatgagaaaggtacatcgagaaagcatacaacacttaaggatgaaaaaataaaatctcagtctggtgctgaggttaagtttgtactgaaacaccagaatgtgtctgaatttgcaagtagttctggaggctctcaactactttttaaacagaaagatatgccactaatgggctctgctgtagatcatcccctttctgcttccctacccactggaattaatgcacaacagaagttatctggctgcttttcttctttcttagaaagcaagaagtctgtagatttgcagacattccccagttcacgagatgatttgcatccatcagttgtttgtaattctataggacctggagtctcaaaaattaatgttcaaaggcctcataatcaaagtgctatgtttactctaaaggaatcaacgttaattcaaaaaaatatatttgacctttccaatcatttatctcaggtagcacagaatacacagatatcttctggtatgtcctcaaagatagaagataatgcaaataatatacaaagaaactatttgtcatcaatcggaaagttaagtgaatatcgcaattccctagaatcaaagctggaccaagcatatacccctaattttttgcattgcaaagacagtcagcagcagattgtgtgcatagcggaacagtcaaagcacagtgaaacttgttctccgggaaatacagcttcagaggaaagccaaatgcctaataattgctttgtaacttccttgagaagtccaatcaaacaaatagcatgggagcaaaagcaaaggggctttattttagatatgtcaaattttaaacctgaaagagtaaaaccgaggtcgttatcagaagcaatttcacaaaccaaagcactttctcagtgtaaaaatcgaaatgtgtcaacaccttcagcatttggtgaaggacagtctggactggcagttctaaaagaattgttacaaaaaagacagcagaaagcacaaaatgcaaatactacacaagacccattatccaataaacatcaaccaaataaaaatatttctggttcccttgagcataacaaagcaaataaacggacacgatcggtaacgtccccaagaaaacctcgaactcccagaagtacaaaacaaaaagaaaaaatccccaaacttctcaaagtagactctttaaatttacaaaactctagccagttggataactctgtatcagatgatagtcccatctttttttcagatccaggctttgaaagttgttactcacttgaagatagtttatctcctgaacataattataattttgatattaacacaataggtcagactggattttgtagcttttattctggaagtcagtttgtcccagctgatcagaatttgcctcagaagttcctaagtgatgctgttcaggatctttttccaggacaagctatagaaaaaaatgagtttttaagtcatgacaaccagaaatgtgatgaagacaagcatcataccacagactcagcctcatggattagatctggtactttaagtcctgaaatttttgagaagtcaaccatagatagcaatgagaatcgtcgccacaaccagtggaaaaatagctttcatcctctaacaactcggtctaactcaataatggattctttctgtgttcagcaggcagaagactgtctaagtgaaaaatctagattgaataggagttcagtaagcaaagaagtgtttcttagcctcccacagccaaacaattcagactggattcaaggtcacaccagaaaagaaatgggacagtctcttgactcagccaatacctcttttactgcaatactctcctcccctgatggtgaacttgtagacgtggcctgtgaagatttagaactgtatgtttcaagaaacaatgatatgttgacaccaactcctgatagttcaccaagatctactagctctccttcacaatctaaaaatggcagcttcacccctcgaactgctaacattctgaaaccacttatgtcccccccaagtagggaagaaattatggcaactttgttggatcatgacctgtctgagactatttaccaggaaccattttgcagtaatccttctgatgtaccagaaaagcccagggagattggtggacggctcctcatggtagaaactcgacttgcaaatgatctggctgagtttgagggagacttttccttggaaggacttcgtctttggaaaacagcattctcagcaatgactcagaatccaaggccagggtcaccccttcgcagtggccaaggagttgtcaataaagggtcaagtaatagccctaagatggttgaagataaaaaaattgtgattatgccttgcaaatgtgccccaagtcgacaactggttcaagtgtggcttcaagccaaagaagaatacgaacgttccaagaaactgcctaaaaccaagccaactggagttgtaaaatctgctgagaactttagctcttcagttaacccagatgacaaacctgtagtgcctccaaaaatggatgtaagtccatgtatactccccactacagcacataccaaggaggatgttgataattctcagattgctttacaagcaccaaccacgggatgtagtcaaactgcaagtgaaagtcagatgctgccaccagttgcctctgcaagtgatcccgaaaaagatgaagatgatgatgataactattacattagttatagctcccctgattctccagtaattcccccttggcaacaaccaatatccccagattccaaagcattaaatggagatgatagaccctcatcaccagtagaggagctgccttcattggcttttgagaacttcttaaagccaataaaagatggtatacaaaaaagcccctgcagtgagcctcaagagcctctagtgatatctccaattaatactagggcaagaactgggaaatgtgaatcactttgctttcatagtacaccaatcatacagagaaaacttctggaaaggcttcctgaagcacctggccttagcccattatcaacagaaccaaaaacacagaagttgagtaataagaaaggaagtaatactgacactcttagaagagtactgttaacacaagcaaagaatcaatttgcagcagtaaataccccacagaaagaaacttctcagattgatggaccatctttaaacaatacttacggtttcaaagtcagcatacaaaacttacaggaggcaaaagctttacatgagatacaaaatcttaccctaatcagtgtggagttgcatgctcgaactagacgagacttagaaccggatcctgaatttgacccaatctgtgctctgttctactgcatctcatctgacactccactgccagatacagaaaaaacagaactcacaggtgtaatagtgattgataaagacaagacagttttcagtcaagatatcagatatcagactccattacttattagatctggaattacaggactcgaagtcacctatgctgctgatgagaaggcactttttcatgaaattgcaaatataataaagaggtatgatcctgatattctgctaggatatgagattcagatgcattcctggggttacctcttacaaagggctgccgctttaagtattgacttatgtcggatgatctctcgggtgccagatgacaaaattgagaacagatttgcagctgaaagagatgagtatggatcatatacaatgagtgagataaatattgttggccgaattacactaaatctttggagaatcatgagaaatgaggtggctctaactaactacacctttgaaaatgtgagctttcatgttcttcatcagcgttttcccctctttacctttcgagtcttgtcagactggtttgataacaagacagatctatacagatggaaaatggttgatcattatgttagccgtgtccgtggaaatctccaaatgttagaacagctggacctgattgggaaaaccagtgagatggctagactttttggcattcagtttttacatgtactgacaaggggttcacagtaccgtgtggaatcaatgatgttgcgtattgctaaaccaatgaactatattcctgtgacacctagtgttcagcaaagatcccagatgagagccccacagtgtgttcctctaattatggagcctgaatcccgcttctatagcaactctgttctcgttttggatttccaatcactttatccttctattgtgattgcatataactactgcttttccacctgccttggccatgtggagaacttgggaaagtatgatgagttcaaatttggctgtacctctctgagagtacctccagatttactttaccaagttaggcatgatatcacagtgtcccccaatggagtagcttttgtcaagccttcagtaagaaaaggtgtactaccaagaatgcttgaagaaattttgaagactagatttatggtgaagcagtcaatgaaggcttacaagcaagacagagccctgtcacgaatgcttgatgcgcgtcagttgggacttaagctgatagcaaatgtcacatttggctatacatctgctaatttttctgggagaatgccatgcattgaggttggcgatagtattgttcacaaagccagagagaccttggaacgagctattaaactggtgaatgataccaagaaatggggggctagggttgtatatggcgatactgacagtatgtttgtgctactgaaaggagccactaaggagcagtcttttaagattggtcaggaaattgccgaagctgtaactgctaccaatcctaaaccagtgaaattgaagtttgaaaaggtatatttgccctgtgttttacaaacaaaaaagaggtatgtgggttacatgtatgaaacactggatcagaaggacccagtatttgatgcaaaaggaatagaaacagtcagaagagattcctgccctgctgtttctaagatacttgagcgttctctaaagctgctatttgaaacgagagatataagtctaattaaacagtatgttcagcgacaatgtatgaagcttctggaaggaaaggccagcatacaagactttatctttgccaaggaatacagaggaagtttttcttataaaccaggagcttgtgtgccagcccttgaacttacaaggaaaatgctgacttatgaccggcgctctgagcctcaggttggggagcgagtgccatacgtcatcatttatgggacccccggagtaccacttatccagcttgtaaggcgcccagtggaagtcctgcaggacccaactctgagactgaatgctacttactatattaccaagcaaatccttccacccttggcaagaatcttctcacttattggtattgatgtcttcagctggtatcatgaattaccaaggatccataaagctaccagctcctcgcgaagtgaacctgaagggcggaaaggcactatttcacaatattttactaccttacactgtcctgtgtgtgatgacctaactcagcatggcatctgtagtaaatgtcggagccaacctcagcatgttgcagtcatcctcaaccaagaaatccgggagttggaacgtcaacaggagcaacttgtaaagatatgcaagaactgtacaggttgctttgatcgacacatcccatgtgtttctctgaactgcccagtacttttcaaactctcccgagtaaatagagaattgtccaaggcaccatatctccggcagttattagaccagttttaaattgtcaatatcacagtattacaggtgctatttttttcagtgcttaccactaaactgttgtgcatggtgctttttaactttcatcgagtcaaggatgttcactgtctgttatctgaagactatgaagacttctatgctaaccgaattaaaatgtacttgttgatctctgaatagctcacttcttacaatgtacaaattcctcattctgtcaccttttaaacattgttttataatgcaggtgttggatttgctccagtatgtgtaccatcttgtaaattcatttgagtagatcatgtttacttcccagtggaaggagcactgaaaacctcttaaagaaaaagcatttgtgtgttttccttgaactgtctgtatcaagacgtgttacttcgagatatccattcactttataattttgactgcaaaatattttgtaaatacacttttttacttttcaaacgagcaaaataatgtgcaatgatttttatacaaatgattttcaagttgtttggtatatttcctctaggttttgcttgactcaaagtagatcgttattttgatcaaactgtgcaaacagtagtaccacgtgtagcattttgaaacattatttttttttaaaaaatgctgtcttgctttagctattaatggggcattgtgaggaactgtgcaaagacatttttgttacaaacctgtgggcctgttgcaatactttaaaaataaaaaattttattccatttgcttgttttgtatagacatttctattgcttctaaatatacttaaaatattttctttccttatgtactgtacagttaatcttatttgccatcatcttgaacacaaaatgtgtatttagaatatttgtataactgtgtaaaataaaaaaggaattatgtggtcagtgcattgttttttaaactggaaatcattttgttttaaaagttaataatggaaaccatattaaaattgaataaaatataaaataatata

SEQ ID NO: 175542 - DNA, 891 bp, Homo sapiens
  Payload ID: 14477
  Gene Symbol: REV3L
  Gene Name: REV3-like, polymerase (DNA directed), zeta, catalytic subunit
  ENST ID: ENST00000413831
  CDS Start-End: 1-555
agaccctcatcaccagtagaggagctgccttcattggcttttgagaacttcttaaagccaataaaagatggtatacaaaaaagcccctgcagtgagcctcaagagcctctagtgatatctccaattaatactagggcaagaactgggaaatgtgaatcactttgctttcatagtacaccaatcatacagagaaaacttctggaaaggcttcctgaagcacctggccttagcccattatcaacagaaccaaaaacacagaagttgagtaataagaaaggaagtaatactgacactcttagaagagtactgttaacacaagcaaagaatcaatttgcagcagtaaataccccacagaaagaaacttctcagattgatggaccatctttaaacaatacttacggtttcaaagtcagcatacaaaacttacaggaggcaaaagctttacatgagatatcagatatcagactccattacttattagatctggaattacaggactcgaagtcacctatgctgctgatgagaaggcactttttcatgaaattgcaaatataataaagaggtatgatcctgatattctgctaggatatgagattcagatgcattcctggggttacctcttacaaagggctgccgctttaagtattgacttatgtcggatgatctctcgggtgccagatgacaaaattgagaacagatttgcagctgaaagagatgagtatggatcatatacaatgagtgagataaatattgttggccgaattacactaaatctttggagaatcatgagaaatgaggtggctctaactaactacacctttgaaaatgtgagctttcatgttcttcatcagcgttttcccctctttacctttcgagtcttgtcagactggt

SEQ ID NO: 175543 - DNA, 10943 bp, Homo sapiens
  Payload ID: 14477
  Gene Symbol: REV3L
  Gene Name: REV3-like, polymerase (DNA directed), zeta, catalytic subunit
  Uniprot ID: O60673
  ENST ID: ENST00000435970
  CDS Start-End: 821-9979
gcacgagatctgcgcctcgcctccctcctcacgcgggcggattttcttaccttgtgaaaaaccgtctcagcggctgcccccgcctcctctgctggatgtgaaatggcggtcggcgagtggttgcgtccgtgacatcatcatcatggcaacaagagctgcagcctgggaccgaggagcccgtgtgattcccggcggtggcggcagtggcggcagcaccagcaccgacgaaagctcgagggcttctctcctgcggccccttgccgggtgctcctgaggaggcggcggcagcagcgcctacaccgccccgcccgccgctcctcgaggtgcctctgtgtgaggggagggggccgtgccgagaaggggagggggcgccgccgccgctgcggagggagccgccgccgctgctgctgccgctgccgggtcgccagtgaagggaggcagtggcggcggcggcgaacatgttttcagtaaggatagtgactgcagactactacatggccagcccgctgcaggggctggatacctgccaatcccccctcacccaggcccctgtcaagaaggtgccggtggtgcgagtcttcggagcgaccccggcagaataaaacccaagacaagccacataaaagcaacctaaaaattaaactgtcatcatattatttgttttaaaactatggaataatatatctgaggaagatttctctcaaaattgtttttctcaatttcaagtcagaagacatgtcttcatctacatggcatctttccttacctctatgtgccatacgatggttatggacagcagccagaaagctatctttctcagatggcattcagtatcgacagagcacttaatgtggctttaggcaatccatcttccactgctcagcatgtgttcaaagtgtcattagtatcaggaatgcctttttatggttatcatgagaaggaaagacactttatgaagatctatctttacaatcctacaatggtgaaaaggatatgtgaacttttgcaaagcggagccataatgaataaattttaccagcctcatgaagcgcatattccctacctcctacagctcttcattgactacaatctttatggcatgaatttaataaatctggctgctgtcaagttccgaaaagcaagaaggaaaagtaatacattgcatgcaactggatcctgcaagaatcatttatcaggaaattctcttgctgatactttatttcggtgggaacaagatgaaataccaagctctttaatattggaaggtgttgaaccacagagtacatgtgaattagaagtggatgctgtagctgctgatatcttaaatcgtctggacattgaagctcaaattggtggaaaccctggtctacaggccatatgggaagatgaaaagcaacggcgaagaaacagaaatgaaacttctcaaatgagccaacctgagtcacaagatcacaggtttgtgccagcaacagaaagtgaaaaaaaatttcagaagagacttcaggaaattctcaaacagaatgatttctctgtaacattatcaggatctgtggactacagcgatggatcccaggagttctctgctgagttaacattgcactctgaggttctgtctcctgaaatgcttcagtgtacaccagccaatatggtagaagttcacaaagacaaagagtcaagcaaaggtcacactagacacaaagtggaagaagctcttattaatgaagaagcaattttgaaccttatggaaaatagtcagacttttcagcctttgacccaaagactgagtgagtcacctgttttcatggacagtagtcctgatgaggctctggtacatcttcttgctggtttggaaagtgatggatatcggggggaaagaaataggatgccatcaccatgtcgctcctttggaaataataaatatccacaaaatagtgatgatgaagaaaatgaaccacagattgaaaaagaggaaatggagcttagtttggtgatgtcccagagatgggacagcaatattgaagaacattgtgccaaaaagagatcactgtgcagaaatacccacagaagttcaactgaagatgatgactcatcttcaggagaagaaatggaatggagtgataacagtttgcttctagccagtctttctatacctcagttagatggaactgcagatgaaaatagtgacaatccattgaacaatgaaaattctagaacccactcttctgtaattgcaacaagcaagctttcagttaaaccctccatctttcacaaagatgctgctacattagaaccctcatcttctgctaagattacctttcagtgtaaacacacaagtgccctttcttcccatgttttgaacaaggaagatttaattgaagacctttcacagacaaacaaaaatacagaaaaaggtctagataactcagtcacttcttttacaaacgaaagcacttattctatgaaataccctggatctttaagcagtactgttcattcagaaaattctcataaagagaatagtaagaaagagatcctcccagtatcttcctgtgaaagtagtatttttgattatgaagaagatattccatctgttacaagacaagtaccaagtagaaaatatacaaacattagaaaaatcgaaaaggattccccttttatacatatgcaccgtcaccctaacgagaatacattgggcaaaaattctttcaacttttctgacttaaatcattcaaaaaataaagtatcctctgaaggaaatgaaaaaggaaacagcacagctctgagtagtttattcccttcatcatttactgaaaattgtgaattactgtcatgctcaggggagaatagaactatggtgcattctcttaatagcactgctgatgaaagtggactaaataaacttaaaattaggtatgaagaatttcaagaacataaaacagaaaagccaagcctcagccagcaagcagcacactatatgttttttcccagtgttgttctttctaactgtcttactagaccacagaaactatctcctgtcacatataaattacaacctggcaataaaccatcccggttaaaattgaataaaaggaaacttgcaggtcatcaggagacttctaccaaaagtagtgagactggatccacaaaagataattttatacaaaataatccttgtaatagtaatcctgagaaggataatgcattggctagtgatttaactaaaaccactcgtggagcttttgaaaataaaacacccacagatggttttatagactgtcactttggagatggaacgttagaaactgagcagtcctttggactatatggaaataaatacacacttagagccaaacgcaaggtaaattatgagactgaagacagtgagtcaagttttgtaactcacaactcaaaaattagtctacctcatcccatggaaattggtgaaagtttagatggaactctcaaatcccgaaaacgaagaaaaatgtctaaaaagctgccccctgtcatcataaagtatattattattaatagatttagagggagaaaaaatatgcttgtgaagctaggaaaaatagactctaaagaaaaacaagtaatattaacagaagaaaaaatggaactatataaaaagcttgcacctttgaaggacttttggccaaaagttcccgactcccctgcaaccaaatatcccatttatccactaacaccaaagaaaagtcacagaagaaagtcaaaacataaatctgctaagaaaaaaactggtaaacaacaaaggacaaataatgaaaatattaaaagaactttgtctttcaggaaaaaacggtcacatgctattctttctcctccctcaccatcttacaatgctgaaaccgaagattgtgacctgaattatagtgatgttatgtctaaactaggttttctttctgagagaagcacaagtcccataaattcttctccacctcgctgctggtctcccacagatccaagagctgaagaaatcatggctgctgcagaaaaagaggcaatgctttttaagggtcctaatgtatataagaagactgttaattctcgtataggaaaaactagtcgcgcaagagcacagattaagaaatcaaaagcaaagcttgctaatccctctatagttactaagaaaaggaacaaacgaaatcagacaaataaactagtagatgatggaaaaaagaaaccaagagcaaaacaaaaaacaaatgagaaaggtacatcgagaaagcatacaacacttaaggatgaaaaaataaaatctcagtctggtgctgaggttaagtttgtactgaaacaccagaatgtgtctgaatttgcaagtagttctggaggctctcaactactttttaaacagaaagatatgccactaatgggctctgctgtagatcatcccctttctgcttccctacccactggaattaatgcacaacagaagttatctggctgcttttcttctttcttagaaagcaagaagtctgtagatttgcagacattccccagttcacgagatgatttgcatccatcagttgtttgtaattctataggacctggagtctcaaaaattaatgttcaaaggcctcataatcaaagtgctatgtttactctaaaggaatcaacgttaattcaaaaaaatatatttgacctttccaatcatttatctcaggtagcacagaatacacagatatcttctggtatgtcctcaaagatagaagataatgcaaataatatacaaagaaactatttgtcatcaatcggaaagttaagtgaatatcgcaattccctagaatcaaagctggaccaagcatatacccctaattttttgcattgcaaagacagtcagcagcagattgtgtgcatagcggaacagtcaaagcacagtgaaacttgttctccgggaaatacagcttcagaggaaagccaaatgcctaataattgctttgtaacttccttgagaagtccaatcaaacaaatagcatgggagcaaaagcaaaggggctttattttagatatgtcaaattttaaacctgaaagagtaaaaccgaggtcgttatcagaagcaatttcacaaaccaaagcactttctcagtgtaaaaatcgaaatgtgtcaacaccttcagcatttggtgaaggacagtctggactggcagttctaaaagaattgttacaaaaaagacagcagaaagcacaaaatgcaaatactacacaagacccattatccaataaacatcaaccaaataaaaatatttctggttcccttgagcataacaaagcaaataaacggacacgatcggtaacgtccccaagaaaacctcgaactcccagaagtacaaaacaaaaagaaaaaatccccaaacttctcaaagtagactctttaaatttacaaaactctagccagttggataactctgtatcagatgatagtcccatctttttttcagatccaggctttgaaagttgttactcacttgaagatagtttatctcctgaacataattataattttgatattaacacaataggtcagactggattttgtagcttttattctggaagtcagtttgtcccagctgatcagaatttgcctcagaagttcctaagtgatgctgttcaggatctttttccaggacaagctatagaaaaaaatgagtttttaagtcatgacaaccagaaatgtgatgaagacaagcatcataccacagactcagcctcatggattagatctggtactttaagtcctgaaatttttgagaagtcaaccatagatagcaatgagaatcgtcgccacaaccagtggaaaaatagctttcatcctctaacaactcggtctaactcaataatggattctttctgtgttcagcaggcagaagactgtctaagtgaaaaatctagattgaataggagttcagtaagcaaagaagtgtttcttagcctcccacagccaaacaattcagactggattcaaggtcacaccagaaaagaaatgggacagtctcttgactcagccaatacctcttttactgcaatactctcctcccctgatggtgaacttgtagacgtggcctgtgaagatttagaactgtatgtttcaagaaacaatgatatgttgacaccaactcctgatagttcaccaagatctactagctctccttcacaatctaaaaatggcagcttcacccctcgaactgctaacattctgaaaccacttatgtcccccccaagtagggaagaaattatggcaactttgttggatcatgacctgtctgagactatttaccaggaaccattttgcagtaatccttctgatgtaccagaaaagcccagggagattggtggacggctcctcatggtagaaactcgacttgcaaatgatctggctgagtttgagggagacttttccttggaaggacttcgtctttggaaaacagcattctcagcaatgactcagaatccaaggccagggtcaccccttcgcagtggccaaggagttgtcaataaagggtcaagtaatagccctaagatggttgaagataaaaaaattgtgattatgccttgcaaatgtgccccaagtcgacaactggttcaagtgtggcttcaagccaaagaagaatacgaacgttccaagaaactgcctaaaaccaagccaactggagttgtaaaatctgctgagaactttagctcttcagttaacccagatgacaaacctgtagtgcctccaaaaatggatgtaagtccatgtatactccccactacagcacataccaaggaggatgttgataattctcagattgctttacaagcaccaaccacgggatgtagtcaaactgcaagtgaaagtcagatgctgccaccagttgcctctgcaagtgatcccgaaaaagatgaagatgatgatgataactattacattagttatagctcccctgattctccagtaattcccccttggcaacaaccaatatccccagattccaaagcattaaatggagatgatagaccctcatcaccagtagaggagctgccttcattggcttttgagaacttcttaaagccaataaaagatggtatacaaaaaagcccctgcagtgagcctcaagagcctctagtgatatctccaattaatactagggcaagaactgggaaatgtgaatcactttgctttcatagtacaccaatcatacagagaaaacttctggaaaggcttcctgaagcacctggccttagcccattatcaacagaaccaaaaacacagaagttgagtaataagaaaggaagtaatactgacactcttagaagagtactgttaacacaagcaaagaatcaatttgcagcagtaaataccccacagaaagaaacttctcagattgatggaccatctttaaacaatacttacggtttcaaagtcagcatacaaaacttacaggaggcaaaagctttacatgagatacaaaatcttaccctaatcagtgtggagttgcatgctcgaactagacgagacttagaaccggatcctgaatttgacccaatctgtgctctgttctactgcatctcatctgacactccactgccagatacagaaaaaacagaactcacaggtgtaatagtgattgataaagacaagacagttttcagtcaagatatcagatatcagactccattacttattagatctggaattacaggactcgaagtcacctatgctgctgatgagaaggcactttttcatgaaattgcaaatataataaagaggtatgatcctgatattctgctaggatatgagattcagatgcattcctggggttacctcttacaaagggctgccgctttaagtattgacttatgtcggatgatctctcgggtgccagatgacaaaattgagaacagatttgcagctgaaagagatgagtatggatcatatacaatgagtgagataaatattgttggccgaattacactaaatctttggagaatcatgagaaatgaggtggctctaactaactacacctttgaaaatgtgagctttcatgttcttcatcagcgttttcccctctttacctttcgagtcttgtcagactggtttgataacaagacagatctatacagatggaaaatggttgatcattatgttagccgtgtccgtggaaatctccaaatgttagaacagctggacctgattgggaaaaccagtgagatggctagactttttggcattcagtttttacatgtactgacaaggggttcacagtaccgtgtggaatcaatgatgttgcgtattgctaaaccaatgaactatattcctgtgacacctagtgttcagcaaagatcccagatgagagccccacagtgtgttcctctaattatggagcctgaatcccgcttctatagcaactctgttctcgttttggatttccaatcactttatccttctattgtgattgcatataactactgcttttccacctgccttggccatgtggagaacttgggaaagtatgatgagttcaaatttggctgtacctctctgagagtacctccagatttactttaccaagttaggcatgatatcacagtgtcccccaatggagtagcttttgtcaagccttcagtaagaaaaggtgtactaccaagaatgcttgaagaaattttgaagactagatttatggtgaagcagtcaatgaaggcttacaagcaagacagagccctgtcacgaatgcttgatgcgcgtcagttgggacttaagctgatagcaaatgtcacatttggctatacatctgctaatttttctgggagaatgccatgcattgaggttggcgatagtattgttcacaaagccagagagaccttggaacgagctattaaactggtgaatgataccaagaaatggggggctagggttgtatatggcgatactgacagtatgtttgtgctactgaaaggagccactaaggagcagtcttttaagattggtcaggaaattgccgaagctgtaactgctaccaatcctaaaccagtgaaattgaagtttgaaaaggtatatttgccctgtgttttacaaacaaaaaagaggtatgtgggttacatgtatgaaacactggatcagaaggacccagtatttgatgcaaaaggaatagaaacagtcagaagagattcctgccctgctgtttctaagatacttgagcgttctctaaagctgctatttgaaacgagagatataagtctaattaaacagtatgttcagcgacaatgtatgaagcttctggaaggaaaggccagcatacaagactttatctttgccaaggaatacagaggaagtttttcttataaaccaggagcttgtgtgccagcccttgaacttacaaggaaaatgctgacttatgaccggcgctctgagcctcaggttggggagcgagtgccatacgtcatcatttatgggacccccggagtaccacttatccagcttgtaaggcgcccagtggaagtcctgcaggacccaactctgagactgaatgctacttactatattaccaagcaaatccttccacccttggcaagaatcttctcacttattggtattgatgtcttcagctggtatcatgaattaccaaggatccataaagctaccagctcctcgcgaagtgaacctgaagggcggaaaggcactatttcacaatattttactaccttacactgtcctgtgtgtgatgacctaactcagcatggcatctgtagtaaatgtcggagccaacctcagcatgttgcagtcatcctcaaccaagaaatccgggagttggaacgtcaacaggagcaacttgtaaagatatgcaagaactgtacaggttgctttgatcgacacatcccatgtgtttctctgaactgcccagtacttttcaaactctcccgagtaaatagagaattgtccaaggcaccatatctccggcagttattagaccagttttaaattgtcaatatcacagtattacaggtgctatttttttcagtgcttaccactaaactgttgtgcatggtgctttttaactttcatcgagtcaaggatgttcactgtctgttatctgaagactatgaagacttctatgctaaccgaattaaaatgtacttgttgatctctgaatagctcacttcttacaatgtacaaattcctcattctgtcaccttttaaacattgttttataatgcaggtgttggatttgctccagtatgtgtaccatcttgtaaattcatttgagtagatcatgtttacttcccagtggaaggagcactgaaaacctcttaaagaaaaagcatttgtgtgttttccttgaactgtctgtatcaagacgtgttacttcgagatatccattcactttataattttgactgcaaaatattttgtaaatacacttttttacttttcaaacgagcaaaataatgtgcaatgatttttatacaaatgattttcaagttgtttggtatatttcctctaggttttgcttgactcaaagtagatcgttattttgatcaaactgtgcaaacagtagtaccacgtgtagcattttgaaacattatttttttttaaaaaatgctgtcttgctttagctattaatggggcattgtgaggaactgtgcaaagacatttttgttacaaacctgtgggcctgttgcaatactttaaaaataaaaaattttattccatttgcttgttttgtatagacatttctattgcttctaaatatacttaaaatattttctttccttatgtactgtacagttaatcttatttgccatcatcttgaacacaaaatgtgtatttagaatatttgtataactgtgtaaaataaaaaaggaattatgtggtcagtgcattgttttttaaactggaaatcattttgttttaaaagttaataatggaaaccatattaaaattg

SEQ ID NO: 175544 - DNA, 969 bp, Homo sapiens
  Payload ID: 14477
  Gene Symbol: REV3L
  Gene Name: REV3-like, polymerase (DNA directed), zeta, catalytic subunit
  ENST ID: ENST00000619481
  CDS Start-End: 1-969
atgacttcctcattaccttactttatttttaatccccttagtatgtttgtgctactgaaaggagccactaaggagcagtcttttaagattggtcaggaaattgccgaagctgtaactgctaccaatcctaaaccagtgaaattgaagtttgaaaaggtatatttgccctgtgttttacaaacaaaaaagaggtatgtgggttacatgtatgaaacactggatcagaaggacccagtatttgatgcaaaaggaatagaaacagtcagaagagattcctgccctgctgtttctaagatacttgagcgttctctaaagctgctatttgaaacgagagatataagtctaattaaacagtatgttcagcgacaatgtatgaagcttctggaaggaaaggccagcatacaagactttatctttgccaaggaatacagaggaagtttttcttataaaccaggagcttgtgtgccagcccttgaacttacaaggaaaatgctgacttatgaccggcgctctgagcctcaggttggggagcgagtgccatacgtcatcatttatgggacccccggagtaccacttatccagcttgtaaggcgcccagtggaagtcctgcaggacccaactctgagactgaatgctacttactatattaccaagcaaatccttccacccttggcaagaatcttctcacttattggtattgatgtcttcagctggtatcatgaattaccaaggggatttattgcggcactattcacaatagcaaagacttggaaccaacccaaatgtccatcaatgatagactggattaagaaaatgtggcacatatacaccatggaatactatgcagccataaaaaaggatgagttcatgtcctttgcagggacatggatgaagctggaaaccatcattctcagcaaactatcacaaggacagaaaaccaaacaccgcctgttctcactcatagctcca

SEQ ID NO: 175545 - DNA, 4888 bp, Homo sapiens
  Payload ID: 14478
  Gene Symbol: RECK
  Gene Name: reversion-inducing-cysteine-rich protein with kazal motifs
  Uniprot ID: O95980
  ENST ID: ENST00000377966
  CDS Start-End: 567-3482
gatgaacccttgtcagggggccgtgtctgcgggaggccgaaggatcccgggtgacatgctttctttgggtgcgaggcagcgtctcggcagaaagaatattgcgagtattactgagggtacatgaaggagagaagcccctttggttcggccttggactaagcccttgttctcaggtgaacttgcagtgtgatcttgagtaaggtcagtctcctctctcacctcagtggcccgaaacctcaggaggtggcagaggttttctaatgactctcccagctctgacatcctctgacttcactctgggagaacgtgggctggtggactcctggcagaagccgacacacagttgggccataacaaagagccctggtacggggcacgttcccgcccccgggaggttttggaaacactgtgaggcagggggcggggcttgagcgggccgcagccagtcaccaaagggccgggcgctgggggcggggcctcgcgcgagcggcggcggtagcggcggcagcggctgcggccaagctgggtccgagcatcccgcggctctggagccgcccggcccggacatggcgaccgtccgggcctctctgcgaggtgcgctgctccttctgctggccgtggcgggggtcgcggaggtggcagggggcctggctccgggcagtgcgggtgcattgtgttgtaatcattcaaaggataaccaaatgtgccgtgatgtatgtgaacagattttctcctcaaaaagtgaatcccgactaaaacatctgttgcagcgagccccagattattgcccagagacaatggttgaaatttggaattgtatgaattcatctttgccaggtgtgtttaagaagtctgatggctgggttggcttaggctgctgtgaactggctattgccttggagtgtcgacaggcatgcaagcaggcatcttcaaagaatgatatttccaaagtttgcagaaaagaatatgagaatgctcttttcagttgcattagcagaaatgaaatgggctcggtttgttgcagttatgcaggtcatcacacaaactgccgagaatactgtcaagccatttttcgaacagactcttctcctggtccatctcagataaaagcagtggaaaattattgcgcctctattagtccacaattaatacattgtgtgaacaattatactcaatcttatccaatgaggaacccaacggatagtttatattgctgtgacagagctgaagaccatgcttgccaaaatgcctgcaagagaatcctgatgtccaagaaaacggaaatggagattgttgatggtctcatcgagggttgtaagacccagcccttgcctcaagatcctctttggcaatgttttcttgaaagctcacaatctgttcaccctggagtcactgtacaccctcctccctctacaggcctcgatggggctaaattgcattgttgttctaaagcaaacacttcaacatgtagggaactctgcactaaactttacagcatgagctggggcaatacacagagttggcaagagtttgatcgcttttgtgaatataatccagtggaagtgtccatgttgacctgtttagcggatgtccgggaaccttgccagttgggctgtagaaaccttacttactgtactaattttaacaacaggccaacagaacttttcaggagttgtaatgcacagtcagatcaaggagccatgaatgacatgaagttgtgggagaaaggaagcataaagatgccatttatcaatatacctgttcttgatattaaaaagtgccagccagagatgtggaaagcaatagcttgttcactgcagattaaaccttgtcatagtaaatctcggggaagtattatttgcaaatcagattgtgtggagattcttaaaaaatgtggagaccagaacaaattccctgaagaccacacagctgaaagtatttgtgagcttctgtcacctacagatgatctgaagaattgtatacctttggatacatacctcaggccaagtactttaggtaacattgtagaagaagtgactcatccctgtaacccaaatccttgccctgccaatgagctctgtgaagtaaaccgaaaaggatgtccatctggagatccctgtcttccatacttttgtgttcaaggttgcaaactgggagaagcttctgatttcattgtccgtcaagggacactaatccaggtgccatcatctgcaggggaagttggttgttataaaatctgttcatgtggacaaagtggactcttagaaaactgtatggaaatgcactgtatagacctccagaagtcttgtattgttggaggaaaaagaaaaagtcatggaacatcctttagtattgactgcaatgtctgttcttgttttgctggcaatttggtgtgctctacccgcctttgcctcagtgagcacagttcagaagatgaccgtcgtaccttcacaggtctgccctgtaactgtgcagatcagtttgtccctgtatgtgggcagaatgggcgcacttaccccagtgcctgcattgctcgctgtgtgggcctccaagaccatcagtttgagtttggatcatgcatgtcaaaggatccatgtaatcctaatccctgccaaaaaaaccaaaggtgcatacccaaaccacaggtctgcctgacgacttttgataaatttggatgtagccagtatgagtgtgtaccaagacagctcgcgtgtgaccaggtccaagatcctgtttgtgacacagaccacatggagcacaacaatctctgcactttataccaaagaggaaaaagcctctcttacaaaggtccctgccagcccttttgcagagcaaccgagcccgtatgtgggcacaatggtgagacctacagcagtgtgtgtgctgcctactcggatcgcgtggcagtcgattactatggggactgccaggccgtcggagtcctctcagagcacagctccgtcgccgagtgtgcttctgtcaagtgtccttcgctcttggcagctggatgcaaacccatcatcccaccgggtgcttgttgcccattatgtgctgggatgttaagagttttatttgacaaagaaaaactggatactattgctaaggtaacaaataaaaagccaataacagttctggaaatacttcagaaaatccgcatgcacgtgtctgtcccacagtgtgatgtgtttggatacttcagcattgaatcagaaattgtgatcctgatcattcccgtcgatcactatccaaaagctctgcagattgaagcctgcaataaagaagcagagaagattgagtcccttatcaactctgacagcccgactttggcgtcccatgtccctctctctgccctcatcatttcccaggtacaggtctccagcagtgtgccatcggccggtgtcagggccaggccttcttgccactccctcctccttcccctcagcttgggccttgccttgcacttgctctggacatataactgactgcccacggaaagtgcagaatgctcctccacctcactctcctgccttgaaaaagacattcaggactgctggtttgtagttgaatattggccaaggaaaggcacatgtcacctctattcgccacacagtatttttttttttaatccgccaatattagtaggatttttgttttgtttttacaaatgttaaaatgtgttgttccaaatactaatgaaaacagaatgtctcttcctggtagaccactgccatatgatttacatttcctcaccataagggtcccccactctaaagcaaatttatcgctgggaaatgagatgaccactttttagaaagataattcactgtactatcaggttcacaaacttcatttcagagttctttttgaagtatttaaggttcccgttgcatttgttttgtttacagataattacctactctggctagaagctaggggtcccagtgaagagccactgccattaaagaatatgaaacatagataaaacatctttgaaattatgtaaattatgtaaattatcaggcaaatttgcattaaattacagaaatttaattcagaaccccaactactgtgttatgcaaaagcaagctgattaaatgacactcatataattatatgttgtaagcaacaggctcactggtcacggatttgtgtctgtgacttttgtgaaagggagaagtgacattgcatcaaagcatcttgcattatgcaatttttatattaaccagatatatattcatcggtattcatccaagttaaatgtagagtttttaaacatcaatctttaaaccaattgctgctacttatataattgccaaaaagtgaaataatgtgtagttcatgtaaataatacattatatttctattttattatgaagaaggtgaatagccatatttgtaaaatgacaatcatgtgtgttaacccagtgctttccattcgtgaaaacacatttgctttttgtgatatgcacaatgtagataagtgttctgtctgactttcttttttgatatagaagtataaagaattgtggtttatatatttaaaagtgtcaagctgagtattaaaatgtatgcatgttgtctaagaaattgaatactttgaatgtgtttcacagtttgaaataagctatttgatgtaatacttcttgtgtgtatgcacatgaacttagattttacatgaagtattttttcagtattatatgtaccctctgaaatacatagggatatgcgtattataccaaaatgttgctgaaaaatgggcacttaaagctttcagaatatgtcagtgctgatgtagcatgcttgttgcaattgccttttttctgtataaatgtctttaatgcaatatactggaaagcttttctattttaataaaaataatttttatatg

SEQ ID NO: 175546 - DNA, 4591 bp, Homo sapiens
  Payload ID: 14479
  Gene Symbol: REXO1
  Gene Name: REX1, RNA exonuclease 1 homolog
  Uniprot ID: Q8N1G1
  ENST ID: ENST00000170168
  CDS Start-End: 106-3771
gcggcggcggggtccgtgaggcgcgggcggcggcgaccgcggcgccagtgagggggccctggggcccgggcggctccgggccggggccccgccgcgggacggaccatgctacgctccactggcttcttccgggccattgactgcccctattggtctggggcgcccggggggccctgccggcggccctactgccacttccggcaccgcggggcccggggctccggcgcgcccggtgacggcggagaggcgccccccgcagcagggctgggttacgacccctacaaccctgagctgcccaagccccccgcgcagagggagaatggcaccctgggcctgggggaggagccgcgcccggatgtgctggagttggagctggtcaaccaggccatcgaggccgtgcgcagtgaggtggagctggagcagcggcgctaccgggagctgctggagacgacccgtgagcaccgctccgccgaggcccccgccctggcgccccgcggccccaacgccagccccactgtgggcccggacgaggatgccttcccactggccttcgactacagccccggcagccacggcctattaagccctgatgccggctaccagcccaccccactggccgcccctgccgagccgggcagcaagtactcgctggcgtccctggacaggggtcagggcagaggtggagggggtggcggtgccctggaatacgtccccaaggctgtgagccagccccggcggcacagccgccccgttcccagtggcaagtacgtggtggacaactccaggccacccacagacctggagtatgaccctctctccaactactcggcccggcacctcagcagggccagctcccgggatgagcgggccgccaagcggccccggggctcccgcggcagtgagccctacacacctgctcccaagaagctctgtgacccctttggcagttgcgatgcaaggttctcagactcagaagatgaggccgccacggtcccaggtaacgagcccaccacggccagcacccccaaagccagggccgaccctgagatcaaggccaccgggcagccaccctccaaagagggcctggaggccgaggggggcggcctgcgggagaccaaggagacggccgtgcagtgcgacgtgggggacctccagccgcccccagccaagcccgcctccccagcccaggtccagtcctcacaggatgggggctgccccaaggagggaaaacccaagaagaaaaaaaccggggccccacctgcccccagctgcaaagacggggcccaggggaaggacaagaccaaggacaagggccgagggcggcctgtggagaagccccgtgcggacaagaagggcccgcaggccagcagcccccggcgcaaggcagagcggccggaagggaccaagaagaagccatcttcggccactcctgtggccacctcagggaaagggaggcctgaccggccagcgcggcggccgagccccacaagcggggactcccgaccggcggccggcagaggcccaccccgccccctccagctgcccgacaggaagagcaccaaggccccgtcggggaagctagtggagcggaaagcccgctcactagacgagggcgcctcccaggacgcccccaagctgaagaagcgggccctgagccacgccgacctctttggggacgagagtgaggacgaggccgcagggccaggggtgccgagcgtgtggccctctgccctccccagcctcagctcggactcagactccgactcagactccagcctgggcttcccggaggcgcaggggccgcccaagcggctcaaggcctccccgcccccctcccccgccccatcctcctcctcctcctcctcctcctccacctccagcgcgggggcggatgtggactactcggccctggagaaggaggtggactttgactccgaccccatggaggagtgcctgcggatcttcaacgagtccaccagcgtcaagacggaggacagaggccggctggcccggcagccccccaaggaagagaagagtgaggagaaggggctttcgggtctgaccactctgttccccgggcagaagaggaggatctcccacctttccaagcaaggccaggaggtggagcccccgaggaggggtcccgcggtgcccccggcccggcccccgacggcgcaggaggtgtgctacctgcgggcccagcaggcgcagagggcatcggcgagcttgctgcaggcccccgccaggctggcagagaagtcgccctccgtccacatttccgcccctggcgagaagaggaggatcgcccacatccccaacccccgcctggctgcagcccccacaggtgccaagaggacccttgcggccagcggcagccagtcctccaacggccctgagccaggtggccagcagctgaaaacacgcacattgtcggggatggcgtccaagactaccaccaccatcatccctaagcgaatcgcccacagtccatccttacagagtttaaagaaacccattatccccaaagagtttgggggcaaagtccccaccgtcatccgccagcgctatctcaacctgttcatcgaggagtgtctcaagttctgtacctccaaccaggaggccatagagaaggcactgaacgaggagaaggtggcctatgaccgcagccccagcaagaacatctacctgaatgtggccgtgaacaccctcaagaagctcaggggcctggcccccagcgctgtgcccggcctcagcaaaaccagtggccgcagggttgtgtcccacgaggtggtgttggggggcaggttggccgccaagaccagcttctcgctcagccgtccaagcagcccccgggtggaggacctgaaaggggctgccctgtacagccgcctcagggagtacctgctcacccaggaccagctcaaggagaacggctaccccttcccgcacccagagcggcccgggggcgcaatcatcttcacagctgaggagaagaggcccaaggactcttcctgcaggacctgctgccgctgtggcaccgagtacctcgtgtcctcttcaggccgctgcatccgggacgaggagtgttattaccactggggacggctgcgccggaaccgggtggccggaggctgggagacccagtacatgtgctgctcggctgccgccggctctgtcggctgccaagtcgcaaagcaacacgtgcaggatggccggaaggagcgccttgagggcttcgtgaagacctttgagaaagagctctcaggagacacccacccggggatctacgccctggactgcgagatgtcctacaccacatatggcctggagctgacgcgcgtcacggtggtcgacacggacgtgcacgtggtttatgacaccttcgtgaagcctgacaacgagatcgtggactacaacaccaggttttcgggggtgacggaggctgaccttgccgacacaagtgtcacgctgcgtgacgtccaggccgttctgctgagcatgttcagcgctgacaccatcctcatcggacacagcctggagagcgacctcctggccctgaaggtcatccacagcaccgtggtggacacgtctgtgctcttcccccaccgcctgggcctcccctacaagcggtccctgcggaacctcatggccgactacctcagacagatcatccaggacaatgtggatgggcacagctccagcgaggacgccggcgcctgcatgcacctggtgatctggaaggttcgagaagacgccaagaccaagcgatgacgcctgcccgcctcccacccgcctctcctgccgtcccgctggtccttagccccatgcctcttccaaaacagtgcaataaatctccggtaacccgtccacctggccgaggcagcccagagcagcgggatgagctggcggccagagaacgcccagcccagcccacccccgctcacgtcctgccgcacccctccgccggtccccaccctctgccccccagccctctggcgtctctagaaactgctgctgatggagaccaggacagagcccgcccccacccggcccgcagcccctcctgcccctcctgccaggccctccctcccgggtggtggccggcacctctgctcctcacgtgggtcgcggggcgggcttgtcccaggtttgtttgagacagtctttttttattttgtattgttatttttattatttttaatttaaacctgatgacttgcacagcatctttcccaccgggaagagcgggcctgctgccttccctcctgcggggtgggggtgggacagaccccagtgggggccagggccacactcagcgcagtgtgggctggacccgcctctgtgctccaggggctggccggtcttcgggggcgccggcttccaccactcgccgccccacccctgcactccgtgacctctgagaacccagctggcccctcgttagccccagggtctgccgtctagagggagcccaccggcctccggacactgtcttcccgctagagccccgtcctcctctgcggggctctccggacccccttccccctcacctccaggcagggacagaataaatgtttgtatggattttaga

SEQ ID NO: 175547 - DNA, 1271 bp, Homo sapiens
  Payload ID: 14479
  Gene Symbol: REXO1
  Gene Name: REX1, RNA exonuclease 1 homolog
  ENST ID: ENST00000590936
  CDS Start-End: 1-485
tggcccccagcgctgtgcccggcctcagcaaaaccagtggccgcagggttgtgtcccacgaggtggtgttggggggcaggttggccgccaagaccagcttctcgctcagccgtccaagcagcccccgggtggaggacctgaaaggggctgccctgtacagccgcctcagggagtacctgctcacccaggaccagctcaaggagaacggctaccccttcccgcacccagagcggcccgggggcgcaatcatcttcacagctgaggagaagaggcccaaggactcttcctgcaggacctgctgccgctgtggcaccgagtacctcgtgtcctcttcaggccgctgcatccgggacgaggagtgttattaccactggggacggctgcgccggaaccgggtggccggaggctgggagacccagtacatgtgctgctcggctgccgccggctctgtcggctgccaagtcgcaaagggtcccaaccagtgaatgggcgtgatggatggataggatggtcccgaagggctcagagatgtgctgctgctgccacccccgcccccactgcaccccgaagctgccctcacctgccttctccacccccagcaacacgtgcaggatggccggaaggagcgccttgagggcttcgtgaagacctttgagaaagagctctcaggagacacccacccggggatctacgccctggactgcgagatgtcctacaccacatatggcctggagctgacgcgcgtcacggtggtcgacacggacgtgcacgtggtttatgacaccttcgtgaagcctgacaacgagatcgtggactacaacaccaggttttcgggggtgacggaggctgaccttgccgacacaagtgtcacgctgcgtgacgtccaggccgttctgctgagcatgttcagcgctgacaccatcctcatcggacacagcctggagagcgacctcctggccctgaaggtcatccacagcaccgtggtggacacgtctgtgctcttcccccaccgcctgggcctcccctacaagcggtccctgcggaacctcatggccgactacctcagacagatcatccaggacaatgtggatgggcacagctccagcgaggacgccggcgcctgcatgcacctggtgatctggaaggttcgagaagacgccaagaccaagcgatgacgcctgcccgcctcccacccgcctctcctgccgtcccgctggtccttagccccatgcctcttccaaaacagtgcaataaatctccggtaacccgtc

SEQ ID NO: 175548 - DNA, 369 bp, Homo sapiens
  Payload ID: 14479
  Gene Symbol: REXO1
  Gene Name: REX1, RNA exonuclease 1 homolog
  ENST ID: ENST00000588743
  CDS Start-End: 1-369
tcacagctgaggagaagaggcccaaggactcttcctgcaggacctgctgccgctgtggcaccgagtacctcgtgtcctcttcaggccgctgcatccgggacgaggagtgttattaccactggggacggctgcgccggaaccgggtggccggaggctgggagacccagtacatgtgctgctcggctgccgccggctctgtcggctgccaagtcgcaaagcaacacgtgcaggatggccggaaggagcgccttgagggcttcgtgaagacctttgagaaagagctctcaggagacacccacccggggatctacgccctggactgcgagatggtgaggctgttctctgcccagcgtcgggttcaggattggg

SEQ ID NO: 175549 - DNA, 718 bp, Homo sapiens
  Payload ID: 14479
  Gene Symbol: REXO1
  Gene Name: REX1, RNA exonuclease 1 homolog
  ENST ID: ENST00000586343
  CDS Start-End: 1-193
taccaccaccatcatccctaagcgaatcgcccacagtccatccttacagagtttaaagaaacccattatccccaaagagtttgggggcaaagtccccaccgtcatccgccagcgctatctcaacctgttcatcgaggagtgtctcaagttctgtacctccaaccaggaggccatagagaagccgcagctgtgacccggagctgcctgggagagatgcaagtccccgaccccatggcgaccccaccgctggggctccccggcaccaggcaggcatggcctcagctgggcaccgcctgtcccccaggcactgaacgaggagaaggtggcctatgaccgcagccccagcaagaacatctacctgaatgtggccgtgaacaccctcaagaagctcaggggcctggcccccagcgctgtgcccggcctcagcaaaaccagtggccgcagggttgtgtcccacgaggtggtgttggggggcaggttggccgccaagaccagcttctcgctcagccgtccaagcagcccccgggtggaggacctgaaaggggctgccctgtacagccgcctcagggagtacctgctcacccaggaccagctcaaggagaacggctaccccttcccgcacccagagcggcccgggggcgcaatcatcttcacagctgaggagaagaggcccaaggactcttcctgcaggacctgctgccgctgtggcaccgagtac

SEQ ID NO: 175550 - DNA, 2360 bp, Homo sapiens
  Payload ID: 14480
  Gene Symbol: REXO4
  Gene Name: REX4 homolog, 3,-5, exonuclease
  ENST ID: ENST00000630460
  CDS Start-End: 201-1469
gcgcttccggggactggagcgtgcgtgctgaggtatgcgcaacgcgtgcggggtctcttccggagtcttttcctggacggggtccctgcggtgggtgtgtttcggcctggcctgggcaggcgcttgtgctgccagggcgccgggcccggggaggccggggtctcgggtggccgccggcccaggcgctggacggcagcaggatggggaaggcgaaggtccccgcctccaagcgcgccccgagcagccccgtggctaagccgggtcctgtcaagacgctcactcggaagaaaaacaagaagaaaaaaaggttttggaaaagcaaggcgcgggaagtaagcaagaagccagcaagcggccccggtgctgtggtgcgacctccaaaggcaccagaagacttttctcaaaactggaaggcgctgcaagagtggctgctgaaacaaaaatctcaggccccagaaaagcctcttgtcatctctcagatgggttccaaaaagaagcccaaaattatccagcaaaacaaaaaagagacctcgcctcaagtgaagggagaggagatgccggcaggaaaagaccaggaggccagcaggggctctgttccttcaggttccaagatggacaggagggcgccagtacctcgcaccaaggccagtggaacagagcacaataagaaaggaaccaaggaaaggacaaatggtgatattgttccagaacgaggggacatcgagcataagaagcggaaagctaaggaggcagccccagccccacccaccgaggaagacatctggtttgacgacgtggacccagcggatatcgaagctgccataggtccagaggcggccaagatagcgaggaaacagttgggtcagagcgagggcagcgtcagcctcagcctcgtgaaagagcaggccttcggcggcctgacaagagccttagccttggactgtgagatggtgggcgtgggccctaagggggaggagagcatggccgcccgtgtgtccatcgtgaaccagtatgggaagtgcgtttatgacaagtacgtcaaaccaaccgagcccgtgacggactataggacagcggtcagtgggattcggcctgagaacctcaagcagggagaagagcttgaagttgttcagaaggaagtggcagagatgctgaagggcagaattctagtggggcacgctctgcataatgacctaaaggtactatttcttgatcatccaaaaaagaagattcgggacacacagaaatataaacctttcaagagtcaagtaaagagtggaaggccgtctctgagactactttcagagaagatccttgggctccaggtccagcaggcggagcactgttcaattcaggatgcccaggcagcaatgaggctgtacgtcatggtgaagaaggagtgggagagcatggcccgagacaggcgccccctgctgactgctccagaccactgcagtgacgacgcctagcagtcctgccctgctgctgctgccgccccgctacagaggcaatgtgaccagtcacagggacagatcacatctccccagagtggcaactctggtgaaaccttttcagaatcatggcagaggggcgtggcgtggtgctactgagaaggtcctccttcctcttgactttgtggtctgaaacctggtcttactgtccatgtgtgtttgggcccggatggtcagggtggggagcagggacggccatgggcacgcctggccacgctttaccgactgctgaccccctgggccaggtgaggttggggcctgtgggccgccagtccatacggtgctgtcactgcccatcttcggtgacaccctggggtgaggtgctcagcaccttcctctcgaggagccacattttcctcctttgtgttaggggacataacaagctctgctgggcttgagggacccagaccaggtgtctgcagtcagctcctgagacacagctggccggcacaacaggtgttacatcaggggtttcctgtggccgtttgaactttgagcatttatctaaattaaattggcccagggttggctggtgggtcacccagcagaggcttctccccatagcacgaggatgtgttgcctgggcacggtgactgcggttattcctggaggtcggcagacatgccaaccttgggctatttgagctggagaagctatgtgatgctagccggtggctttctgggctaggccccagtttgaggctcccctgggaactagagccaggaacagccagtggcactgacaaggggacggagtccaaggcgttattgggccacctgacagctggacagaaaaggggcagacacaccgaggatgcgatttaaaataaatgcagatgtttacttggaa

SEQ ID NO: 175551 - DNA, 833 bp, Homo sapiens
  Payload ID: 14480
  Gene Symbol: REXO4
  Gene Name: REX4 homolog, 3,-5, exonuclease
  ENST ID: ENST00000626857
  CDS Start-End: 134-833
ttttcctggacggggtccctgcggtgggtgtgtttcggcctggcctgggcaggcgcttgtgctgccagggcgccgggcccggggaggccggggtctcgggtggccgccggcccaggcgctggacggcagcaggatggggaaggcgaaggtccccgcctccaagcgcgccccgagcagccccgtggctaagccgggtcctgtcaagacgctcactcggaagaaaaacaagaagaaaaaaaggttttggaaaagcaaggcgcgggaagtaagcaagaagccagcaagcggccccggtgctgtggtgcgacctccaaaggcaccagaagacttttctcaaaactggaaggcgctgcaagaggttccaagatggacaggagggcgccagtacctcgcaccaaggccagtggaacagagcacaataagaaaggaaccaaggaaaggacaaatggtgatattgttccagaacgaggggacatcgagcataagaagcggaaagctaaggaggcagccccagccccacccaccgagagaagagcttgaagttgttcagaaggaagtggcagagatgctgaagggcagaattctagtggggcacgctctgcataatgacctaaaggtactatttcttgatcatccaaaaaagaagattcgggacacacagaaatataaacctttcaagagtcaagtaaagagtggaaggccgtctctgagactactttcagagaagatccttgggctccaggtccagcaggcggagcactgttcaattcaggatgcccaggcagcaatgaggctgtacgtcatggtgaagaaggagtgggagagcatggccc

SEQ ID NO: 175552 - DNA, 860 bp, Homo sapiens
  Payload ID: 14480
  Gene Symbol: REXO4
  Gene Name: REX4 homolog, 3,-5, exonuclease
  ENST ID: ENST00000627193
  CDS Start-End: 294-860
atactctgcacagtatctcagtgcagacattcctgtcttaacacacaggaccagtcaaattcccgtgggcagccccagggttctgtgggatttcttgaacaccaactcttcttccttctcccaagaaagaaaagcaaaataagtgaatggaagggatgtgtgctatagggaaactttggagtgttttctaattcatccaagaaagtcagcccttcagttctttacctatcacagaacagtggctgctgaaacaaaaatctcaggccccagaaaagcctcttgtcatctctcagatgggttccaaaaagaagcccaaaattatccagcaaaacaaaaaagagacctcgcctcaagtgaagggagaggagatgccggcaggaaaagaccaggaggccagcaggggctctgttccttcaggttccaagatggacaggagggcgccagtacctcgcaccaaggccagtggaacagagcacaataagaaaggaaccaaggaaaggacaaatggtgatattgttccagaacgaggggacatcgagcataagaagcggaaagctaaggaggcagccccagccccacccaccgaggaagacatctggtttgacgacgtggacccagcggatatcgaagctgccataggtccagaggcggccaagatagcgaggaaacagttgggtcagagcgagggcagcgtcagcctcagcctcgtgaaagagcaggccttcggcggcctgacaagagccttagccttggactgtgagatggtgggcgtgggccctaagggggaggagagcatggccgcccgtgtgtccatcgtgaaccagtatgggaagtgcgtttatgacaagtacgtcaaacca

SEQ ID NO: 175553 - DNA, 1899 bp, Homo sapiens
  Payload ID: 14480
  Gene Symbol: REXO4
  Gene Name: REX4 homolog, 3,-5, exonuclease
  ENST ID: ENST00000628678
  CDS Start-End: 253-1005
tgcgcggaaccagaggcagggatccggtttccagccggttgtggagagacgagcgcttccggggactggagcgtgcgtgctgaggtatgcgcaacgcgtgcggggtctcttccggagtcttttcctggacggggtccctgcggtgggtgtgtttcggcctggcctgggcaggcgcttgtgctgccagggcgccgggcccggggaggccggggtctcgggtggccgccggcccaggcgctggacggcagcaggatggggaaggcgaaggtccccgcctccaagcgcgccccgagcagccccgtggctaagccgggtcctgtcaagacgctcactcggaagaaaaacaagaagaaaaaaaggttttggaaaagcaaggcgcgggaagtaagcaagaagccagcaagcggccccggtgctgtggtgcgacctccaaaggcaccagaagacttttctcaaaactggaaggcgctgcaagaggttccaagatggacaggagggcgccagtacctcgcaccaaggccagtggaacagagcacaataagaaaggaaccaaggaaaggacaaatggtgatattgttccagaacgaggggacatcgagcataagaagcggaaagctaaggaggcagccccagccccacccaccgagagaagagcttgaagttgttcagaaggaagtggcagagatgctgaagggcagaattctagtggggcacgctctgcataatgacctaaaggtactatttcttgatcatccaaaaaagaagattcgggacacacagaaatataaacctttcaagagtcaagtaaagagtggaaggccgtctctgagactactttcagagaagatccttgggctccaggtccagcaggcggagcactgttcaattcaggatgcccaggcagcaatgaggctgtacgtcatggtgaagaaggagtgggagagcatggcccgagacaggcgccccctgctgactgctccagaccactgcagtgacgacgcctagcagtcctgccctgctgctgctgccgccccgctacagaggcaatgtgaccagtcacagggacagatcacatctccccagagtggcaactctggtgaaaccttttcagaatcatggcagaggggcgtggcgtggtgctactgagaaggtcctccttcctcttgactttgtggtctgaaacctggtcttactgtccatgtgtgtttgggcccggatggtcagggtggggagcagggacggccatgggcacgcctggccacgctttaccgactgctgaccccctgggccaggtgaggttggggcctgtgggccgccagtccatacggtgctgtcactgcccatcttcggtgacaccctggggtgaggtgctcagcaccttcctctcgaggagccacattttcctcctttgtgttaggggacataacaagctctgctgggcttgagggacccagaccaggtgtctgcagtcagctcctgagacacagctggccggcacaacaggtgttacatcaggggtttcctgtggccgtttgaactttgagcatttatctaaattaaattggcccagggttggctggtgggtcacccagcagaggcttctccccatagcacgaggatgtgttgcctgggcacggtgactgcggttattcctggaggtcggcagacatgccaaccttgggctatttgagctggagaagctatgtgatgctagccggtggctttctgggctaggccccagtttgaggctcccctgggaactagagccaggaacagccagtggcactgacaaggggacggagtccaaggcgttattgggccacctgacagctggacagaaaaggggcagacacaccgaggatgcgatttaaaataaatgcagatgtttacttggaatgg

SEQ ID NO: 175554 - DNA, 1899 bp, Homo sapiens; identical to SEQ ID NO: 175553
  Payload ID: 14481
  Gene Symbol: REXO4
  Gene Name: REX4 homolog, 3'-5' exonuclease
  Uniprot ID: Q9GZR2
  ENST ID: ENST00000371935
  CDS Start-End: 253-1005

SEQ ID NO: 175555 - DNA, 2360 bp, Homo sapiens; identical to SEQ ID NO: 175550
  Payload ID: 14481
  Gene Symbol: REXO4
  Gene Name: REX4 homolog, 3'-5' exonuclease
  Uniprot ID: Q9GZR2
  ENST ID: ENST00000371942
  CDS Start-End: 201-1469

SEQ ID NO: 175556 - DNA, 860 bp, Homo sapiens; identical to SEQ ID NO: 175552
  Payload ID: 14481
  Gene Symbol: REXO4
  Gene Name: REX4 homolog, 3'-5' exonuclease
  ENST ID: ENST00000445916
  CDS Start-End: 294-860

SEQ ID NO: 175557 - DNA, 833 bp, Homo sapiens; identical to SEQ ID NO: 175551
  Payload ID: 14481
  Gene Symbol: REXO4
  Gene Name: REX4 homolog, 3'-5' exonuclease
  ENST ID: ENST00000454825
  CDS Start-End: 134-833

SEQ ID NO: 175558 - DNA, 1828 bp, Homo sapiens
  Payload ID: 14482
  Gene Symbol: RFNG
  Gene Name: RFNG O-fucosylpeptide 3-beta-N-acetylglucosaminyltransferase
  Uniprot ID: Q9Y644
  ENST ID: ENST00000310496
  CDS Start-End: 9-1004
gcggccgcatgagccgcgcgcgtggggcgctgtgccgggcctgcctcgcgctggccgcggccctggccgcgctgctgttactgccgctgccgctgccccgcgcgcccgccccggcccggacccccgccccggccccgcgcgcgcccccgtcccggcccgctgcccccagcctgcggcctgacgacgtcttcatcgccgtcaagaccacccggaagaaccacgggccgcgcctgcggctgctgctgcgcacctggatctcccgggcccgccagcagacgtttatcttcaccgacggggacgaccctgagctcgagctccagggcggcgaccgtgtcatcaacaccaactgctcggcggtgcgcactcgtcaggccctctgctgcaagatgtccgtggagtatgacaagttcattgagtccgggcgcaagtggttttgccacgtggatgatgacaattatgtgaacgccaggagcctcctgcacctgctctccagcttctcacccagccaggacgtctacctggggcggcccagcctggaccaccccattgaggccaccgagagggtccagggtggcagaactgtgaccacggtcaagttctggtttgctactggtggggccgggttctgcctcagcagaggccttgccctcaagatgagcccatgggccagcctgggcagcttcatgagcacagctgagcaggtgcggctgccggatgactgcacagttggctacatcgtggaggggctcctgggcgcccgcctgctgcacagccccctcttccactctcacctggagaacctgcagaggctgccgcccgacaccctgctccagcaggttaccttgagccatgggggtcctgagaacccacataacgtggtgaacgtggctggaggcttcagcctgcatcaagaccccacacggtttaagtctatccattgtcttctgtacccagacacggactggtgtcccaggcagaaacagggcgccccgacctctcggtgacaccaaccaccccgacccagggctgcctggctctgtcccaggcgcggggaaccagagccccctatgggctcagtgggctccctcaggtgccacggccacaccagtgagatgcaggcacctggcagaccctctggctagcctgcagccccccctctcccagcccctggtgggctgcggtgatgggtgttttgggagaacgaagacagccaggctgatggccagggccgcagtgcccctccccccgacccagccccaaggttgatcccacgggaacaggcttccaccccagcacttgcgcacctgggagggagctgccatccgggctccattacctgttgctgaaggcgggtgctaggctggctgggtgtcaaggagcaggctccaggccaaggtcctggcccagccacggccattgcaagggctcagcctggcaggctttgtgggggacgccgccctctctgccgcaggctgggtgcacggccgggcaccacagtgggactcaggcccgggaaggtcatgttctcgaccagagctttgctcccagtccaggcgcctcattcggaggcctcttgactgggaccacagagatgttttctccgctctgacttgtggctcaggactactttctgggtcgtgctcctgccccactgtgcctgggcccataaacaacaggagccttttgttccgctgacctgcccatcccagcagacccacctccccgcctggtgccttccatggagggaaatgggacaggggccgtcatctcccctctgcctcctgctttgctgttgccgagcacgagtaaagcttttgttcttacttca

SEQ ID NO: 175559 - DNA, 994 bp, Homo sapiens
  Payload ID: 14482
  Gene Symbol: RFNG
  Gene Name: RFNG O-fucosylpeptide 3-beta-N-acetylglucosaminyltransferase
  ENST ID: ENST00000429557
  CDS Start-End: 204-821
cccggcccaggcccccggaggctccgcgcggggcgggtcggtctccggcctgggcagcgccccagaagcctcatagattgtttctcccccagacgtttatcttcaccgacggggacgaccctgagctcgagctccagggcggcgaccgtgtcatcaacaccaactgctcggcggtgcgcactcgtcaggccctctgctgcaagatgtccgtggagtatgacaagttcattgagtccgggcgcaagtggttttgccacgtggatgatgacaattatgtgaacgccaggagcctcctgcacctgctctccagcttctcacccagccaggacgtctacctggggcggcccagcctggaccaccccattgaggccaccgagagggtccagggtggcagaactgtgaccacggtcaagttctggtttgctactggtggggccgggttctgcctcagcagaggccttgccctcaagatgagcccatgggccagcctgggcagcttcatgagcacagctgagcaggtgcggctgccggatgactgcacagttggctacatcgtggaggggctcctgggcgcccgcctgctgcacagccccctcttccactctcacctggagaacctgcagaggctgccgcccgacaccctgctccagcaggttaccttgagccatgggggtcctgagaacccacataacgtggtgaacgtggctggaggcttcagcctgcatcaagaccccacacggtttaagtctatccattgtcttctgtacccagacacggactggtgtcccaggcagaaacagggcgccccgacctctcggtgacaccaaccaccccgacccagggctgcctggctctgtcccaggcgcggggaaccagagccccctatgggctcagtgggctccctcaggtgccacggccacaccagtgagatgcaggcacctggcagaccctctggctagcctgcagccccccctctcccagcccctggtgggct

SEQ ID NO: 175560 - DNA, 649 bp, Homo sapiens
  Payload ID: 14482
  Gene Symbol: RFNG
  Gene Name: RFNG O-fucosylpeptide 3-beta-N-acetylglucosaminyltransferase
  ENST ID: ENST00000578356
  CDS Start-End: 468-649
agaccacccggaagaaccacgggccgcgcctgcggctgctgctgcgcacctggatctcccgggcccgccagcagacgtttatcttcaccgacggggacgaccctgagctcgagctccagggcggtgagtgtcccccactccccggcgcccgcgggatctgccccccgagcctttctcgctccgaagccacggccccttcgctgctgtgggtgcctttctctgcccaggctcccgaggcccggggaggccccgacgctgcccaggtcacgcggcctgcggagggcccaccctgccagccaagctctgctccccaccagcctctcacactagccgcttcccggggcgtggggctagtgccacgtcccctgaagaagcgccagcagggaatccgcccttccaggccaggcgaccgtgtcatcaacaccaactgctcggcggtgcgcactcgtcaggccctctgctgcaagatgtccgtggagtatgacaagttcattgagtccgggcgcaagtggttttgccacgtggatgatgacaattatgtgaacgccaggagcctcctgcacctgctctccagcttctcacccagccaggacgtctacctggggcggcccagcctggaccaccccattgaggccaccgagagggtcca

SEQ ID NO: 175561 - DNA, 1117 bp, Homo sapiens
  Payload ID: 14483
  Gene Symbol: RFPL3S
  Gene Name: RFPL3 antisense
  ENST ID: ENST00000382084
  CDS Start-End: 60-269
caaagttcatagcaggttgaacatgcttgctgtcattttcacagattctggtctttcttatggggaacctgagttcctgcattaaagttcccccagaagatcaatggaaggtggattccaaagagtgggcaagtgaggaccccttctctgttaccaaggtgaccccaaggaacacagtaaatgtggcggcttatttggcctccccaggacggactggagcatcagtagtgcctgagttcatcaaaggacagatgctcaagacaccttgatcaccattaggtggaattgaaggagccaaaaatgggcgcagtggctcctcagcagagacgctcctgaatgtatagacatgggaaccactttcagcatcaaaaaaggaaacgttctgcatgcccatatccagaaaaatccccactcgctgtaacttgcggtctactaagaggaaagtcagcggcaccgtgctggcagagaggcggcttccatccctcaaactcacagtccagaatccaagctctgtggtcagctggatcttccctttgcagtgaacagattctctgcagactcccaggtcccattctgtgcttgttcccacgtccacctcccagtagtggcggccacaggtaaagcgaggggagcccaggatgcaaacggacacgtcaaatctctcggcaaggtcttgccgattctgtgtgatgagcccacttcggacgctcctgaggtcgtcagaaatgaggaggaagttgttggctgtgtcggcatccaaggtcatatccactgtgaaaaggaaaacaagttgctcagcaagtggacagaagccaaccccatgcctctcttctacttcaaaggcccaaatatctcctgactttagtttctttaattctgtttcttcctccaaaatcaaaacttttcatgaggaaacttccctatttcaaattttcataggtatgctttgtggcaatacgtgactcttattcacagtagcaattcttattttactttacgtcacgtgtttgcttcactgaacttttcttcatttagagtggagggtctctgaaggcagacaccatgcccccctttctaccaccttgatgtgtgaacaaataaatgataattaagacaa

SEQ ID NO: 175562 - DNA, 455 bp, Homo sapiens
  Payload ID: 14483
  Gene Symbol: RFPL3S
  Gene Name: RFPL3 antisense
  ENST ID: ENST00000382086
  CDS Start-End: 74-304
tgtgctgagtttttcaaagttcatagcaggttgaacatgcttgctgtcattttcacagattctggtctttcttatggggaacctgagttcctgcattaaagttcccccagaagatcaatggaaggtggattccaaagagtgggcaagtgaggaccccttctctgttaccaaggtgaccccaaggaacacagtaaatgaaattttaagaagatatagcctctacaccaagaggcacatgacacaacctggactctgggcaaaccaccgggtgcactcacatgaaggtaccgtggaaatttattaagttgatttaagaataacaattgtggattgtattcagtgtcccatatgttagaagaagctatagaggaggttaagccatatgtttaaatgtgccaaaatttttatttgcctaatcaagaggtattgctgaaatcacaaaattaaatatacat

SEQ ID NO: 175563 - DNA, 1295 bp, Homo sapiens
  Payload ID: 14483
  Gene Symbol: RFPL3S
  Gene Name: RFPL3 antisense
  ENST ID: ENST00000400234
  CDS Start-End: 151-447
tgagacgttgatgatgctcctatcaccatggttatgtgattgggtatatcttgccctcggtcctaactgccactgtctgtgctgagtttttcaaagttcatagcaggttgaacatgcttgctgtcattttcacagattctggtctttcttatggggaacctgagttcctgcattaaagttcccccagaagatcaatggaaggtggattccaaagagtgggcaagtgaggaccccttctctgttaccaaggtgaccccaaggaacacagtaaatgaaattttaagaagatatagcctctacaccaagaggcacatgacacaacctggactctgggcaaaccaccgggtgcactcacatgaagtggcggcttatttggcctccccaggacggactggagcatcagtagtgcctgagttcatcaaaggacagatgctcaagacaccttgatcaccattaggtggaattgaaggagccaaaaatgggcgcagtggctcctcagcagagacgctcctgaatgtatagacatgggaaccactttcagcatcaaaaaaggaaacgttctgcatgcccatatccagaaaaatccccactcgctgtaacttgcggtctactaagaggaaagtcagcggcaccgtgctggcagagaggcggcttccatccctcaaactcacagtccagaatccaagctctgtggtcagctggatcttccctttgcagtgaacagattctctgcagactcccaggtcccattctgtgcttgttcccacgtccacctcccagtagtggcggccacaggtaaagcgaggggagcccaggatgcaaacggacacgtcaaatctctcggcaaggtcttgccgattctgtgtgatgagcccacttcggacgctcctgaggtcgtcagaaatgaggaggaagttgttggctgtgtcggcatccaaggtcatatccactgtgaaaaggaaaacaagttgctcagcaagtggacagaagccaaccccatgcctctcttctacttcaaaggcccaaatatctcctgactttagtttctttaattctgtttcttcctccaaaatcaaaacttttcatgaggaaacttccctatttcaaattttcataggtatgctttgtggcaatacgtgactcttattcacagtagcaattcttattttactttacgtcacgtgtttgcttcactgaacttttcttcatttagagtggagggtctctgaaggcagacaccatgcccccctttctaccaccttgatgtgtgaacaaataaatgataattaagacaa

SEQ ID NO: 175564 - DNA, 489 bp, Homo sapiens
  Payload ID: 14483
  Gene Symbol: RFPL3S
  Gene Name: RFPL3 antisense
  ENST ID: ENST00000577714
  CDS Start-End: 281-489
ccgcaacctccacctcccgggttcaagcgattctcctgcctcagcctcctgagtagctgggattacaggtacaaccacagggctccccatgaggtgatgtcatcgaattttcctggctgaagagtcgtcctttgtgtacacacatgggagtttattttttcatctgcatatggacgcattcctgagacttcagaaacattctatggagaattgagaagagagtattttttgagccagaaagtgctttcctgtgaagtttgtatatattctggtctttcttatggggaacctgagttcctgcattaaagttcccccagaagatcaatggaaggtggattccaaagagtgggcaagtgaggaccccttctctgttaccaaggtgaccccaaggaacacagtaaatgaaattttaagaagatatagcctctacaccaagaggcacatgacacaacctggactctgggcaaaccaccgggtgcactcacatga

SEQ ID NO: 175565 - DNA, 433 bp, Homo sapiens
  Payload ID: 14483
  Gene Symbol: RFPL3S
  Gene Name: RFPL3 antisense
  Uniprot ID: P0C7P2
  ENST ID: ENST00000621921
  CDS Start-End: 53-376
cacgtccacctcccagtagtggcggccacaggtaaagcgaggggagcccaggatgcaaacggacacgtcaaatctctcggcaaggtcttgccgattctgtgtgatgagcccacttcggacgctcctgaggtcgtcagaaatgaggaggaagttgttggctgtgtcggcatccaaggtcatatccactgtgaaaaggaaaacaagttgctcagcaagtggacagaagccaaccccatgcctctcttctacttcaaaggcccaaatatctcctgactttagtttctttaattctgtttcttcctccaaaatcaaaacttttcatgaggaaacttccctatttcaaattttcataggtatgctttgtggcaatacgtgactcttattcacagtagcaattcttattttactttacgtcacgtgtttgcttcactga

SEQ ID NO: 175566 - DNA, 5108 bp, Homo sapiens
  Payload ID: 14484
  Gene Symbol: RFT1
  Gene Name: RFT1 homolog
  Uniprot ID: Q96AA3
  ENST ID: ENST00000296292
  CDS Start-End: 63-1688
cttatcgcgactaaacggagtggcggcggcatttcctggtgtctgagcctggcgcggaggctatgggcagccaggaggtgctgggccacgcggcccggctggcctcctccggtctcctcctgcaggtgttgtttcggttgatcacctttgtcttgaatgcatttattcttcgcttcctgtcaaaggaaatcgttggcgtagtaaatgtaagactaacgctgctttactcaaccaccctcttcctggccagagaggccttccgcagagcatgtctcagtgggggcacccagcgagactggagccagaccctcaacctgctgtggctaacagtccccctgggtgtgttttggtccttattcctgggctggatctggttgcagctgcttgaagtgcctgatcctaatgttgtccctcactatgcaactggagtggtgctgtttggtctctcggcagtggtggagcttctaggagagcccttttgggtcttggcacaagcacatatgtttgtgaagctcaaggtgattgcagagagcctgtcggtaattcttaagagcgttctgacagcttttctcgtgctgtggttgcctcactggggattgtacattttctctttggcccagcttttctataccacagttctggtgctctgctatgttatttatttcacaaagttactgggttccccagaatcaaccaagcttcaaactcttcctgtctccagaataacagatctgttacccaatattacaagaaatggagcgtttataaactggaaagaggctaaactgacttggagttttttcaaacagtctttcttgaaacagattttgacagaaggcgagcgatatgtgatgacatttttgaatgtattgaactttggtgatcagggtgtgtatgatatagtgaataatcttggctcccttgtggccagattaattttccagccaatagaggaaagtttttatatattttttgctaaggtgctggagaggggaaaggatgccacacttcagaagcaggaggacgttgctgtggctgctgcagtcttggagtccctgctcaagctggccctgctggccggcctgaccatcactgtttttggctttgcctattctcagctggctctggatatctacggagggaccatgcttagctcaggatccggtcctgttttgctgcgttcctactgtctctatgttctcctgcttgccatcaatggagtgacagagtgtttcacatttgctgccatgagcaaagaggaggtcgacaggtacaattttgtgatgctggccctgtcctcctcattcctggtgttatcctatctcttgacccgttggtgtggcagcgtgggcttcatcttggccaactgctttaacatgggcattcggatcacgcagagcctttgcttcatccaccgctactaccgaaggagcccccacaggcccctggctggcctgcacctatcgccagtcctgctcgggacatttgccctcagtggtggggttactgctgtttcggaggtattcctctgctgtgagcagggctggccagccagactggcacacattgctgtgggggccttctgtctgggagcaactctcgggacagcattcctcacagagaccaagctgatccatttcctcaggactcagttaggtgtgcccagacgcactgacaaaatgacatgacttcagggaagcctggacacccgaggcacctggaccagctatgggtagttctgtgggtggaacacattctgtgtaagagccccactgagggctctgcagcggagtgacagcaaccccagagatgaggcaccagagagtgccactgcatgagacacctgtgaccattcgaagtctgaaatgcggggggggagtttcatttttaagtgaagaccaaaagccctttaaaaataatagttttttatcattttatagtaatcagcattttctcttttactaatatactcattccttttgcgtatgattggcctttggagctacatgctccaacaaactatatcttaattgttaactgttaataattatctggcccagaaaaagagatgcagtgattttacccttcacaggaatattgaacttcttctgtaaaagagagagagaaacctctctctctcatgcaccacatggaaacagagtgtggccctgaagttgtggctttctttgtgtcaaaactgtggtctgagtttttagagaaggaaaaatgctactcagtgagaaatccaagaaatgaaaccaggaaggttttcagatcacatttcccagagtgagttcgggagaatcttgcctgtcgtgatcacactgttccccgccgccccaggtcagcacatacttgacccagagtgggctctcaggatttgttgattgaagggtgggtgaaagctggctggagactcctggcctggccacctgcaagaggcggactttgaagaaaactgtgatccagttgagccactttgtccctgaggggaatgctgctttgcagctttctgtaacttctcacatgggaattgcactggtgacagataaggtttaacagatgtacttttttatcctcagaataagacaaggcaaactctatatggctagtattactgagtcaggtccctcccgttgacccattaattccagcattgatcaatacaaccaaattccagccccaggacaagagtggcaggcatgggggcctggtactccaggctacagtgtgagcccaggtgttctgcaccttgcagcctgcacactgcaggtgaaatcatgagcagtgttctggagtgtgaagtgtttttatttttttgttaatgtattaattccttttagatattaacccccctcagaactatatgcacaaactataacttggatgttaataatcctgtcactcagtgccccaaaccttctgtgtctacacctagagagagggccagtaagggcaactcctatcatgcattaaaatgcatgtatttaaatctgcttgcccagagccagtacccaggggctaaggattaagacctgtcagtacaccaagactggggcccagtcacctggcaggtttttatctactcagagggagaatgctttgcactaagtgggagaaaagcagctaaatgcaaggtgtcctgagcaattagaggacctccaaagcatggcctcagtcatgccttcatcgggcaaggtcaggccagctcagaaaaatggatggtcccatagggtcaagtggagcacacacggaaggcagtcctccttccctcccatgtcctttctctgtccctggcatccacagaaagggaccttcagtcctcatgagctgcttctctgcagctgctgatcaccctcccggaaccctgcacctatcccgtgcccacctgaccccagactcaagcatgatcctcattctacctgcctcggaatcacctggattgcaagtcagaacatggcttcccaggacccactccaggccttcagggtctgtgtctcccaggaggagggctctgagattggcttttctggcaagcccacgtggctttgatgccaccaaggttggcatgccccattgtcttccttcgtgacaggcccaggaccatcatgctcatgctcacagtgcctgttctctgctccaggaacagagctgctgctctacaagcagccttgtgactccggggtctctgggagcaggactccccaggcttgtgctctctcagcttgagagaggctctatgtctgaaggcagtgctcactctctcatccctcccctgctgttcgcccagtgctgctgtcagggccagctcctcttgaaagacagccagccgcaaaggcagcccagggcttcttccggtgtcctgcttccctgtatctagggagagttgtacatgtggctgcgtgttttcccaggactagccctgccgcctgggctgtcagcactttggcagcaggtcctctgtggttctctgcctctggtgcctccctaaagctcagctggacctgaccaggcctctggcatttcccctgctggaccccctagagccacagctgtgcctcagggagcttgcatacatgtgggccagcctgcctcactttacccaagtggatttggggagcagaaatcatacttttggctttcaataccacttatagtgaggctacttctccatggaaacaagtctctgaggcacaacctttatgaaaggaaggagcattcgttggtgagaagaacagtatcgctgacttcctgtgctcctctggccacaggtaactgttggtcacttcagatttggcttggggtctctcagtgaggagctgctgctgtgctgtttaatgcttacctgatggcaacttctggctctggaaccgctactctgccctgttcccagccacttcccaacctgattcaagcagggcccctccttcctcctgtctttatttatttatttattgagacagagtctcactctgtcgcccaggctggagtgcagtagcgcgatctcggctcactgcgagctctgcctcctgggttcaagcgattctcttgcctcagcctcctgagtagctggggctacaggcgcctgccaccacacccggctaatttttgtatttttagtagagacagggtttcaccatattggccaggctggtcttgaactcctgaccttgtgatccgcccgcctcagcctcccaaagtgctgggattacaggcgtgagccaccgctcctggcctattcttttcttttcagagacaaggtctcactctctcctctcgcccaggctggagtgcagtggtgtcatcatagctcattgcagcctcaaactcctgggctcaagcaatcctcccacctcagcctcctgagtagctgggatcacaggtgtgtgctacctcacccagctaatttctaatttttttttgtagagactggatctcactgttgccttgaactcctgggctcaagtgatcctcctgcctcagcctcccaaagtgctgggattccagaccagccattttttttccttaatcatgcattcctgttgctagtttcacatcagtcccctggtttaataagaaataaaatattttcttcacacttttgaaaa

SEQ ID NO: 175567 - DNA, 1800 bp, Homo sapiens
  Payload ID: 14484
  Gene Symbol: RFT1
  Gene Name: RFT1 homolog
  ENST ID: ENST00000394738
  CDS Start-End: 54-1562
actaaacggagtggcggcggcatttcctggtgtctgagcctggcgcggaggctatgggcagccaggaggtgctgggccacgcggcccggctggcctcctccggtctcctcctgcaggtgttgtttcggttgatcacctttgtcttgaatgcatttattcttcgcttcctgtcaaaggaaatcgttggcgtagtaaatgtaagagtccccctgggtgtgttttggtccttattcctgggctggatctggttgcagctgcttgaagtgcctgatcctaatgttgtccctcactatgcaactggagtggtgctgtttggtctctcggcagtggtggagcttctaggagagcccttttgggtcttggcacaagcacatatgtttgtgaagctcaaggtgattgcagagagcctgtcggtaattcttaagagcgttctgacagcttttctcgtgctgtggttgcctcactggggattgtacattttctctttggcccagcttttctataccacagttctggtgctctgctatgttatttatttcacaaagttactgggttccccagaatcaaccaagcttcaaactcttcctgtctccagaataacagatctgttacccaatattacaagaaatggagcgtttataaactggaaagaggctaaactgacttggagttttttcaaacagtctttcttgaaacagattttgacagaaggcgagcgatatgtgatgacatttttgaatgtattgaactttggtgatcagggtgtgtatgatatagtgaataatcttggctcccttgtggccagattaattttccagccaatagaggaaagtttttatatattttttgctaaggtgctggagaggggaaaggatgccacacttcagaagcaggaggacgttgctgtggctgctgcagtcttggagtccctgctcaagctggccctgctggccggcctgaccatcactgtttttggctttgcctattctcagctggctctggatatctacggagggaccatgcttagctcaggatccggtcctgttttgctgcgttcctactgtctctatgttctcctgcttgccatcaatggagtgacagagtgtttcacatttgctgccatgagcaaagaggaggtcgacaggtacaattttgtgatgctggccctgtcctcctcattcctggtgttatcctatctcttgacccgttggtgtggcagcgtgggcttcatcttggccaactgctttaacatgggcattcggatcacgcagagcctttgcttcatccaccgctactaccgaaggagcccccacaggcccctggctggcctgcacctatcgccagtcctgctcgggacatttgccctcagtggtggggttactgctgtttcggaggtattcctctgctgtgagcagggctggccagccagactggcacacattgctgtgggggccttctgtctgggagcaactctcgggacagcattcctcacagagaccaagctgatccatttcctcaggactcagttaggtgtgcccagacgcactgacaaaatgacatgacttcagggaagcctggacacccgaggcacctggaccagctatgggtagttctgtgggtggaacacattctgtgtaagagccccactgagggctctgcagcggagtgacagcaaccccagagatgaggcaccagagagtgccactgcatgagacacctgtgaccattcgaagtctgaaatgcggggggggagtttcatttttaagtgaagaccaaaagccctttaaaaataatagtttt

SEQ ID NO: 175568 - DNA, 886 bp, Homo sapiens
  Payload ID: 14484
  Gene Symbol: RFT1
  Gene Name: RFT1 homolog
  ENST ID: ENST00000467048
  CDS Start-End: 12-886
gcgcggaggctatgggcagccaggaggtgctgggccacgcggcccggctggcctcctccggtctcctcctgcaggtgttgtttcggttgatcacctttgtcttgaatgcatttattcttcgcttcctgtcaaaggaaatcgttggcgtagtaaatgtaagactaacgctgctttactcaaccaccctcttcctggccagagaggccttccgcagagcatgtctcagtgggggcacccagcgagactggagccagaccctcaacctgctgtggctaacagtccccctgggtgtgttttggtccttattcctgggctggatctggttgcagctgcttgaagtgcctgatcctaatgttgtccctcactatgcaactggagtggtgctgtttggtctctcggcagtggtggagcttctaggagagcccttttgggtcttggcacaagcacatatgtttgtgaagctcaaggtgattgcagagagcctgtcggtaattcttaagagcgttctgacagcttttctcgtgctgtggttgcctcactggggattgtacattttctctttggcccaggcgtttataaactggaaagaggctaaactgacttggagttttttcaaacagtctttcttgaaacagattttgacagaaggcgagcgatatgtgatgacatttttgaatgtattgaactttggtgatcagggtgtgtatgatatagtgaataatcttggctcccttgtggccagattaattttccagccaatagaggaaagtttttatatattttttgctaaggtgctggagaggggaaaggatgccacacttcagaagcaggaggacgttgctgtggctgctgcagtcttggagtccctgctcaagctggccctgct

SEQ ID NO: 175569 - DNA, 1686 bp, Homo sapiens
  Payload ID: 14485
  Gene Symbol: RFX8
  Gene Name: RFX family member 8, lacking RFX DNA binding domain
  Uniprot ID: Q6ZV50
  ENST ID: ENST00000428343
  CDS Start-End: 121-1542
ataactccaacgctcaagcaagtcaaggacacccacggactcaacaccgcgaccagattggaaaaggtgttggtcgacaacttctgcatttgcgaagagtgcagcgtccctcgctgtctcatgtatgagatttacgtggagacctgtgggcaaaacactgagaaccaagtcaacccggccacctttgggaagtgtgaagatcattcaccgatgaagacagacccagttggatcccctttgtctgaattcaggagatgtccatttctggagcaagaacaggcaaagaaatactcctgtaatatgatggccttccttgctgacgaatactgcaactattgtcgagacattttacgaaatgtggaggacttgcttacttccttctggaagtctctgcagcaagacacagtcatgctgatgtcattgcctgacgtgtgccagctctttaaatgctacgacgtccagctgtacaagggaattgaggatgttctccttcatgacttcttggaagatgtttctattcagtacctgaaatctgtgcagttatttagtaagaaatttaagctgtggctccttaatgctttggaaggtgttccagccctcttgcagatctccaaactcaaagaagttactctatttgtcaaaagactaagaagaaagacgtacctttccaacatggctaagactatgcgaatggtattgaaaagtaagaggcgtgtcagcgttttgaagtcagatctacaggccatcatcaatcaaggcactttggctacttctaagaaagccctggcaagtgaccggagtggcgcagatgaactggagaacaacccagagatgaaatgtttaagaaacttaatttctttgctgggaacatcaacagatctcagggtattcctcagctgtctgtcttcacatctccaagcatttgtgttccagacaagcagaagcaaagaagagtttaccaaattggccgccagcttccagctgagatggaatcttcttctcactgctgtaagcaaagccatgaccctctgccacagagatagttttggctcctggcatctgtttcacttgttgcttttggaatatatgattcatatacttcagtcatgcctagaggaggaagaggaggaggaggacatggggactgtcaaggaaatgctaccagatgacccgactctcggccagccagaccaggcacttttccattctctgaattcctcactgtcgcaggcgtgtgccagccccagcatggagccactgggggtgatgcccacacacatgggccagggccgatatcccgtgggtgtgagcaacatggtcctcaggatcctgggcttcctggtggacactgccatgggcaataagctcatccaggtgctgttggaagatgaaaccactgaaagcgcagttaaactcagccttcctatgggacaagaagccctcataaccctaaaagatggacaacaatttgtgattcagatatcagatgtaccccaaagctctgaagatatttatttcagagaaaacaatgctaatgtgtgagattatttatttgaatagagaataagaaaactgatagacttgcattcttaaaaatattaaatactaaagtttttctattgacgaaagatgatgttatgtatataatagatgtagcattgtctattttatgtttatatgtatttc

SEQ ID NO: 175570 - DNA, 1907 bp, Homo sapiens
  Payload ID: 14485
  Gene Symbol: RFX8
  Gene Name: RFX family member 8, lacking RFX DNA binding domain
  ENST ID: ENST00000481179
  CDS Start-End: 121-582
ataactccaacgctcaagcaagtcaaggacacccacggactcaacaccgcgaccagattggaaaaggtgttggtcgacaacttctgcatttgcgaagagtgcagcgtccctcgctgtctcatgtatgagatttacgtggagacctgtgggcaaaacactgagaaccaagtcaacccggccacctttgggaagcttgtgagattggtttttccggaccttggcacccggaggctgggcactagaggaagtgccaggtatcattatgatggaatctgtatcaagaaaagctctttcttctatgcccagtattgctacctgataggtgaaaaaaggtatcacagtggagatgccattgcctttgaaaaatctactaattataacagcattatccaacaagaagcaacatgtgaagatcattcaccgatgaagacagacccagttggatcccctttgtctgaattcaggagatgtccatttctggagcaagaacaggcaaagaaatactcctgtaatatgatggccttccttgctgacgaatactgcaactattgtcgagacattttacgaaatgtgaggaactgagaacttgagagggtggaggacttgcttacttccttctggaagtctctgcagcaagacacagtcatgctgatgtcattgcctgacgtgtgccagctctttaaatgctacgacgtccagctgtacaagggaattgaggatgttctccttcatgacttcttggaagatgtttctattcagtacctgaaatctgtgcagttatttagtaagaaatttaagctgtggctccttaatgctttggaaggtgttccagccctcttgcagatctccaaactcaaagactatgcgaatggtattgaaaagtaagaggcgtgtcagcgttttgaagtcagatctacaggccatcatcaatcaaggcactttggctacttctaagaaagccctggcaagtgaccggagtggcgcagatgaactggagaacaacccagagatgaaatgtttaagaaacttaatttctttgctgggaacatcaacagatctcagggtattcctcagctgtctgtcttcacatctccaagcatttgtgttccagacaagcagaagcaaagaagagtttaccaaattggccgccagcttccagctgagatggaatcttcttctcactgctgtaagcaaagccatgaccctctgccacagagatagttttggctcctggcatctgtttcacttgttgcttttggaatatatgattcatatacttcagtcatgcctagaggaggaagaggaggaggaggacatggggactgtcaaggaaatgctaccagatgacccgactctcggccagccagaccaggcacttttccattctctgaattcctcactgtcgcaggcgtgtgccagccccagcatggagccactgggggtgatgcccacacacatgggccagggccgatatcccgtgggtgtgagcaacatggtcctcaggatcctgggcttcctggtggacactgccatgggcaataagctcatccaggtgctgttggaagatgaaaccactgaaagcgcagttaaactcagccttcctatgggacaagaagccctcataaccctaaaagatggacaacaatttgtgattcagatatcagatgtaccccaaagctctgaagatatttatttcagagaaaacaatgctaatgtgtgagattatttatttgaatagagaataagaaaactgatagacttgcattcttaaaaatattaaatactaaagtttttctattgacgaaagatgatgttatgtatataatagatgtagcattgtctattttatgtttatatgtatttcaaggaggtggtttcgataaaatatgtaaactgatttggagaat

SEQ ID NO: 175571 - DNA, 530 bp, Homo sapiens
  Payload ID: 14485
  Gene Symbol: RFX8
  Gene Name: RFX family member 8, lacking RFX DNA binding domain
  ENST ID: ENST00000484091
  CDS Start-End: 119-361
aactccaacgctcaagcaagtcaaggacacccacggactcaacaccgcgaccagattggaaaaggtgttggtcgacaacttctgcatttgcgaagagtgcagcgtccctcgctgtctcatgtatgagatttacgtggagacctgtgggcaaaacactgagaaccaagtcaacccggccacctttgggaagcttgtgagattggtttttccggaccttggcacccggaggctgggcactagaggaagtgccaggtatcattatgatggaatctgtatcaagaaaagctctttcttctatgcccagtattgctacctgataggtgaaaaaaggtatcacagtgtgaagatcattcaccgatgaagacagacccagttggatcccctttgtctgaattcaggagatgtccatttctggagcaagaacaggcaaagaaatactcctgtaatatgatggccttccttgctgacgaatactgcaactattgtcgagacattttacgaaatgtgaggaactgagaacttgagagggt

SEQ ID NO: 175572 - DNA, 4687 bp, Homo sapiens
  Payload ID: 14486
  Gene Symbol: RLTPR
  Gene Name: RGD motif, leucine rich repeats, tropomodulin domain and proline-rich containing
  Uniprot ID: Q6F5E8
  ENST ID: ENST00000334583
  CDS Start-End: 329-4636
ggcccgccacacccgcgaccctcccggccacgccactgcccaccccgacgtctaccctggcggagaagctcctgggcgacggggcgggcgggcaggtgggactcggcccccctcccacaaccccgctcccgggcaagctctcgagccgcgaggccggggcggggaggggccgggccgggggcggcctggcaggaagcggcgcgcaccttccgccgccggaggagcaggtggctgccgtgcgggtctgggccccaggcttcctgtgtgcgcgctcgtcctctgctgtttcccgccggagctcgttgggcctccccggcccgcccggcccatggcccagacccccgacggcatctcctgtgagctccgaggcgagatcaccaggttcctgtggcccaaagaggtggagctgctgctgaaaacctggctacccggggagggtgctgtgcaaaaccatgtcctggcactgctacgatggagagcctacctgctgcacaccacctgcctcccgctgagggtggactgcacgttcagctacctggaggtccaggccatggcgctgcaggagacaccccctcaggtcacctttgagctggagtccctgcgtgagctggtcctggagtttcctggtgtggccgccctggaacagctggcccagcacgtggctgcagccatcaagaaggtcttccctcgctcgacccttgggaagctattccggaggcccacaccagcctccatgctggctcggctggagagaagcagcccctcggagtccactgacccctgcagcccctgtggtggcttcttggagacatacgaggctctgtgtgactacaatggcttccctttccgagaggagattcagtgggacgtggacaccatttaccatcgccagggctgccgccatttcagcctgggagacttcagccacctcggcagtcgggacctggccttgagtgtggctgccctgtcctacaacctgtggttccggtgcctctcctgtgtggacatgaagctgagccttgaggtctcagaacagattctgcacatgatgagtcagtcatcacacctggaggagctggtgctggagacctgcagcctgaggggagactttgtccgacgactggcccaggcgctggcgggacactcaagctctgggctgcgggagctcagcctcgcggggaacctgctggatgaccgaggcatgactgcactcagcagacacctcgagcgttgtccaggagccctgaggagactcagcctggcccagacagggttgacaccgcgaggaatgagggctctgggccgggcactggccaccaatgccgccttcgactccaccctgacccacctggacctttctgggaatcctggggcgctgggggcctccgaggacagtgggggcctctatagcttcctgagccgtcctaacgtactgtcgttcctgaatctcgcaggcaccgacactgccctggacactgtgagggggtgctccgtggggggatggatgaccggcagggcggactggagggcgggacggggagggctcggtccccccgcgggtgtagccaacagcctccccccgcagctcttcgcagcggtatcccgaggctgctgcaccagccttacccacctcgacgcttcgaggaacgtcttctcccgcacgaagtcccgcgccgcgccggccgcgctgcagctcttcctcagccgcgcgcggacgctgcggcacctgggcctggcgggctgcaagctgccgcccgacgcgctcagagcccttttggatggcctcgcgctcaacacgcacctccgcgacctgcacctggacctcagcgcttgcgagctgcgctcggccggcgcccaggtgatacaagacttagtgtgcgacgcaggcgctgtgagctccctggatctggcggataacggcttcggctcagacatggtgactctggtgctggccatcgggagaagccggtccctgagacatgtggcgcttggaaggaacttcaacgtccggtgcaaggagaccctggacgacgtcctgcaccggattgtccagctcatgcaggacgacgattgtcctcttcagtctctgtcggtggctgagtctcggctgaagctgggtgccagcgtcctactccgggccctagccaccaatcctaacctgaccgcgctggatatcagcggcaacgccatgggggacgcgggcgccaagttgctggccaaggcgctgcgggtcaactcgaggctccggtctgtggtctgggaccggaaccacacatctgctttgggtctgctggacgtggcgcaggcgctggagcagaaccacagcctgaaggccatgcctctgccactgaacgacgtggcccaggcgcagcgcagccgcccggaactgacagcacgtgcagtccatcagatccaagcctgtctcttgaggaacaaccgcgcagaccctgcctcttctgaccacacgacccgccttcagccacttggtctggtctcagacccctcagagcaggaagtgaatgaattgtgtcagtcggtgcaggagcatgtggagctgctgggctgtggggctgggccccagggtgaagccgctgtgcgccaggccgaggatgccatccaaaatgccaacttctctctcagcattctccccattctatatgaagctggaagctccccaagccatcactggcagcttgggcagaagctggagggccttctgagacaggtgggcgaggtctgccgccaggacatccaggacttcactcaggccacactggacacagcaaggagcctctgcccacagatgctgcagggatccagctggagggagcagctagagggggtcctggcaggctcgaggggcctcccggagctgctcccagagcagctgctgcaagatgccttcactaggctcagggacatgcggctatcaatcacggggaccttggcagagagcattgtggctcaggctttggcaggcctgagtgcagcccgggatcagctggtggagagtctggctcagcaggcaacagtgacaatgccccctgccctaccagcaccggatggaggtgagcccagcctccttgagcctggggaattggaaggtcttttcttccccgaggagaaggaagaggagaaggagaaggatgacagtcctccacagaaatggcctgagctcagccacggtcttcacctggtccccttcattcacagtgctgctgaggaagcggagccggagcccgagctggcggctccgggagaagatgcagagccgcaggcggggccgtccgcgcgcggctctccgagccctgccgcccctgggcccccggccggcccgctgccccgcatggacctgccactggcggggcagcccctgcgccatccgacccgggcccggccgcggccgcgccgccagcaccaccaccgcccgccgccggggggcccccaggtacccccagccttgccgcaggaagggaatgggctcagtgcccgcgtggacgagggcgtggaggaattcttctccaaaaggctgatccagcaggatcgcctctgggcccccgaggaggacccggccactgaggggggcgccactcctgtcccccgtacactgcgaaagaagctgggcaccctctttgccttcaagaagcctcgttcaacgcggggtccacggactgatctagagaccagccctggggcagctccccgaacccgaaaaactacatttggcgacctactgcggccgccaacccgtcccagccgtggtgaggagcttggtggggctgagggggacaccagcagccctgaccctgccggcaggagccgacctcgctacacaagagatagcaaggcctactcgatgatactgctgcctgccgaggaggaggcaacgctgggtgccagacccgacaagcggcggcccctggagcggggagaaacagaactggctccatcctttgaacagcgggtacaagtaatgctgcagaggataggcgtcagccgaggcagcgggggtgccgaaggcaagaggaagcaaagcaaagatggcgagatcaagaaagctggctcagatggtgacattatggacagttccacggaggcccctcccatctcgatcaagtcccgcacccactctgtgtctgctgacccttcctgcagacctggcccagggagccaggggcctgagtctgccacctggaagacactggggcagcagttgaatgcggagctcaggagccgtggttggggccaacaggatggtccaggccctccctcccctggtcaaagcccaagtccctgcagaaccagcccctccccagacagcctgggcctcccagaggacccttgcttgggccccagaaatgaagatggccagctgaggccgaggcctctctcggcagggcggcgagcagtgtctgtgcatgaggaccagctccaggcccctgctgaacggcccctgaggctgcagcgctcccccgtcctcaaacgcaggccaaaactcgaggcacctccatccccaagcctaggatctggccttggaaccgagcctctgcccccacagcccacagagccctccagccctgagcggagcccaccctccccagccacagaccaaagaggcggcggccccaatccctgatcctctcctctcctgccgcatgagattattttattaaaaaactcaaaggaa

SEQ ID NO: 175573 - DNA, 4119 bp, Homo sapiens
  Payload ID: 14486
  Gene Symbol: RLTPR
  Gene Name: RGD motif, leucine rich repeats, tropomodulin domain and proline-rich containing
  Uniprot ID: Q6F5E8
  ENST ID: ENST00000545661
  CDS Start-End: 1-4119
atggcccagacccccgacggcatctcctgtgagctccgaggcgagatcaccaggttcctgtggcccaaagaggtggagctgctgctgaaaacctggctacccggggagggtgctgtgcaaaaccatgtcctggcactgctacgatggagagcctacctgctgcacaccacctgcctcccgctgagggtggactgcacgttcagctacctggaggtccaggccatggcgctgcaggagacaccccctcaggtcacctttgagctggagtccctgcgtgagctggtcctggagtttcctggtgtggccgccctggaacagctggcccagcacgtggctgcagccatcaagaaggtcttccctcgctcgacccttgggaagctattccggaggcccacaccagcctccatgctggctcggctggagagaagcagcccctcggagtccactgacccctgcagcccctgtggtggcttcttggagacatacgaggctctgtgtgactacaatggcttccctttccgagaggagattcagtgggacgtggacaccatttaccatcgccagggctgccgccatttcagcctgggagacttcagccacctcggcagtcgggacctggccttgagtgtggctgccctgtcctacaacctgtggttccggtgcctctcctgtgtggacatgaagctgagccttgaggtctcagaacagattctgcacatgatgagtcagtcatcacacctggaggagctggtgctggagacctgcagcctgaggggagactttgtccgacgactggcccaggcgctggcgggacactcaagctctgggctgcgggagctcagcctcgcggggaacctgctggatgaccgaggcatgactgcactcagcagacacctcgagcgttgtccaggagccctgaggagactcagcctggcccagacagggttgacaccgcgaggaatgagggctctgggccgggcactggccaccaatgccgccttcgactccaccctgacccacctggacctttctgggaatcctggggcgctgggggcctccgaggacagtgggggcctctatagcttcctgagccgtcctaacgtactgtcgttcctgaatctcgcaggcaccgacactgccctggacactctcttcgcagcggtatcccgaggctgctgcaccagccttacccacctcgacgcttcgaggaacgtcttctcccgcacgaagtcccgcgccgcgccggccgcgctgcagctcttcctcagccgcgcgcggacgctgcggcacctgggcctggcgggctgcaagctgccgcccgacgcgctcagagcccttttggatggcctcgcgctcaacacgcacctccgcgacctgcacctggacctcagcgcttgcgagctgcgctcggccggcgcccaggtgatacaagacttagtgtgcgacgcaggcgctgtgagctccctggatctggcggataacggcttcggctcagacatggtgactctggtgctggccatcgggagaagccggtccctgagacatgtggcgcttggaaggaacttcaacgtccggtgcaaggagaccctggacgacgtcctgcaccggattgtccagctcatgcaggacgacgattgtcctcttcagtctctgtcggtggctgagtctcggctgaagctgggtgccagcgtcctactccgggccctagccaccaatcctaacctgaccgcgctggatatcagcggcaacgccatgggggacgcgggcgccaagttgctggccaaggcgctgcgggtcaactcgaggctccggtctgtggtctgggaccggaaccacacatctgctttgggtctgctggacgtggcgcaggcgctggagcagaaccacagcctgaaggccatgcctctgccactgaacgacgtggcccaggcgcagcgcagccgcccggaactgacagcacgtgcagtccatcagatccaagcctgtctcttgaggaacaaccgcgcagaccctgcctcttctgaccacacgacccgccttcagccacttggtctggtctcagacccctcagagcaggaagtgaatgaattgtgtcagtcggtgcaggagcatgtggagctgctgggctgtggggctgggccccagggtgaagccgctgtgcgccaggccgaggatgccatccaaaatgccaacttctctctcagcattctccccattctatatgaagctggaagctccccaagccatcactggcagcttgggcagaagctggagggccttctgagacaggtgggcgaggtctgccgccaggacatccaggacttcactcaggccacactggacacagcaaggagcctctgcccacagatgctgcagggatccagctggagggagcagctagagggggtcctggcaggctcgaggggcctcccggagctgctcccagagcagctgctgcaagatgccttcactaggctcagggacatgcggctatcaatcacggggaccttggcagagagcattgtggctcaggctttggcaggcctgagtgcagcccgggatcagctggtggagagtctggctcagcaggcaacagtgacaatgccccctgccctaccagcaccggatggaggtgagcccagcctccttgagcctggggaattggaaggtcttttcttccccgaggagaaggaagaggagaaggagaaggatgacagtcctccacagaaatggcctgagctcagccacggtcttcacctggtccccttcattcacagtgctgctgaggaagcggagccggagcccgagctggcggctccgggagaagatgcagagccgcaggcggggccgtccgcgcgcggctctccgagccctgccgcccctgggcccccggccggcccgctgccccgcatggacctgccactggcggggcagcccctgcgccatccgacccgggcccggccgcggccgcgccgccagcaccaccaccgcccgccgccggggggcccccaggtacccccagccttgccgcaggaagggaatgggctcagtgcccgcgtggacgagggcgtggaggaattcttctccaaaaggctgatccagcaggatcgcctctgggcccccgaggaggacccggccactgaggggggcgccactcctgtcccccgtacactgcgaaagaagctgggcaccctctttgccttcaagaagcctcgttcaacgcggggtccacggactgatctagagaccagccctggggcagctccccgaacccgaaaaactacatttggcgacctactgcggccgccaacccgtcccagccgtggtgaggagcttggtggggctgagggggacaccagcagccctgaccctgccggcaggagccgacctcgctacacaagagatagcaaggcctactcgatgatactgctgcctgccgaggaggaggcaacgctgggtgccagacccgacaagcggcggcccctggagcggggagaaacagaactggctccatcctttgaacagcgggtacaagtaatgctgcagaggataggcgtcagccgaggcagcgggggtgccgaaggcaagaggaagcaaagcaaagatggcgagatcaagaaagctggctcagatggtgacattatggacagttccacggaggcccctcccatctcgatcaagtcccgcacccactctgtgtctgctgacccttcctgcagacctggcccagggagccaggggcctgagtctgccacctggaagacactggggcagcagttgaatgcggagctcaggagccgtggttggggccaacaggatggtccaggccctccctcccctggtcaaagcccaagtccctgcagaaccagcccctccccagacagcctgggcctcccagaggacccttgcttgggccccagaaatgaagaacggcccctgaggctgcagcgctcccccgtcctcaaacgcaggccaaaactcgaggcacctccatccccaagcctaggatctggccttggaaccgagcctctgcccccacagcccacagagccctccagccctgagcggagcccaccctccccagccacagaccaaagaggcggcggccccaatccctga

SEQ ID NO: 175574 - DNA, 953 bp, Homo sapiens
  Payload ID: 14486
  Gene Symbol: RLTPR
  Gene Name: RGD motif, leucine rich repeats, tropomodulin domain and proline-rich containing
  ENST ID: ENST00000602368
  CDS Start-End: 1-373
gcggccgccaacccgtcccagccgtggtgaggagcttggtggggctgagggggacaccagcagccctgaccctgccggcaggagccgacctcgctacacaagagatagcaaggcctactcgatgatactgctgcctgccgaggaggaggcaacgctgggtgccagacccgacaagcggcggcccctggagcggggagaaacagaactggctccatcctttgaacagcgggtacaagtaatgctgcagaggataggcgtcagccgaggcagcgggggtgccgaaggcaagaggaagcaaagcaaagatggcgagatcaagaaagctggctcagatggtctggtacctgagtccccagctccgccttgcaggtgacattatggacagttccacggaggcccctcccatctcgatcaagtcccgcacccactctgtgtctgctgacccttcctgcagacctggcccagggagccaggggcctgagtctgccacctggaagacactggggcagcagttgaatgcggagctcaggagccgtggttggggccaacaggatggtccaggccctccctcccctggtcaaagcccaagtccctgcagaaccagcccctccccagacagcctgggcctcccagaggacccttgcttgggccccagaaatgaagggcggcgagcagtgtctgtgcatgaggaccagctccaggcccctgctgaacggcccctgaggctgcagcgctcccccgtcctcaaacgcaggccaaaactcgaggcacctccatccccaagcctaggatctggccttggaaccgagcctctgcccccacagcccacagagccctccagccctgagcggagcccaccctccccagccacagaccaaagaggcggcggccccaatccctgatcctctcctctcctgccgcatgagattattttattaaaaaactcaaaggaa

SEQ ID NO: 175575 - DNA, 1048 bp, Homo sapiens
  Payload ID: 14486
  Gene Symbol: RLTPR
  Gene Name: RGD motif, leucine rich repeats, tropomodulin domain and proline-rich containing
  ENST ID: ENST00000602563
  CDS Start-End: 260-427
tcctgggcgacggggcgggcgggcaggtgggactcggcccccctcccacaaccccgctcccgggcaagctctcgagccgcgaggccggggcggggaggggccgggccgggggcggcctggcaggaagcggcgcgcaccttccgccgccggaggagcaggtggctgccgtgcgggtctgggccccaggcttcctgtgtgcgcgctcgtcctctgctgtttcccgccggagctcgttgggcctccccggcccgcccggcccatggcccagacccccgacggcatctcctgtgagctccgaggcactgctacgatggagagcctacctgctgcacaccacctgcctcccgctgagggtggactgcacgttcagctacctggaggtccaggccatggcgctgcaggagacaccccctcaggtcacctttgagctggagtccctgcgtgagctggtcctggagtttcctggtgtggccgccctggaacagctggcccagcacgtggctgcagccatcaagaaggtcttccctcgctcgacccttgggaagctattccggaggcccacaccagcctccatgctggctcggctggagagaagcagcccctcggagtccactgacccctgcagcccctgtggtggcttcttggagacatacgaggctctgtgtgactacaatggcttccctttccgagaggagattcagtgggacgtggacaccatttaccatcgccagggctgccgccatttcagcctgggagacttcagccacctcggcagtcgggacctggccttgagtgtggctgccctgtcctacaacctgtggttccggtgcctctcctgtgtggacatgaagctgagccttgaggtctcagaacagattctgcacatgatgagtcagtcatcacacctggaggagctggtgctggagacctgcagcctgaggggagactttgtccgacgactggcccaggcgctggcgggacactcaagctctgggctgcgggagctcagcctcgcggggaacctgctggatgaccgaggtatgactga

SEQ ID NO: 175576 - DNA, 7018 bp, Homo sapiens
  Payload ID: 14487
  Gene Symbol: RGP1
  Gene Name: RGP1 homolog, RAB6A GEF complex partner 1
  Uniprot ID: Q92546
  ENST ID: ENST00000378078
  CDS Start-End: 142-1317
agtcccgcctctaccgcccagcggacgccgccgccgccgccgccgccgcgtacctagccaggtccctgaggggcgggcagatgaggcctaggggtgccgatccctagtgtcgactatgcgagatctgattccggagctgccatgattgaagtggtagcagagctcagccggggtcctgtatttttggctggggaggcgctggagtgtgtagtgaccgtcaccaacccccttccgcccacggccacttctgcatccagtgaggccctggcctgggccagtgcccaaatccactgccagttccatgccagtgagagtcgagtagcactgcctcctcctgactctagtcagccagatgtccagcccgacagccagactgtctttctgccacaccgaggtgagaggggccagtgtatcctttctactccaccgaaaattctattctgtgacctgaggcttgatcctggagagtccaaatcatactcctacagtgaagtgctgcccatagagggaccaccctcctttcggggtcagtcagtcaagtacgtctacaaactgaccattggctgccagcgtgtcaactcccctatcactttactcagagtccctctgagggttcttgtgctgactggccttcaggatgtccggtttccccaggatgaggctgtagccccatccagtccattcttggaggaggatgaaggtgggaagaaagattcatggctagctgagctggctggggaacgcctaatggctgccacatcctgccgcagcctccatctatacaatatcagtgatggccgagggaaagttgggacgtttggcatcttcaaatctgtgtacagacttggcgaggacgtggtggggaccttaaacttaggggaaggaaccgtagcttgtttgcagttttcagtcagcttacagaccgaggagcgtgtacagcctgagtaccagcggcgacgtggggcagggggtgtcccctctgtgtcacatgtgactcacgcccggcaccaggaatcctgcctacatacaactagaaccagcttctccctcccaatccctctcagctccaccccaggcttctgtacagccattgtgtccttgaagtggagattgcattttgaatttgtaacgtcccgagaaccaggattggtactcctaccccctgtggaacagcccgaacctaccacctggacaggacctgagcaagtacctgtagacaccttcagctgggacctgcccatcaaggtgctgcctactagccccaccctggcctcatatgctgccccaggccccagcaccagcaccataaccatctgaaactggcccaccctggtgctagttccttccggatactgagaactcagcacctggactctaatgggacccactttttccacctggggtccaatgtcgtggacagtgagagtcgggctttcagctatagcattaatttatttgttcagaatacattggcagctgctagtggtttccctggaagtggcagcagcagtgagcagtcagcagatggatgatcagttgagtttagctggagtggggagcaggagccccaggaacaggggtgttggctgagccccattctgggtcaggccctccccctttgcagggcagccgagggtcagatttttgcaccaaggagaactggcaggttcctgcctcctgacgtacctcacacccagccgggaagtcgatgggatgctgggacctggggaaccaaggataggggaaggagtcagcacagtgaaaggctgcctttatccctgcccacatgttccctctctcacagttttccccccacagagcccctttcagtggccccttggtcctcctaactaagctgtcacctaccatatgtgggcctttttgttttataacaggagtattttctctccaggtccaccccaacctcccctgatttatagcctgaagccttatctttcacactagtgttggtcccttcaggtttggcccatcttgtattgctcttctgttcattcttacatcacagcaatctagtcactccctggtcatccctcagtcactcatatcagagtcattctctctggccatctttggtcactcacgtgtcacagcagcccacgccaacaggatgcagacaggtgcaatggaaacagtccttgcggagccaagactcacccagggtaaaatatttcccctcatagtgacagggggctagggaagaacgggaaatgttagtaggtgtaggagtgctgatgagaggcagaggctcttctggtctggggtggagacagtaagtacgcactatccccgtatttagtttgtctttcctgtttcacagctggaggaagcctgggtattttgacacgggatcatctgtaaggccccatcctccctgtgccctctctgctgctcctccattcctaacgcttcaccccactttaccttgagcttggaagtagcacttgctgtagactcctgggtgctggaggagtagagacatcaccaagcagatgatcccccagcctcctaggatccccttggcctgtccagcccagagcatccttagggccattgctgctgcacagccctctcagacccttcttggcctctgctcagctactctggtcttgactccttgactttgctttgcgttgctccttgagtcttagtttctgtctttctcccctgggctcctgtctcacactatctccctgccctctgctctcacaggctggggatgtttataaagtgaggaccctggccccctgctgagtagagctggaaaagttgtaactctgtttcctgaggtgagggcatgaaaacaagaggtctagctttaacaagctgtgagagctgattcatgccccggcacagctagagggagggaggtggccatggagggggcactggactgggcacttccccagcaaggaggcaggaggggcgagggcccccaggtggtccccagatctcttccctgacctggagagaaggaagcattccaccttccccctttctcccccactgccaccaccaggggtgtgtatgctgggatccctgcctggaccggagggaggcatttcctggggatggttaatcctgtgccccagccaaacccaggagctgcaatagggtgcgacggccagaagctccaggagagtgagcaggcacctggagtggagactgtgtttccctcagatcctagggcagggtttccctaatgtatccaagaaatagggctgcccctcagagatggtggggagggtctcttttcctcaggcattccagaggtgaactgtccattgcttatcaccttcaaacatacagcagatgtgggatcaccccacatctggggatggttctttcccctttcaaagaggagcatctctaagtgccctgatgggatgaatcactccaggttcacagaggtgtcctctctttcctcccatatataatggagtgaggtttttaggaatttatcatttggcatcctctgagtttcccacaggttctggaggagcccaggatggattattgagagcatgggctgtagagacagtcttcttggattcagatcctgactccacttagctatgtaacctggtcagattacttcacctctctgagcctgtttcctcatctataaattggggatagtaatgccaactcattgggctgttatgaggattactgagataatgcgtgcagtgctcttatcaccatctctggtgcgtaagcgtcaggaaatagcagttgctgtgattggggctaaagctctgaggcaaaatgggcgacattattttctttgaatgacattaagcagtttgtgcatagctgagggcttctattggggatggctgtctcctggcatagacctctgcacctttcacactcatactccttgtcagcagtccccaacctttttggtaccagggaccggttttgtggaaaacaatttttccaccagtggatggagggggatagcagcggggagatgattttgggatgaaactgtttcatctcagatcatcaggcattagattctcataaggagtgtgcaatctagatcccttgcatgcggagttcacagtggggtttgcactcctgtgagaatctaatgcctctgctgatctgccaggaggaggagctcaggcggtaatgctcactcgcctgccgcccacctcctgctttgtgctcccgcttcctaacaggccacagactggtactggcctgtggcctgggggatggagacccctaatccatgtcacctttcccacctctttcaaaaacaggtacctccaggaacattttggttttggcccttgtattgacttctgaatgtctagtttgagaaactgttcccaataagccttcttcccccagatctgcaccctcgcctctaccctaggacaagatgtccttttctcatcatcctgccaggctaactttaagtctcctgctttttctcacttggatttggatccatttcttcctatttccgctcatgtgaactctccagttctcctttctcaccactctcctgctagccatctctttggcactaaaggccctggtcaaattggatttctttcatttttccacacttcaaagacccatgttctaggtattctccatagggatagtctctttggcatttatttggtttttctacgttttcagtcccatttactccaagactcactccctgccacctagtgcatcagatacagctacttctggctgacttttcaagggggaccaccctacctgtcatctcttcactgttcagaaatgactgtgtcagtgcacctcaaactcccttgctgtccttttccaaggagacagctaaggtggatggagatgcagaatggacctcacgttcgccctagtcaggactgataccctttccgtttcagaggattgccaagaaaaaactcacagttgaggcagggtgctctgaggtcggctgcggtgtgggaggcacggcctgggcctgctctctgggctggagcaggtggattcgaaggcctgtctagcacgagggcccaaaggtcttgtcagtggccagtagctctgccgcctttcccagagagggggtccaggggacatcctggaaggctgggccctgggccaccttctgctcttgcaagctagagccagcccaatagggggcggatgtgagtggggagctggggcgcatgaaggtgggggtgatgccgaaggggaagggatcgccagtggggattggtgcgtgtgcggaaacggggacagaagtgaaggttcatcgcctataacgaagatgaggtaggcatataggggcttctggaaagctagaggctgggctgagccaggagtcctctcccagaagttggggggcggtgcagaggtgtgggtcgagcccgcatgcgtgcctgctggggagggggtgagtggtgaggaccaggcccgctgggtcctgggggcgcggtggctggcgcgcaggtcccggagggggcggctggcgcgcactacacgcttgggaacaaggaaaacatccgccggaggcccggccgggcggcgctccagcctcggggcaggtgcgcggagaggaagtgagagcattccggcccccccaccccaaccccggccgctggccctctggtgagtcacagccgacccccgccgccggagggagaggggagctgcgggccagagccccggagggtctggaggagccaggagggtttctgggagcagagggtcacttagtgggcttctgtcgtggtgtcgctacgggcgcgaaacggacactgaacacagtctgactgtatggaggcaggtggggagggatcccctgggagaacttggcgggccgagagcagaccccagggcaaggaggggcccccgagggggaaaccgggagtcgggcaggtggcgtaacccagaaagggaaggagagccggattgattggggtgagagaggaaggaagcacgccaagttaggcctgggagaactgagggacctgaggagggaggagggagaccaacacagggtgggaaggcggaaatggccaaaccccaggcatcaggtctgtccagaggctgacgtagacagtgaagggtgaagggtaggttttaggagtagggggagttatgattatttggttacattttgggattatttggtctcacaggtagaagggagcctgctggtctctgtgtaacggatggcttaaaagcaaggttgtctgcgtcttggattactgtctgccattcagcctttgccaaaaaatttggcactgatctgcacatttttatagtcatttaaaattgtatgactctgtcaaatgatttaagtaattttggtggatttttaaaaataaaaaaataaaaatagaaaagttgcacaatctaattcaatatttgacttaaaaccaaaagtgaggctctcagattggtaatatggtattcagcctttttcttgtttggcttttgtgccatttgcccctcactgacttgattgaattctttgtggctgatgcctcagtttttctggatcagtagtgctgcacttccacttttcctctccctcattttactgtctttatttttagccttttttctgtgtagccctctaacctgccctttatattttgaaccaaataaaacatttcttggaatgggagctttggactacagtatacagacaaacaactcacaattttagcatatgaggctactatcttctgtggatgtgtatgtaattatacagtttctgtatttatcctgtggctgatagaaaaagttaaagctgtttaattcaccatagtatttctacaacacagcaatttattagtctgacttctcttctaaaatcaactctaaaatggtattttgtacttgtctcagagacgaattctgccatgatccttatgatctgtgttatgttgggccaaaggtgattactttataaattataaagatccctaaactctgcattgcctttggtcccaaacaagcaaatctgggtcaattaatg

SEQ ID NO: 175577 - DNA, 1616 bp, Homo sapiens
  Payload ID: 14488
  Gene Symbol: RHCE
  Gene Name: Rh blood group, CcEe antigens
  ENST ID: ENST00000243186
  CDS Start-End: 87-1283
atcgctccctcaagccctcaagtaggtgttggagagaggggtgatgcctggtgctggtggaacccctgcacagagacggacacaggatgagctctaagtacccgcggtctgtccggcgctgcctgcccctctgcgccctaacactggaagcagctctcattctcctcttctatttttttacccactatgacgcttccttagaggatcaaaaggggctcgtggcatcctatcaagtcggccaagatctgaccgtgatggcggcccttggcttgggcttcctcacctcaaatttccggagacacagctggagcagtgtggccttcaacctcttcatgctggcgcttggtgtgcagtgggcaatcctgctggacggcttcctgagccagttccctcctgggaaggtggtcatcacactgttcagtattcggctggccaccatgagtgctatgtcggtgctgatctcagcgggtgctgtcttggggaaggtcaacttggcgcagttggtggtgatggtgctggtggaggtgacagctttaggcaccctgaggatggtcatcagtaatatcttcaacacagactaccacatgaacctgaggcacttctacgtgttcgcagcctattttgggctgactgtggcctggtgcctgccaaagcctctacccaagggaacggaggataatgatcagagagcaacgatacccagtttgtctgccatgctgggcgccctcttcttgtggatgttctggccaagtgtcaactctgctctgctgagaagtccaatccaaaggaagaatgccatgttcaacacctactatgctctagcagtcagtgtggtgacagccatctcagggtcatccttggctcacccccaaaggaagatcagcatgacttatgtgcacagtgcggtgttggcaggaggcgtggctgtgggtacctcgtgtcacctgatcccttctccgtggcttgccatggtgctgggtcttgtggctgggctgatctccatcgggggagccaagtgcctgccggtgtgttgtaaccgagtgctggggattccacatctccgtcatgcactccatcttcagcttgctgggtctgcttggagagatcacctacattgtgctgctggtgcttcatactgtctggaacggcaatggcatgattggcttccaggtcctcctcagcattggggaactcagcttggccatcgtgatagctctcacgtctggtctcctgacaggtttgctcctaaatctcaaaatatggaaagcacctcatgtggctaaatattttgatgaccaagttttctggaagtttcctcatttggctgttggattttaagcaaaagcatccaagaaaaacaaggcctgttcaaaaacaagacaacttcctctcactgttgcctgcatttgtacgtgagaaacgctcatgacagcaaagtctccttatgtataatgaaacaaggtcagagacagatttgatattaaaaaattaaagactaaaaacttagtttaagagtcaatttaataagtttaaaataaatgtttagtttcattaggatgatgctatcaatattttcttggttacagacacattattaaagttttgggttaatttta

SEQ ID NO: 175578 - DNA, 1591 bp, Homo sapiens
  Payload ID: 14488
  Gene Symbol: RHCE
  Gene Name: Rh blood group, CcEe antigens
  Uniprot ID: P18577
  ENST ID: ENST00000294413
  CDS Start-End: 60-1313
gttggagagaggggtgatgcctggtgctggtggaacccctgcacagagacggacacaggatgagctctaagtacccgcggtctgtccggcgctgcctgcccctctgcgccctaacactggaagcagctctcattctcctcttctatttttttacccactatgacgcttccttagaggatcaaaaggggctcgtggcatcctatcaagtcggccaagatctgaccgtgatggcggcccttggcttgggcttcctcacctcaaatttccggagacacagctggagcagtgtggccttcaacctcttcatgctggcgcttggtgtgcagtgggcaatcctgctggacggcttcctgagccagttccctcctgggaaggtggtcatcacactgttcagtattcggctggccaccatgagtgctatgtcggtgctgatctcagcgggtgctgtcttggggaaggtcaacttggcgcagttggtggtgatggtgctggtggaggtgacagctttaggcaccctgaggatggtcatcagtaatatcttcaacacagactaccacatgaacctgaggcacttctacgtgttcgcagcctattttgggctgactgtggcctggtgcctgccaaagcctctacccaagggaacggaggataatgatcagagagcaacgatacccagtttgtctgccatgctgggcgccctcttcttgtggatgttctggccaagtgtcaactctgctctgctgagaagtccaatccaaaggaagaatgccatgttcaacacctactatgctctagcagtcagtgtggtgacagccatctcagggtcatccttggctcacccccaaaggaagatcagcatgacttatgtgcacagtgcggtgttggcaggaggcgtggctgtgggtacctcgtgtcacctgatcccttctccgtggcttgccatggtgctgggtcttgtggctgggctgatctccatcgggggagccaagtgcctgccggtgtgttgtaaccgagtgctggggattcaccacatctccgtcatgcactccatcttcagcttgctgggtctgcttggagagatcacctacattgtgctgctggtgcttcatactgtctggaacggcaatggcatgattggcttccaggtcctcctcagcattggggaactcagcttggccatcgtgatagctctcacgtctggtctcctgacaggtttgctcctaaatctcaaaatatggaaagcacctcatgtggctaaatattttgatgaccaagttttctggaagtttcctcatttggctgttggattttaagcaaaagcatccaagaaaaacaaggcctgttcaaaaacaagacaacttcctctcactgttgcctgcatttgtacgtgagaaacgctcatgacagcaaagtctccttatgtataatgaaacaaggtcagagacagatttgatattaaaaaattaaagactaaaaacttagtttaagagtcaatttaataagtttaaaataaatgtttagtttcattaggatgatgctatcaatattttcttggttacagacacattattaaagttttgggttaatttta

SEQ ID NO: 175579 - DNA, 1810 bp, Homo sapiens
  Payload ID: 14488
  Gene Symbol: RHCE
  Gene Name: Rh blood group, CcEe antigens
  ENST ID: ENST00000349320
  CDS Start-End: 390-1595
atgcccggggcgtgtgcggcggtgcggcccgggctccacgtccacaggctgggcagcgctgtgggccccgcgggcgccgagtccgcaggacccgcgagggcactaccgcgaagcatcggcctccgggccgggccgggccggaccgggagcctgctcggcgggtccgggctcctgcaaggcggggacgcggggccggcgacccttcacgcttcgtactcattgagcgccgattttatgccaggcaccgtgctggatctcccagtgcctggaagagaaaacccattctgtttcgaagggcatccagagctggtcacagtggggacccaccctccttttccaggctacgccagaccctgggtgtgtgtacgtttcaatggaagtgaatttaaatgtactttataaatcaaagactttttctgagactttggagagttccagtaatgagagcttctcattgttatcaaagccagggctggagaccagtggcagtcggccaagatctgaccgtgatggcggcccttggcttgggcttcctcacctcaaatttccggagacacagctggagcagtgtggccttcaacctcttcatgctggcgcttggtgtgcagtgggcaatcctgctggacggcttcctgagccagttccctcctgggaaggtggtcatcacactgttcagtattcggctggccaccatgagtgctatgtcggtgctgatctcagcgggtgctgtcttggggaaggtcaacttggcgcagttggtggtgatggtgctggtggaggtgacagctttaggcaccctgaggatggtcatcagtaatatcttcaacacagactaccacatgaacctgaggcacttctacgtgttcgcagcctattttgggctgactgtggcctggtgcctgccaaagcctctacccaagggaacggaggataatgatcagagagcaacgatacccagtttgtctgccatgctgggcgccctcttcttgtggatgttctggccaagtgtcaactctgctctgctgagaagtccaatccaaaggaagaatgccatgttcaacacctactatgctctagcagtcagtgtggtgacagccatctcagggtcatccttggctcacccccaaaggaagatcagcatgacttatgtgcacagtgcggtgttggcaggaggcgtggctgtgggtacctcgtgtcacctgatcccttctccgtggcttgccatggtgctgggtcttgtggctgggctgatctccatcgggggagccaagtgcctgccggtgtgttgtaaccgagtgctggggattcaccacatctccgtcatgcactccatcttcagcttgctgggtctgcttggagagatcacctacattgtgctgctggtgcttcatactgtctggaacggcaatggcatgattggcttccaggtcctcctcagcattggggaactcagcttggccatcgtgatagctctcacgtctggtctcctgacaggtttgctcctaaatctcaaaatatggaaagcacctcatgtggctaaatattttgatgaccaagttttctggaagtttcctcatttggctgttggattttaagcaaaagcatccaagaaaaacaaggcctgttcaaaaacaagacaacttcctctcactgttgcctgcatttgtacgtgagaaacgctcatgacagcaaagtctccttatgtataatgaaacaaggtcagagacagatttgatattaaaaaattaaagactaaaaacttagtttaagagtcaatttaataagtttaaaataaatgtttagtttcatt

SEQ ID NO: 175580 - DNA, 1235 bp, Homo sapiens
  Payload ID: 14488
  Gene Symbol: RHCE
  Gene Name: Rh blood group, CcEe antigens
  ENST ID: ENST00000349438
  CDS Start-End: 20-1084
gcacagagacggacacaggatgagctctaagtacccgcggtctgtccggcgctgcctgcccctctgcgccctaacactggaagcagctctcattctcctcttctatttttttacccactatgacgcttccttagaggatcaaaaggggctcgtggcatcctatcaagtcggccaagatctgaccgtgatggcggcccttggcttgggcttcctcacctcaaatttccggagacacagctggagcagtgtggccttcaacctcttcatgctggcgcttggtgtgcagtgggcaatcctgctggacggcttcctgagccagttccctcctgggaaggtggtcatcacactgttcagtattcggctggccaccatgagtgctatgtcggtgctgatctcagcgggtgctgtcttggggaaggtcaacttggcgcagttggtggtgatggtgctggtggaggtgacagctttaggcaccctgaggatggtcatcagtaatatcttcaacacagactaccacatgaacctgaggcacttctacgtgttcgcagcctattttgggctgactgtggcctggtgcctgccaaagcctctacccaagggaacggaggataatgatcagagagcaacgatacccagtttgtctgccatgctgggcgccctcttcttgtggatgttctggccaagtgtcaactctgctctgctgagaagtccaatccaaaggaagaatgccatgttcaacacctactatgctctagcagtcagtgtggtgacagccatctcagggtcatccttggctcacccccaaaggaagatcagcatgacttatgtgcacagtgcggtgttggcaggaggcgtggctgtgggtacctcgtgtcacctgatcccttctccgtggcttgccatggtgctgggtcttgtggctgggctgatctccatcgggggagccaagtgcctgccggattggcttccaggtcctcctcagcattggggaactcagcttggccatcgtgatagctctcacgtctggtctcctgacaggtttgctcctaaatctcaaaatatggaaagcacctcatgtggctaaatattttgatgaccaagttttctggaagtttcctcatttggctgttggattttaagcaaaagcatccaagaaaaacaaggcctgttcaaaaacaagacaacttcctctcactgttgcctgcatttgtacgtgagaaacgctcatgacagca

SEQ ID NO: 175581 - DNA, 971 bp, Homo sapiens
  Payload ID: 14488
  Gene Symbol: RHCE
  Gene Name: Rh blood group, CcEe antigens
  ENST ID: ENST00000346452
  CDS Start-End: 7-807
cacaggatgagctctaagtacccgcggtctgtccggcgctgcctgcccctctgcgccctaacactggaagcagctctcattctcctcttctatttttttacccactatgacgcttccttagaggatcaaaaggggctcgtggcatcctatcaagtcggccaagatctgaccgtgatggcggcccttggcttgggcttcctcacctcaaatttccggagacacagctggagcagtgtggccttcaacctcttcatgctggcgcttggtgtgcagtgggcaatcctgctggacggcttcctgagccagttccctcctgggaaggtggtcatcacactgttcagtattcggctggccaccatgagtgctatgtcggtgctgatctcagcgggtgctgtcttggggaaggtcaacttggcgcagttggtggtgatggtgctggtggaggtgacagctttaggcaccctgaggatggtcatcagtaatatcttcaacgtgtgttgtaaccgagtgctggggattcaccacatctccgtcatgcactccatcttcagcttgctgggtctgcttggagagatcacctacattgtgctgctggtgcttcatactgtctggaacggcaatggcatgattggcttccaggtcctcctcagcattggggaactcagcttggccatcgtgatagctctcacgtctggtctcctgacaggtttgctcctaaatctcaaaatatggaaagcacctcatgtggctaaatattttgatgaccaagttttctggaagtttcctcatttggctgttggattttaagcaaaagcatccaagaaaaacaaggcctgttcaaaaacaagacaacttcctctcactgttgcctgcatttgtacgtgagaaacgctcatgacagcaaagtctccttatgtataatgaaacaaggtcagagacagatttgatattaaaaaattaaagactaaaaa

SEQ ID NO: 175582 - DNA, 1087 bp, Homo sapiens
  Payload ID: 14488
  Gene Symbol: RHCE
  Gene Name: Rh blood group, CcEe antigens
  ENST ID: ENST00000340849
  CDS Start-End: 10-813
ggacacaggatgagctctaagtacccgcggtctgtccggcgctgcctgcccctctgcgccctaacactggaagcagctctcattctcctcttctatttttttacccactatgacgcttccttagaggatcaaaaggggctcgtggcatcctatcaagtcggccaagatctgaccgtgatggcggcccttggcttgggcttcctcacctcaaatttccggagacacagctggagcagtgtggccttcaacctcttcatgctggcgcttggtgtgcagtgggcaatcctgctggacggcttcctgagccagttccctcctgggaaggtggtcatcacactgttcagtattcggctggccaccatgagtgctatgtcggtgctgatctcagcgggtgctgtcttggggaaggtcaacttggcgcagttggtggtgatggtgctggtggaggtgacagctttaggcaccctgaggatggtcatcagtaatatcttcaacacttatgtgcacagtgcggtgttggcaggaggcgtggctgtgggtacctcgtgtcacctgatcccttctccgtggcttgccatggtgctgggtcttgtggctgggctgatctccatcgggggagccaagtgcctgccggtgtgttgtaaccgagtgctggggattcaccacatctccgtcatgcactccatcttcagcttgctgggtctgcttggagagatcacctacattgtgctgctggtgcttcatactgtctggaacggcaatggcatgtttgctcctaaatctcaaaatatggaaagcacctcatgtggctaaatattttgatgaccaagttttctggaagtttcctcatttggctgttggattttaagcaaaagcatccaagaaaaacaaggcctgttcaaaaacaagacaacttcctctcactgttgcctgcatttgtacgtgagaaacgctcatgacagcaaagtctccttatgtataatgaaacaaggtcagagacagatttgatattaaaaaattaaagactaaaaacttagtttaagagtcaatttaataagtttaaaataaatgtttagtttcattagga

SEQ ID NO: 175583 - DNA, 1253 bp, Homo sapiens
  Payload ID: 14488
  Gene Symbol: RHCE
  Gene Name: Rh blood group, CcEe antigens
  ENST ID: ENST00000374352
  CDS Start-End: 1-909
atgagctctaagtacccgcggtctgtccggcgctgcctgcccctctgcgccctaacactggaagcagctctcattctcctcttctatttttttacccactatgacgcttccttagaggatcaaaaggggctcgtggcatcctatcaagtcggccaagatctgaccgtgatggcggcccttggcttgggcttcctcacctcaaatttccggagacacagctggagcagtgtggccttcaacctcttcatgctggcgcttggtgtgcagtgggcaatcctgctggacggcttcctgagccagttccctcctgggaaggtggtcatcacactgttcagtattcggctggccaccatgagtgctatgtcggtgctgatctcagcgggtgctgtcttggggaaggtcaacttggcgcagttggtggtgatggtgctggtggaggtgacagctttaggcaccctgaggatggtcatcagtaatatcttcaacacagactaccacatgaacctgaggcacttctacgtgttcgcagcctattttgggctgactgtggcctggtgcctgccaaagcctctacccaagggaacggaggataatgatcagagagcaacgatacccagtttgtctgccatgctgggcgccctcttcttgtggatgttctggccaagtgtcaactctgctctgctgagaagtccaatccaaaggaagaatgccatgttcaacacctactatgctctagcagtcagtgtggtgacagccatctcagggtcatccttggctcacccccaaaggaagatcagcatgacttatgtgcacagtgcggtgttggcaggaggcgtggctgtgggtacctcgtgtcacctgatcccttctccgtggcttgccatggtgctgggtcttgtggctgggtgatctccatcgggggagccaagtgcctgccggtgtgttgtaaccgagtgctggggattcaccacatctccgtcatgcactccatcttcagcttgctgggtctgcttggagagatcacctacattgtgctgctggtgcttcatactgtctggaacggcaatggcatgattggcttccaggtcctcctcagcattggggaactcagcttggccatcgtgatagctctcacgtctggtctcctgacaggtttgctcctaaatctcaaaatatggaaagcacctcatgtggctaaatattttgatgaccaagttttctggaagtttcctcatttggctgttggattttaa

SEQ ID NO: 175584 - DNA, 1198 bp, Homo sapiens
  Payload ID: 14488
  Gene Symbol: RHCE
  Gene Name: Rh blood group, CcEe antigens
  ENST ID: ENST00000413854
  CDS Start-End: 21-1139
tgcacagagacggacacaggatgagctctaagtacccgcggtctgtccggcgctgcctgcccctctgcgccctaacactggaagcagctctcattctcctcttctatttttttacccactatgacgcttccttagaggatcaaaaggggctcgtggcatcctatcaagtcggccaagatctgaccgtgatggcggcccttggcttgggcttcctcacctcaaatttccggagacacagctggagcagtgtggccttcaacctcttcatgctggcgcttggtgtgcagtgggcaatcctgctggacggcttcctgagccagttccctcctgggaaggtggtcatcacactgttcagtattcggctggccaccatgagtgctatgtcggtgctgatctcagcgggtgctgtcttggggaaggtcaacttggcgcagttggtggtgatggtgctggtggaggtgacagctttaggcaccctgaggatggtcatcagtaatatcttcaacacagactaccacatgaacctgaggcacttctacgtgttcgcagcctattttgggctgactgtggcctggtgcctgccaaagcctctacccaagggaacggaggataatgatcagagagcaacgatacccagtttgtctgccatgctgggcgccctcttcttgtggatgttctggccaagtgtcaactctgctctgctgagaagtccaatccaaaggaagaatgccatgttcaacacctactatgctctagcagtcagtgtggtgacagccatctcagggtcatccttggctcacccccaaaggaagatcagcatgacttatgtgcacagtgcggtgttggcaggaggcgtggctgtgggtacctcgtgtcacctgatcccttctccgtggcttgccatggtgctgggtcttgtggctgggctgatctccatcgggggagccaagtgcctgccggtgtgttgtaaccgagtgctggggattcaccacatctccgtcatgcactccatcttcagcttgctgggtctgcttggagagatcacctacattgtgctgctggtgcttcatactgtctggaacggcaatggcatgtttgctcctaaatctcaaaatatggaaagcacctcatgtggctaaatattttgatgaccaagttttctggaagtttcctcatttggctgttggattttaagcaa

SEQ ID NO: 175585 - DNA, 456 bp, Homo sapiens
  Payload ID: 14488
  Gene Symbol: RHCE
  Gene Name: Rh blood group, CcEe antigens
  ENST ID: ENST00000527747
  CDS Start-End: 1-233
cgggtgctgtcttggggaaggtcaacttggcgcagttggtggtgatggtgctggtggaggtgacagctttaggcaccctgaggatggtcatcagtaatatcttcaacgattggcttccaggtcctcctcagcattggggaactcagcttggccatcgtgatagctctcacgtctggtctcctgacaggtttgctcctaaatctcaaaatatggaaagcacctcatgtggctaaatattttgatgaccaagttttctggaagtttcctcatttggctgttggattttaagcaaaagcatccaagaaaaacaaggcctgttcaaaaacaagacaacttcctctcactgttgcctgcatttgtacgtgagaaacgctcatgacagcaaagtctccttatgtataatgaaacaaggtcagagacagatttgatattaaaaaattaaagactaaaaactta

SEQ ID NO: 175586 - DNA, 581 bp, Homo sapiens
  Payload ID: 14488
  Gene Symbol: RHCE
  Gene Name: Rh blood group, CcEe antigens
  ENST ID: ENST00000533771
  CDS Start-End: 11-178
cggacacaggatgagctctaagtacccgcggtctgtccggcgctgcctgcccctctgcgccctaacactggaagcagctctcattctcctcttctatttttttacccactatgacgcttccttagaggatcaaaaggggctcgtggcatcctatcaagtattcggctggccaccatgagtgctatgtcggtgctgatctcagcgggtgctgtcttggggaaggtcaacttggcgcagttggtggtgatggtgctggtggaggtgacagctttaggcaccctgaggatggtcatcagtaatatcttcaacacttatgtgcacagtgcggtgttggcaggaggcgtggctgtgggtacctcgtgtcacctgatcccttctccgtggcttgccatggtgctgggtcttgtggctgggctgatctccatcgggggagccaagtgcctgccggtgtgttgtaaccgagtgctggggattcaccacatctccgtcatgcactccatcttcagcttgctgggtctgcttggagagatcacctacattgtgctgctggtgcttcatactgtctggaacggcaatggcat

SEQ ID NO: 175587 - DNA, 2930 bp, Homo sapiens
  Payload ID: 14489
  Gene Symbol: RHD
  Gene Name: Rh blood group, D antigen
  Uniprot ID: Q02161
  ENST ID: ENST00000328664
  CDS Start-End: 156-1409
aactccatagagaggccagcacaaccagccttgcagcctgagataaggcctttggcgggtgtctcccctatcgctccctcaagccctcaagtaggtgttggagagaggggtgatgcctggtgctggtggaacccctgcacagagacggacacaggatgagctctaagtacccgcggtctgtccggcgctgcctgcccctctgggccctaacactggaagcagctctcattctcctcttctatttttttacccactatgacgcttccttagaggatcaaaaggggctcgtggcatcctatcaagttggccaagatctgaccgtgatggcggccattggcttgggcttcctcacctcgagtttccggagacacagctggagcagtgtggccttcaacctcttcatgctggcgcttggtgtgcagtgggcaatcctgctggacggcttcctgagccagttcccttctgggaaggtggtcatcacactgttcagtattcggctggccaccatgagtgctttgtcggtgctgatctcagtggatgctgtcttggggaaggtcaacttggcgcagttggtggtgatggtgctggtggaggtgacagctttaggcaacctgaggatggtcatcagtaatatcttcaacacagactaccacatgaacatgatgcacatctacgtgttcgcagcctattttgggctgtctgtggcctggtgcctgccaaagcctctacccgagggaacggaggataaagatcagacagcaacgatacccagtttgtctgccatgctgggcgccctcttcttgtggatgttctggccaagtttcaactctgctctgctgagaagtccaatcgaaaggaagaatgccgtgttcaacacctactatgctgtagcagtcagcgtggtgacagccatctcagggtcatccttggctcacccccaagggaagatcagcaagacttatgtgcacagtgcggtgttggcaggaggcgtggctgtgggtacctcgtgtcacctgatcccttctccgtggcttgccatggtgctgggtcttgtggctgggctgatctccgtcgggggagccaagtacctgccggggtgttgtaaccgagtgctggggattccccacagctccatcatgggctacaacttcagcttgctgggtctgcttggagagatcatctacattgtgctgctggtgcttgataccgtcggagccggcaatggcatgattggcttccaggtcctcctcagcattggggaactcagcttggccatcgtgatagctctcatgtctggtctcctgacaggtttgctcctaaatcttaaaatatggaaagcacctcatgaggctaaatattttgatgaccaagttttctggaagtttcctcatttggctgttggattttaagcaaaagcatccaagaaaaacaaggcctgttcaaaaacaagacaacttcctctcactgttgcctgcatttgtacgtgagaaacgctcatgacagcaaagtctccaatgttcgcgcaggcactggagtcagagaaaatggagttgaatcctttctctgccactctttgaggagaatctcaccatttattatgcactgtagaatacaacaataaaatacagccatgtaccacataacaacatcttggtaaacaacagactgcatatatgatggtggtcatccagtaagctaaggttaatttattattattccttgtttttttttttttttttttttttttgagatgtagtcttactctgtcacccaggctagagtgcaatggcaccatcttggctcactgcaacctctacctcctgggttcaagcaaatctcctgcctcagcctccaaagtagctgggattacaggcacccaccacatctggctaattttttgtatttttagtaaagatggggtttcaccatgttggccaggctgatctcaaactcctgacctcaagtgatctgcccgcctcggcctcccaaagtgctggaaccacaggcctgagccactgtgcccagccttgtttgcttttttaacagataacagtgtgctcatagaaactgctttgacatgactgcaatcatgtgcttcatagaaacttaattagattataccactagagtcttcagatttttatactttttttttttgaaacggagtctcactctgtcaccaggctggagtgcagtgccgcaatctcggctcactgcaacctccgcctcccaggttcaagcaattctcctgcctcagcctcccgagtagctggaattacaagtgcgcactaccacacccagctaatttttgcatttttacttgacagggtttcaccatgttggctaggatagtttcaccaggatctcttggcctcatgatcagcctgcctcggcctcccaaagtgctgggattacaggtgtgagccaccgtgcccagcctatacttccctttttgaataccatttggtgttttgaagaattaacagctttgtgaacgtggcagtgcttgtgattcaggcttccattgagaccaaggggagaacctggttgcaggacaaacagacggacagcgtgtggcagtgtttaaatgctcttctgaaggctgatacgacagctctctgtgcactgattgcatatgcatcccaagattatattattgttttctactgctatgtgtcacactttgccaaacaggatgtggaaaatgaataagcggttttcttaggcacttcttaacagacaattggtcaaaatgaactccattgcttaagaaacacataaacaccatttagtcactgaacatagctatatgtatggttgttactatgggaaatcttgttttgccaattttctttgaaaattctggcagaccaaggttctttttgtttacataatacttgaaaaataaaaatgaacaagctaacaaacta

SEQ ID NO: 175588 - DNA, 1557 bp, Homo sapiens
  Payload ID: 14489
  Gene Symbol: RHD
  Gene Name: Rh blood group, D antigen
  Uniprot ID: Q02161
  ENST ID: ENST00000342055
  CDS Start-End: 1-1482
atgagctctaagtacccgcggtctgtccggcgctgcctgcccctctgggccctaacactggaagcagctctcattctcctcttctatttttttacccactatgacgcttccttagaggatcaaaaggggctcgtggcatcctatcaagttggccaagatctgaccgtgatggcggccattggcttgggcttcctcacctcgagtttccggagacacagctggagcagtgtggccttcaacctcttcatgctggcgcttggtgtgcagtgggcaatcctgctggacggcttcctgagccagttcccttctgggaaggtggtcatcacactgttcagtattcggctggccaccatgagtgctttgtcggtgctgatctcagtggatgctgtcttggggaaggtcaacttggcgcagttggtggtgatggtgctggtggaggtgacagctttaggcaacctgaggatggtcatcagtaatatcttcaacacagactaccacatgaacatgatgcacatctacgtgttcgcagcctattttgggctgtctgtggcctggtgcctgccaaagcctctacccgagggaacggaggataaagatcagacagcaacgatacccagtttgtctgccatgctgggcgccctcttcttgtggatgttctggccaagtttcaactctgctctgctgagaagtccaatcgaaaggaagaatgccgtgttcaacacctactatgctgtagcagtcagcgtggtgacagccatctcagggtcatccttggctcacccccaagggaagatcagcaagacttatgtgcacagtgcggtgttggcaggaggcgtggctgtgggtacctcgtgtcacctgatcccttctccgtggcttgccatggtgctgggtcttgtggctgggctgatctccgtcgggggagccaagtacctgccggggtgttgtaaccgagtgctggggattccccacagctccatcatgggctacaacttcagcttgctgggtctgcttggagagatcatctacattgtgctgctggtgcttgataccgtcggagccggcaatggcatgtcactcggctggaacctggctgtaaaaatggctgaagcaggtgatgaggagctgatgcgtttggacgtgtctcagagaaatcatggaggcgctgcggttcctaccggttcttggatgccttctacagagacaaccatagccccaaattatagggatcacatatcagtggtttcctcatttggctgttggattttaagcaaaagcatccaagaaaaacaaggcctgttcaaaaacaagacaacttcctctcactgttgcctgcatttgtacgtgagaaacgctcatgacagcaaagtctccaatgttcgcgcaggcactggagtcagagaaaatggagttgaatcctttctctgccactctttgaggagaatctcaccatttattatgcactgtagaatacaacaataaaatacagccatgtaccacataacaacatcttggtaaacaacagactgcatatatgatggtggtcatccagtaagc

SEQ ID NO: 175589 - DNA, 1387 bp, Homo sapiens
  Payload ID: 14489
  Gene Symbol: RHD
  Gene Name: Rh blood group, D antigen
  Uniprot ID: Q02161
  ENST ID: ENST00000357542
  CDS Start-End: 1-1191
atgagctctaagtacccgcggtctgtccggcgctgcctgcccctctgggccctaacactggaagcagctctcattctcctcttctatttttttacccactatgacgcttccttagaggatcaaaaggggctcgtggcatcctatcaagttggccaagatctgaccgtgatggcggccattggcttgggcttcctcacctcgagtttccggagacacagctggagcagtgtggccttcaacctcttcatgctggcgcttggtgtgcagtgggcaatcctgctggacggcttcctgagccagttcccttctgggaaggtggtcatcacactgttcagtattcggctggccaccatgagtgctttgtcggtgctgatctcagtggatgctgtcttggggaaggtcaacttggcgcagttggtggtgatggtgctggtggaggtgacagctttaggcaacctgaggatggtcatcagtaatatcttcaacacagactaccacatgaacatgatgcacatctacgtgttcgcagcctattttgggctgtctgtggcctggtgcctgccaaagcctctacccgagggaacggaggataaagatcagacagcaacgatacccagtttgtctgccatgctgggcgccctcttcttgtggatgttctggccaagtttcaactctgctctgctgagaagtccaatcgaaaggaagaatgccgtgttcaacacctactatgctgtagcagtcagcgtggtgacagccatctcagggtcatccttggctcacccccaagggaagatcagcaagacttatgtgcacagtgcggtgttggcaggaggcgtggctgtgggtacctcgtgtcacctgatcccttctccgtggcttgccatggtgctgggtcttgtggctgggctgatctccgtcgggggagccaagtacctgccggggtgttgtaaccgagtgctggggattccccacagctccatcatgggctacaacttcagcttgctgggtctgcttggagagatcatctacattgtgctgctggtgcttgataccgtcggagccggcaatggcattttcctcatttggctgttggattttaagcaaaagcatccaagaaaaacaaggcctgttcaaaaacaagacaacttcctctcactgttgcctgcatttgtacgtgagaaacgctcatgacagcaaagtctccaatgttcgcgcaggcactggagtcagagaaaatggagttgaatcctttctctgccactctttgaggagaatctcaccatttattatgcactgtagaatacaacaataaaatacagccatgtaccacataacaacatcttggtaaacaacagactgcatatatgatggtggtcatccagtaagc

SEQ ID NO: 175590 - DNA, 1333 bp, Homo sapiens
  Payload ID: 14489
  Gene Symbol: RHD
  Gene Name: Rh blood group, D antigen
  Uniprot ID: Q02161
  ENST ID: ENST00000417538
  CDS Start-End: 1-1137
atgagctctaagtacccgcggtctgtccggcgctgcctgcccctctgggccctaacactggaagcagctctcattctcctcttctatttttttacccactatgacgcttccttagaggatcaaaaggggctcgtggcatcctatcaagttggccaagatctgaccgtgatggcggccattggcttgggcttcctcacctcgagtttccggagacacagctggagcagtgtggccttcaacctcttcatgctggcgcttggtgtgcagtgggcaatcctgctggacggcttcctgagccagttcccttctgggaaggtggtcatcacactgttcagtattcggctggccaccatgagtgctttgtcggtgctgatctcagtggatgctgtcttggggaaggtcaacttggcgcagttggtggtgatggtgctggtggaggtgacagctttaggcaacctgaggatggtcatcagtaatatcttcaacacagactaccacatgaacatgatgcacatctacgtgttcgcagcctattttgggctgtctgtggcctggtgcctgccaaagcctctacccgagggaacggaggataaagatcagacagcaacgatacccagtttgtctgccatgctgggcgccctcttcttgtggatgttctggccaagtttcaactctgctctgctgagaagtccaatcgaaaggaagaatgccgtgttcaacacctactatgctgtagcagtcagcgtggtgacagccatctcagggtcatccttggctcacccccaagggaagatcagcaagacttatgtgcacagtgcggtgttggcaggaggcgtggctgtgggtacctcgtgtcacctgatcccttctccgtggcttgccatggtgctgggtcttgtggctgggctgatctccgtcgggggagccaagtacctgccggattggcttccaggtcctcctcagcattggggaactcagcttggccatcgtgatagctctcatgtctggtctcctgacagtttcctcatttggctgttggattttaagcaaaagcatccaagaaaaacaaggcctgttcaaaaacaagacaacttcctctcactgttgcctgcatttgtacgtgagaaacgctcatgacagcaaagtctccaatgttcgcgcaggcactggagtcagagaaaatggagttgaatcctttctctgccactctttgaggagaatctcaccatttattatgcactgtagaatacaacaataaaatacagccatgtaccacataacaacatcttggtaaacaacagactgcatatatgatggtggtcatccagtaagc

SEQ ID NO: 175591 - DNA, 1637 bp, Homo sapiens
  Payload ID: 14489
  Gene Symbol: RHD
  Gene Name: Rh blood group, D antigen
  ENST ID: ENST00000423810
  CDS Start-End: 1-1296
atgagctctaagtacccgcggtctgtccggcgctgcctgcccctctgggccctaacactggaagcagctctcattctcctcttctatttttttacccactatgacgcttccttagaggatcaaaaggggctcgtggcatcctatcaagttggccaagatctgaccgtgatggcggccattggcttgggcttcctcacctcgagtttccggagacacagctggagcagtgtggccttcaacctcttcatgctggcgcttggtgtgcagtgggcaatcctgctggacggcttcctgagccagttcccttctgggaaggtggtcatcacactgttcagtattcggctggccaccatgagtgctttgtcggtgctgatctcagtggatgctgtcttggggaaggtcaacttggcgcagttggtggtgatggtgctggtggaggtgacagctttaggcaacctgaggatggtcatcagtaatatcttcaacacagactaccacatgaacatgatgcacatctacgtgttcgcagcctattttgggctgtctgtggcctggtgcctgccaaagcctctacccgagggaacggaggataaagatcagacagcaacgatacccagtttgtctgccatgctgggcgccctcttcttgtggatgttctggccaagtttcaactctgctctgctgagaagtccaatcgaaaggaagaatgccgtgttcaacacctactatgctgtagcagtcagcgtggtgacagccatctcagggtcatccttggctcacccccaagggaagatcagcaagacttatgtgcacagtgcggtgttggcaggaggcgtggctgtgggtacctcgtgtcacctgatcccttctccgtggcttgccatggtgctgggtcttgtggctgggctgatctccgtcgggggagccaagtacctgccggggtgttgtaaccgagtgctggggattccccacagctccatcatgggctacaacttcagcttgctgggtctgcttggagagatcatctacattgtgctgctggtgcttgataccgtcggagccggcaatggcatgtcactcggctggaacctggctgtaaaaatggctgaagcaggtgatgaggagctgatgcgtttggacgtgtctcagagaaatcatggaggcgctgcggttcctaccggttcttggatgccttctacagagacaaccatagccccaaattatagggatcacatatcagtgggattggcttccaggtcctcctcagcattggggaactcagcttggccatcgtgatagctctcatgtctggtctcctgacagtttcctcatttggctgttggattttaagcaaaagcatccaagaaaaacaaggcctgttcaaaaacaagacaacttcctctcactgttgcctgcatttgtacgtgagaaacgctcatgacagcaaagtctccaatgttcgcgcaggcactggagtcagagaaaatggagttgaatcctttctctgccactctttgaggagaatctcaccatttattatgcactgtagaatacaacaataaaatacagccatgtaccacataacaacatcttggtaaacaacagactgcatatatgatggtggtcatccagtaagc

SEQ ID NO: 175592 - DNA, 1303 bp, Homo sapiens
  Payload ID: 14489
  Gene Symbol: RHD
  Gene Name: Rh blood group, D antigen
  Uniprot ID: Q02161
  ENST ID: ENST00000454452
  CDS Start-End: 51-1016
aggggtgatgcctggtgctggtggaacccctgcacagagacggacacaggatgagctctaagtacccgcggtctgtccggcgctgcctgcccctctgggccctaacactggaagcagctctcattctcctcttctatttttttacccactatgacgcttccttagaggatcaaaaggggctcgtggcatcctatcaagttggccaagatctgaccgtgatggcggccattggcttgggcttcctcacctcgagtttccggagacacagctggagcagtgtggccttcaacctcttcatgctggcgcttggtgtgcagtgggcaatcctgctggacggcttcctgagccagttcccttctgggaaggtggtcatcacactgttcagtattcggctggccaccatgagtgctttgtcggtgctgatctcagtggatgctgtcttggggaaggtcaacttggcgcagttggtggtgatggtgctggtggaggtgacagctttaggcaacctgaggatggtcatcagtaatatcttcaacacagactaccacatgaacatgatgcacatctacgtgttcgcagcctattttgggctgtctgtggcctggtgcctgccaaagcctctacccgagggaacggaggataaagatcagacagcaacgatacccagtttgtctgccatgctgggcgccctcttcttgtggatgttctggccaagtttcaactctgctctgctgagaagtccaatcgaaaggaagaatgccgtgttcaacacctactatgctgtagcagtcagcgtggtgacagccatctcagggtcatccttggctcacccccaagggaagatcagcaagacttatgtgcacagtgcggtgttggcaggaggcgtggctgtgggtacctcgtgtcacctgatcccttctccgtggcttgccatggtgctgggtcttgtggctgggctgatctccgtcgggggagccaagtacctgccgtttcctcatttggctgttggattttaagcaaaagcatccaagaaaaacaaggcctgttcaaaaacaagacaacttcctctcactgttgcctgcatttgtacgtgagaaacgctcatgacagcaaagtctccaatgttcgcgcaggcactggagtcagagaaaatggagttgaatcctttctctgccactctttgaggagaatctcaccatttattatgcactgtagaatacaacaataaaatacagccatgtaccacataacaacatcttggtaaacaacagactgcatatatgatggtggtcatccagtaagc

SEQ ID NO: 175593 - DNA, 1467 bp, Homo sapiens
  Payload ID: 14489
  Gene Symbol: RHD
  Gene Name: Rh blood group, D antigen
  ENST ID: ENST00000568195
  CDS Start-End: 1-1392
atgagctctaagtacccgcggtctgtccggcgctgcctgcccctctgggccctaacactggaagcagctctcattctcctcttctatttttttacccactatgacgcttccttagaggatcaaaaggggctcgtggcatcctatcaagttggccaagatctgaccgtgatggcggccattggcttgggcttcctcacctcgagtttccggagacacagctggagcagtgtggccttcaacctcttcatgctggcgcttggtgtgcagtgggcaatcctgctggacggcttcctgagccagttcccttctgggaaggtggtcatcacactgttcagtattcggctggccaccatgagtgctttgtcggtgctgatctcagtggatgctgtcttggggaaggtcaacttggcgcagttggtggtgatggtgctggtggaggtgacagctttaggcaacctgaggatggtcatcagtaatatcttcaacacagactaccacatgaacatgatgcacatctacgtgttcgcagcctattttgggctgtctgtggcctggtgcctgccaaagcctctacccgagggaacggaggataaagatcagacagcaacgatacccagtttgtctgccatgctgggcgccctcttcttgtggatgttctggccaagtttcaactctgctctgctgagaagtccaatcgaaaggaagaatgccgtgttcaacacctactatgctgtagcagtcagcgtggtgacagccatctcagggtcatccttggctcacccccaagggaagatcagcaagacttatgtgcacagtgcggtgttggcaggaggcgtggctgtgggtacctcgtgtcacctgatcccttctccgtggcttgccatggtgctgggtcttgtggctgggctgatctccgtcgggggagccaagtacctgccggggtgttgtaaccgagtgctggggattccccacagctccatcatgggctacaacttcagcttgctgggtctgcttggagagatcatctacattgtgctgctggtgcttgataccgtcggagccggcaatggcatgattggcttccaggtcctcctcagcattggggaactcagcttggccatcgtgatagctctcatgtctggtctcctgacagtttcctcatttggctgttggattttaagcaaaagcatccaagaaaaacaaggcctgttcaaaaacaagacaacttcctctcactgttgcctgcatttgtacgtgagaaacgctcatgacagcaaagtctccaatgttcgcgcaggcactggagtcagagaaaatggagttgaatcctttctctgccactctttgaggagaatctcaccatttattatgcactgtagaatacaacaataaaatacagccatgtaccacataacaacatcttggtaaacaacagactgcatatatgatggtggtcatccagtaagc

SEQ ID NO: 175594 - DNA, 3007 bp, Homo sapiens
  Payload ID: 14489
  Gene Symbol: RHD
  Gene Name: Rh blood group, D antigen
  ENST ID: ENST00000622561
  CDS Start-End: 63-1358
ggtgttggagagaggggtgatgcctggtgctggtggaacccctgcacagagacggacacaggatgagctctaagtacccgcggtctgtccggcgctgcctgcccctctgggccctaacactggaagcagctctcattctcctcttctatttttttacccactatgacgcttccttagaggatcaaaaggggctcgtggcatcctatcaagttggccaagatctgaccgtgatggcggccattggcttgggcttcctcacctcgagtttccggagacacagctggagcagtgtggccttcaacctcttcatgctggcgcttggtgtgcagtgggcaatcctgctggacggcttcctgagccagttcccttctgggaaggtggtcatcacactgttcagtattcggctggccaccatgagtgctttgtcggtgctgatctcagtggatgctgtcttggggaaggtcaacttggcgcagttggtggtgatggtgctggtggaggtgacagctttaggcaacctgaggatggtcatcagtaatatcttcaacacagactaccacatgaacatgatgcacatctacgtgttcgcagcctattttgggctgtctgtggcctggtgcctgccaaagcctctacccgagggaacggaggataaagatcagacagcaacgatacccagtttgtctgccatgctgggcgccctcttcttgtggatgttctggccaagtttcaactctgctctgctgagaagtccaatcgaaaggaagaatgccgtgttcaacacctactatgctgtagcagtcagcgtggtgacagccatctcagggtcatccttggctcacccccaagggaagatcagcaagacttatgtgcacagtgcggtgttggcaggaggcgtggctgtgggtacctcgtgtcacctgatcccttctccgtggcttgccatggtgctgggtcttgtggctgggctgatctccgtcgggggagccaagtacctgccggggtgttgtaaccgagtgctggggattccccacagctccatcatgggctacaacttcagcttgctgggtctgcttggagagatcatctacattgtgctgctggtgcttgataccgtcggagccggcaatggcatgtcactcggctggaacctggctgtaaaaatggctgaagcaggtgatgaggagctgatgcgtttggacgtgtctcagagaaatcatggaggcgctgcggttcctaccggttcttggatgccttctacagagacaaccatagccccaaattatagggatcacatatcagtgggattggcttccaggtcctcctcagcattggggaactcagcttggccatcgtgatagctctcatgtctggtctcctgacaggtttgctcctaaatcttaaaatatggaaagcacctcatgaggctaaatattttgatgaccaagttttctggaagtttcctcatttggctgttggattttaagcaaaagcatccaagaaaaacaaggcctgttcaaaaacaagacaacttcctctcactgttgcctgcatttgtacgtgagaaacgctcatgacagcaaagtctccaatgttcgcgcaggcactggagtcagagaaaatggagttgaatcctttctctgccactctttgaggagaatctcaccatttattatgcactgtagaatacaacaataaaatacagccatgtaccacataacaacatcttggtaaacaacagactgcatatatgatggtggtcatccagtaagctaaggttaatttattattattccttgtttttttttttttttttttttttttgagatgtagtcttactctgtcacccaggctagagtgcaatggcaccatcttggctcactgcaacctctacctcctgggttcaagcaaatctcctgcctcagcctccaaagtagctgggattacaggcacccaccacatctggctaattttttgtatttttagtaaagatggggtttcaccatgttggccaggctgatctcaaactcctgacctcaagtgatctgcccgcctcggcctcccaaagtgctggaaccacaggcctgagccactgtgcccagccttgtttgcttttttaacagataacagtgtgctcatagaaactgctttgacatgactgcaatcatgtgcttcatagaaacttaattagattataccactagagtcttcagatttttatactttttttttttgaaacggagtctcactctgtcaccaggctggagtgcagtgccgcaatctcggctcactgcaacctccgcctcccaggttcaagcaattctcctgcctcagcctcccgagtagctggaattacaagtgcgcactaccacacccagctaatttttgcatttttacttgacagggtttcaccatgttggctaggatagtttcaccaggatctcttggcctcatgatcagcctgcctcggcctcccaaagtgctgggattacaggtgtgagccaccgtgcccagcctatacttccctttttgaataccatttggtgttttgaagaattaacagctttgtgaacgtggcagtgcttgtgattcaggcttccattgagaccaaggggagaacctggttgcaggacaaacagacggacagcgtgtggcagtgtttaaatgctcttctgaaggctgatacgacagctctctgtgcactgattgcatatgcatcccaagattatattattgttttctactgctatgtgtcacactttgccaaacaggatgtggaaaatgaataagcggttttcttaggcacttcttaacagacaattggtcaaaatgaactccattgcttaagaaacacataaacaccatttagtcactgaacatagctatatgtatggttgttactatgggaaatcttgttttgccaattttctttgaaaattctggcagaccaaggttctttttgtttacataatacttgaaaaataaaaatgaacaagctaacaaacta

SEQ ID NO: 175595 - DNA, 1253 bp, Homo sapiens
  Payload ID: 14489
  Gene Symbol: RHD
  Gene Name: Rh blood group, D antigen
  ENST ID: ENST00000615607
  CDS Start-End: 1-909
atgagctctaagtacccgcggtctgtccggcgctgcctgcccctctgggccctaacactggaagcagctctcattctcctcttctatttttttacccactatgacgcttccttagaggatcaaaaggggctcgtggcatcctatcaagttggccaagatctgaccgtgatggcggccattggcttgggcttcctcacctcgagtttccggagacacagctggagcagtgtggccttcaacctcttcatgctggcgcttggtgtgcagtgggcaatcctgctggacggcttcctgagccagttcccttctgggaaggtggtcatcacactgttcagtattcggctggccaccatgagtgctttgtcggtgctgatctcagtggatgctgtcttggggaaggtcaacttggcgcagttggtggtgatggtgctggtggaggtgacagctttaggcaacctgaggatggtcatcagtaatatcttcaacacagactaccacatgaacatgatgcacatctacgtgttcgcagcctattttgggctgtctgtggcctggtgcctgccaaagcctctacccgagggaacggaggataaagatcagacagcaacgatacccagtttgtctgccatgctgggcgccctcttcttgtggatgttctggccaagtttcaactctgctctgctgagaagtccaatcgaaaggaagaatgccgtgttcaacacctactatgctgtagcagtcagcgtggtgacagccatctcagggtcatccttggctcacccccaagggaagatcagcaagacttatgtgcacagtgcggtgttggcaggaggcgtggctgtgggtacctcgtgtcacctgatcccttctccgtggcttgccatggtgctgggtcttgtggctgggtgatctccgtcgggggagccaagtacctgccggggtgttgtaaccgagtgctggggattccccacagctccatcatgggctacaacttcagcttgctgggtctgcttggagagatcatctacattgtgctgctggtgcttgataccgtcggagccggcaatggcatgattggcttccaggtcctcctcagcattggggaactcagcttggccatcgtgatagctctcatgtctggtctcctgacaggtttgctcctaaatcttaaaatatggaaagcacctcatgaggctaaatattttgatgaccaagttttctggaagtttcctcatttggctgttggattttaa

SEQ ID NO: 175596 - DNA, 1927 bp, Homo sapiens
  Payload ID: 14490
  Gene Symbol: RHBG
  Gene Name: Rh family, B glycoprotein (gene/pseudogene)
  ENST ID: ENST00000451864
  CDS Start-End: 39-332
aaagcctgcgagcgccagccgagatcgcagcccaacccatggccgggtctcctagccgcgccgcgggccggcgactgcagcttcccctgctgtgcctcttcctccagggcgccactgccgtcctctttgctgtctttgtccgctacaaccacaaaaccgacgctgccctctggcaccggagcaaccacagtaacgcggacaatgaattttactttcgctacccaaatggagtttcgctcttgttgcccaggctggagtgcaatggcacaatctcggctcaccacaacctctgcctcccgggttcaagcgattctcctgcctcagtctcctgagtagctgggattacaggcttccaggacgtgcatgccatggtcttcgtgggctttggcttcctcatggtcttcctgcagcgttacggcttcagcagcgtgggcttcaccttcctcctggccgcctttgccctgcagtggtccacactggtccagggctttctccactccttccacggtggccacatccatgttggcgtggagagcatgatcaatgctgacttttgtgcgggggccgtgctcatctcctttggtgccgtcctgggcaagaccgggcctacccagctgctgctcatggccctgctggaggtggtgctgtttggcatcaatgagtttgtgctccttcatctcctgggggtgagagtctggggagggatggagtcgggggtggggggtggtcaaggtcagcctctgagccaggagcgtgggggtgggggcggggtgctgcctctcaccccacctccccaggtgagagatgccggaggctccatgactatccacacctttggtgcctacttcgggctcgtcctttcgcgggttctgtacaggccccagctggagaagagcaagcaccgccagggctccgtctaccattcagacctcttcgccatgattgggaccatcttcctgtggatcttctggcctagcttcaatgctgcactcacagcgctgggggctgggcagcatcggacggccctcaacacatactactccctggctgccagcacccttggcacctttgccttgtcagcccttgtaggggaagatgggaggcttgacatgcccatccttgaatcaaaattcaaagtccaagacacatgtggagtccacaacctccatgggatgccgggggtcctgggggccctcctgggggtccttgtggctggacttgccacccatgaagcttacggagatggcctggagagtgtgtttccactcatagccgagggccagcgcagtgccacgtcacaggccatgcaccagctcttcgggctgtttgtcacactgatgtttgcctctgtgggcgggggccttggaggcatcatattggtcttatgcctcctagacccctgtgccctgtggcactgggtggcaccctcctccatggtggggggcagagaagcctcacagatcctcccctaccaccaccagggctcctgctgaagctaccctttctggactcccccccagactcccagcactacgaggaccaagttcactggcaggtgcctggcgagcatgaggataaagcccagagacctctgagggtggaggaggcagacactcaggcctaacccactgccagcccctgagaggacacgctccttttcgaagatgctgactggctgctactaggaagttctttttgagctcccattcctccagctgcaagaagggagccatgagccagaaggaggcccctttccacaggcagcgtctccacagggagaggggcaacaggaggctgggaaatggtggggagtggggccgtaactgggtacaatagggggaacctcaccagatgcccaacccgactgccctaccagcctgcacatgggtagaagaggccaaattgaggcacccaagtgatccactgg

SEQ ID NO: 175597 - DNA, 1789 bp, Homo sapiens
  Payload ID: 14490
  Gene Symbol: RHBG
  Gene Name: Rh family, B glycoprotein (gene/pseudogene)
  Uniprot ID: Q9H310
  ENST ID: ENST00000537040
  CDS Start-End: 39-1415
aaagcctgcgagcgccagccgagatcgcagcccaacccatggccgggtctcctagccgcgccgcgggccggcgactgcagcttcccctgctgtgcctcttcctccagggcgccactgccgtcctctttgctgtctttgtccgctacaaccacaaaaccgacgctgccctctggcaccggagcaaccacagtaacgcggacaatgaattttactttcgctacccaagcttccaggacgtgcatgccatggtcttcgtgggctttggcttcctcatggtcttcctgcagcgttacggcttcagcagcgtgggcttcaccttcctcctggccgcctttgccctgcagtggtccacactggtccagggctttctccactccttccacggtggccacatccatgttggcgtggagagcatgatcaatgctgacttttgtgcgggggccgtgctcatctcctttggtgccgtcctgggcaagaccgggcctacccagctgctgctcatggccctgctggaggtggtgctgtttggcatcaatgagtttgtgctccttcatctcctgggggtgagagatgccggaggctccatgactatccacacctttggtgcctacttcgggctcgtcctttcgcgggttctgtacaggccccagctggagaagagcaagcaccgccagggctccgtctaccattcagacctcttcgccatgattgggaccatcttcctgtggatcttctggcctagcttcaatgctgcactcacagcgctgggggctgggcagcatcggacggccctcaacacatactactccctggctgccagcacccttggcacctttgccttgtcagcccttgtaggggaagatgggaggcttgacatggtccacatccaaaatgcagcgctggctggaggggttgtggtggggacctcaagtgaaatgatgctgacaccctttggggctctggcagctggcttcttggctgggactgtctccacgctggggtacaagttcttcacgcccatccttgaatcaaaattcaaagtccaagacacatgtggagtccacaacctccatgggatgccgggggtcctgggggccctcctgggggtccttgtggctggacttgccacccatgaagcttacggagatggcctggagagtgtgtttccactcatagccgagggccagcgcagtgccacgtcacaggccatgcaccagctcttcgggctgtttgtcacactgatgtttgcctctgtgggcgggggccttggagggctcctgctgaagctaccctttctggactcccccccagactcccagcactacgaggaccaagttcactggcaggtgcctggcgagcatgaggataaagcccagagacctctgagggtggaggaggcagacactcaggcctaacccactgccagcccctgagaggacacgctccttttcgaagatgctgactggctgctactaggaagttctttttgagctcccattcctccagctgcaagaagggagccatgagccagaaggaggcccctttccacaggcagcgtctccacagggagaggggcaacaggaggctgggaaatggtggggagtggggccgtaactgggtacaatagggggaacctcaccagatgcccaacccgactgccctaccagcctgcacatgggtagaagaggccaaattgaggcacccaagtgatccactggccccacgtcacacagttacagtgaagcccaagccaggcctggttgagggtgataaacgccactgtctctaa

SEQ ID NO: 175598 - DNA, 1862 bp, Homo sapiens
  Payload ID: 14490
  Gene Symbol: RHBG
  Gene Name: Rh family, B glycoprotein (gene/pseudogene)
  ENST ID: ENST00000612897
  CDS Start-End: 39-500
aaagcctgcgagcgccagccgagatcgcagcccaacccatggccgggtctcctagccgcgccgcgggccggcgactgcagcttcccctgctgtgcctcttcctccagggcgccactgccgtcctctttgctgtctttgtccgctacaaccacaaaaccgacgctgccctctggcaccggagcaaccacagtaacgcggacaatgaattttactttcgctacccaaaagagtctcactctgttgcccaggctggagtgcaacggcgcaatctcggctcactgcaaccttcacctcccaggcttccaggacgtgcatgccatggtcttcgtgggctttggcttcctcatggtcttcctgcagcgttacggcttcagcagcgtgggcttcaccttcctcctggccgcctttgccctgcagtggtccacactggtccagggctttctccactccttccacggtggccacatccatgttggcgtggagagcatgatcaatgctgacttttgtgcgggggccgtgctcatctcctttggtgccgtcctgggcaagaccgggcctacccagctgctgctcatggccctgctggaggtggtgctgtttggcatcaatgagtttgtgctccttcatctcctgggggtgagagatgccggaggctccatgactatccacacctttggtgcctacttcgggctcgtcctttcgcgggttctgtacaggccccagctggagaagagcaagcaccgccagggctccgtctaccattcagacctcttcgccatgattgggaccatcttcctgtggatcttctggcctagcttcaatgctgcactcacagcgctgggggctgggcagcatcggacggccctcaacacatactactccctggctgccagcacccttggcacctttgccttgtcagcccttgtaggggaagatgggaggcttgacatggtccacatccaaaatgcagcgctggctggaggggttgtggtggggacctcaagtgaaatgatgctgacaccctttggggctctggcagctggcttcttggctgggactgtctccacgctggggtacaagttcttcacgcccatccttgaatcaaaattcaaagtccaagacacatgtggagtccacaacctccatgggatgccgggggtcctgggggccctcctgggggtccttgtggctggacttgccacccatgaagcttacggagatggcctggagagtgtgtttccactcatagccgagggccagcgcagtgccacgtcacaggccatgcaccagctcttcgggctgtttgtcacactgatgtttgcctctgtgggcgggggccttggagggctcctgctgaagctaccctttctggactcccccccagactcccagcactacgaggaccaagttcactggcaggtgcctggcgagcatgaggataaagcccagagacctctgagggtggaggaggcagacactcaggcctaacccactgccagcccctgagaggacacgctccttttcgaagatgctgactggctgctactaggaagttctttttgagctcccattcctccagctgcaagaagggagccatgagccagaaggaggcccctttccacaggcagcgtctccacagggagaggggcaacaggaggctgggaaatggtggggagtggggccgtaactgggtacaatagggggaacctcaccagatgcccaacccgactgccctaccagcctgcacatgggtagaagaggccaaattgaggcacccaagtgatccactggccccacgtcacacagttacagtgaagcccaagccaggcctggttgagggtgataaacgccactgtctctaa

SEQ ID NO: 175599 - DNA, 1984 bp, Homo sapiens
  Payload ID: 14490
  Gene Symbol: RHBG
  Gene Name: Rh family, B glycoprotein (gene/pseudogene)
  ENST ID: ENST00000620376
  CDS Start-End: 1-293
tggccgggtctcctagccgcgccgcgggccggcgactgcagcttcccctgctgtgcctcttcctccagggcgccactgccgtcctctttgctgtctttgtccgctacaaccacaaaaccgacgctgccctctggcaccggagcaaccacagtaacgcggacaatgaattttactttcgctacccaaatggagtttcgctcttgttgcccaggctggagtgcaatggcacaatctcggctcaccacaacctctgcctcccgggttcaagcgattctcctgcctcagtctcctgagtagctgggattacaggcttccaggacgtgcatgccatggtcttcgtgggctttggcttcctcatggtcttcctgcagcgttacggcttcagcagcgtgggcttcaccttcctcctggccgcctttgccctgcagtggtccacactggtccagggctttctccactccttccacggtggccacatccatgttggcgtggagagcatgatcaatgctgacttttgtgcgggggccgtgctcatctcctttggtgccgtcctgggcaagaccgggcctacccagctgctgctcatggccctgctggaggtggtgctgtttggcatcaatgagtttgtgctccttcatctcctgggggtgagagtctggggagggatggagtcgggggtggggggtggtcaaggtcagcctctgagccaggagcgtgggggtgggggcggggtgctgcctctcaccccacctccccaggtgagagatgccggaggctccatgactatccacacctttggtgcctacttcgggctcgtcctttcgcgggttctgtacaggccccagctggagaagagcaagcaccgccagggctccgtctaccattcagacctcttcgccatgattgggaccatcttcctgtggatcttctggcctagcttcaatgctgcactcacagcgctgggggctgggcagcatcggacggccctcaacacatactactccctggctgccagcacccttggcacctttgccttgtcagcccttgtaggggaagatgggaggcttgacatggtccacatccaaaatgcagcgctggctggaggggttgtggtggggacctcaagtgaaatgatgctgacaccctttggggctctggcagctggcttcttggctgggactgtctccacgctggggtacaagttcttcacgcccatccttgaatcaaaattcaaagtccaagacacatgtggagtccacaacctccatgggatgccgggggtcctgggggccctcctgggggtccttgtggctggacttgccacccatgaagcttacggagatggcctggagagtgtgtttccactcatagccgagggccagcgcagtgccacgtcacaggccatgcaccagctcttcgggctgtttgtcacactgatgtttgcctctgtgggcgggggccttggagggctcctgctgaagctaccctttctggactcccccccagactcccagcactacgaggaccaagttcactggcaggtgcctggcgagcatgaggataaagcccagagacctctgagggtggaggaggcagacactcaggcctaacccactgccagcccctgagaggacacgctccttttcgaagatgctgactggctgctactaggaagttctttttgagctcccattcctccagctgcaagaagggagccatgagccagaaggaggcccctttccacaggcagcgtctccacagggagaggggcaacaggaggctgggaaatggtggggagtggggccgtaactgggtacaatagggggaacctcaccagatgcccaacccgactgccctaccagcctgcacatgggtagaagaggccaaattgaggcacccaagtgatccactggccccacgtcacacagttacagtgaagcccaagccaggcctggttgagggtgataaacgccactgtctctaa

SEQ ID NO: 175600 - DNA, 1912 bp, Homo sapiens
  Payload ID: 14490
  Gene Symbol: RHBG
  Gene Name: Rh family, B glycoprotein (gene/pseudogene)
  ENST ID: ENST00000613460
  CDS Start-End: 39-332
aaagcctgcgagcgccagccgagatcgcagcccaacccatggccgggtctcctagccgcgccgcgggccggcgactgcagcttcccctgctgtgcctcttcctccagggcgccactgccgtcctctttgctgtctttgtccgctacaaccacaaaaccgacgctgccctctggcaccggagcaaccacagtaacgcggacaatgaattttactttcgctacccaaatggagtttcgctcttgttgcccaggctggagtgcaatggcacaatctcggctcaccacaacctctgcctcccgggttcaagcgattctcctgcctcagtctcctgagtagctgggattacaggcttccaggacgtgcatgccatggtcttcgtgggctttggcttcctcatggtcttcctgcagcgttacggcttcagcagcgtgggcttcaccttcctcctggccgcctttgccctgcagtggtccacactggtccagggctttctccactccttccacggtggccacatccatgttggcgtggagagcatgatcaatgctgacttttgtgcgggggccgtgctcatctcctttggtgccgtcctgggcaagaccgggcctacccagctgctgctcatggccctgctggaggtggtgctgtttggcatcaatgagtttgtgctccttcatctcctgggggtgagagatgccggaggctccatgactatccacacctttggtgcctacttcgggctcgtcctttcgcgggttctgtacaggccccagctggagaagagcaagcaccgccagggctccgtctaccattcagacctcttcgccatgattgggaccatcttcctgtggatcttctggcctagcttcaatgctgcactcacagcgctgggggctgggcagcatcggacggccctcaacacatactactccctggctgccagcacccttggcacctttgccttgtcagcccttgtaggggaagatgggaggcttgacatggtccacatccaaaatgcagcgctggctggaggggttgtggtggggacctcaagtgaaatgatgctgacaccctttggggctctggcagctggcttcttggctgggactgtctccacgctggggtacaagttcttcacgcccatccttgaatcaaaattcaaagtccaagacacatgtggagtccacaacctccatgggatgccgggggtcctgggggccctcctgggggtccttgtggctggacttgccacccatgaagcttacggagatggcctggagagtgtgtttccactcatagccgagggccagcgcagtgccacgtcacaggccatgcaccagctcttcgggctgtttgtcacactgatgtttgcctctgtgggcgggggccttggagggctcctgctgaagctaccctttctggactcccccccagactcccagcactacgaggaccaagttcactggcaggtgcctggcgagcatgaggataaagcccagagacctctgagggtggaggaggcagacactcaggcctaacccactgccagcccctgagaggacacgctccttttcgaagatgctgactggctgctactaggaagttctttttgagctcccattcctccagctgcaagaagggagccatgagccagaaggaggcccctttccacaggcagcgtctccacagggagaggggcaacaggaggctgggaaatggtggggagtggggccgtaactgggtacaatagggggaacctcaccagatgcccaacccgactgccctaccagcctgcacatgggtagaagaggccaaattgaggcacccaagtgatccactggccccacgtcacacagttacagtgaagcccaagccaggcctggttgagggtgataaacgccactgtctctaa

SEQ ID NO: 175601 - DNA, 1982 bp, Homo sapiens
  Payload ID: 14491
  Gene Symbol: RHCG
  Gene Name: Rh family, C glycoprotein
  Uniprot ID: Q9UBD6
  ENST ID: ENST00000268122
  CDS Start-End: 70-1509
ctcaaaagccccgccggcctccgagcgtccgaaccgcccgctgccagcccggccaggcacccctgcagcatggcctggaacaccaacctccgctggcggctgccgctcacctgcctgctcctgcaggtgattatggtgattctcttcggggtgttcgtgcgctacgacttcgaggccgacgcccactggtggtcagagaggacgcacaagaacttgagcgacatggagaacgaattctactatcgctacccaagcttccaggacgtgcacgtgatggtcttcgtgggcttcggcttcctcatgactttcctgcagcgctacggcttcagcgccgtgggcttcaacttcctgttggcagccttcggcatccagtgggcgctgctcatgcagggctggttccacttcttacaagaccgctacatcgtcgtgggcgtggagaacctcatcaacgctgacttctgcgtggcctctgtctgcgtggcctttggggcagttctgggtaaagtcagccccattcagctgctcatcatgactttcttccaagtgaccctcttcgctgtgaatgagttcattctccttaacctgctaaaggtgaaggatgcaggaggctccatgaccatccacacatttggcgcctactttgggctcacagtgacccggatcctctaccgacgcaacctagagcagagcaaggagagacagaattctgtgtaccagtcggacctctttgccatgattggcaccctcttcctgtggatgtactggcccagcttcaactcagccatatcctaccatggggacagccagcaccgagccgccatcaacacctactgctccttggcagcctgcgtgcttacctcggtggcaatatccagtgccctgcacaagaagggcaagctggacatggtgcacatccagaatgccacgctcgcaggaggggtggccgtgggtaccgctgctgagatgatgctcatgccttacggtgccctcatcatcggcttcgtctgcggcatcatctccaccctgggttttgtatacctgaccccattcctggagtcccggctgcacatccaggacacatgtggcattaacaatctgcatggcattcctggcatcataggcggcatcgtgggtgctgtgacagcggcctccgccagccttgaagtctatggaaaagaagggcttgtccattcctttgactttcaaggtttcaacggggactggaccgcaagaacacagggaaagttccagatttatggtctcttggtgaccctggccatggccctgatgggtggcatcattgtggggctcattttgagattaccattctggggacaaccttcagatgagaactgctttgaggatgcggtctactgggagatgcctgaagggaacagcactgtctacatccctgaggaccccaccttcaagccctcaggaccctcagtaccctcagtacccatggtgtccccactacccatggcttcctcggtacccttggtaccctaggctcccagggcaggtgaggagcaggctccacagactgtcctggggcccagaggagctggtgctgacctagctagggatgcaagagtgagcaagcagcacccccacctgctggcttggcctcaaggtgcctccacccctgccctccccttcatcccagggggtctgactgagaatggagaaggagaagctacaaagtgggcatccaagccgggttctggctgcagaagttctgcctctgcctggggtcttggccacattggagaaaaacaggctcaaagtggggctgggacctggtgggtgaacctgagctctcccaggagacaacttagctgccagtcaccacctatgaggctcttctaccccgtgcctgcacctcggccagcatctcctatgctccctgggtcccccagacctctctgtgttgtgtgcgtggcagcctccaggaataaacattcttgttgtcctttgtaaaa

SEQ ID NO: 175602 - DNA, 1405 bp, Homo sapiens
  Payload ID: 14491
  Gene Symbol: RHCG
  Gene Name: Rh family, C glycoprotein
  ENST ID: ENST00000558030
  CDS Start-End: 39-740
aaccgcccgctgccagcccggccaggcacccctgcagcatggcctggaacaccaacctccgctggcggctgccgctcacctgcctgctcctgcaggtgattatggtgattctcttcggggtgttcgtgcgctacgacttcgaggccgacgcccactggtggtcagagaggacgcacaagaacttgagcgacatggagaacgaattctactatcgctacccaagcttccaggacgtgcacgtgatggtcttcgtgggcttcggcttcctcatgactttcctgcagcgctacggcttcagcgccgtgggcttcaacttcctgttggcagccttcggcatccagtgggcgctgctcatgcagggctggttccacttcttacaagaccgctacatcgtcgtgggcgtggagaacctcatcaacgctgacttctgcgtggcctctgtctgcgtggcctttggggcagttctgggtaaagtcagccccattcagctgctcatcatgactttcttccaagcaccctcttcctgtggatgtactggcccagcttcaactcagccatatcctaccatggggacagccagcaccgagccgccatcaacacctactgctccttggcagcctgcgtgcttacctcggtggcaatatccagtgccctgcacaagaagggcaagctggacatggtgcacatccagaatgccacgctcgcaggaggggtggccgtgggtaccgctgctgagatgatgctcatgccttacggtgccctcatcatcggcttcgtctgcggcatcatctccaccctgggttttgtatacctgaccccattcctggagtcccggctgcacatccaggacacatgtggcattaacaatctgcatggcattcctggcatcataggcggcatcgtgggtgctgtgacagcggcctccgccagccttgaagtctatggaaaagaagggcttgtccattcctttgactttcaaggtttcaacggggactggaccgcaagaacacagggaaagttccagatttatggtctcttggtgaccctggccatggccctgatgggtggcatcattgtggggctcattttgagattaccattctggggacaaccttcagatgagaactgctttgaggatgcggtctactgggagatgcctgaagggaacagcactgtctacatccctgaggaccccaccttcaagccctcaggaccctcagtaccctcagtacccatggtgtccccactacccatggcttcctcggtacccttggtaccctaggctcccagggcaggtgaggagcaggctccacagactgtcctggggcccagaggagctggtgctgacctagctagggatgcaagagtgagcaagcagcacccccacctgctggcttggcctcaa

SEQ ID NO: 175603 - DNA, 1014 bp, Homo sapiens
  Payload ID: 14491
  Gene Symbol: RHCG
  Gene Name: Rh family, C glycoprotein
  ENST ID: ENST00000558360
  CDS Start-End: 1-712
ggacagccagcaccgagccgccatcaacacctactgctccttggcagcctgcgtgcttacctcggtggcaatatccagtgccctgcacaagaagggcaagctggacatggtgcacatccagaatgccacgctcgcaggaggggtggccgtgggtaccgctgctgagatgatgctcatgccttacggtgccctcatcatcggcttcgtctgcggcatcatctccaccctgggttttgtatacctgaccccattcctggagtcccggctgcacatccaggacacatgtggcattaacaatctgcatggcattcctggcatcataggcggcatcgtgggtgctgtgacagcggcctccgccagccttgaagtctatggaaaagaagggcttgtccattcctttgactttcaaggtttcaacggggactggaccgcaagaacacagggaaagttccagatttatggtctcttggtgaccctggccatggccctgatgggtggcatcattgtggggctcattttgagattaccattctggggacaaccttcagatgagaactgctttgaggatgcggtctactgggagatgcctgaagggaacagcactgtctacatccctgaggaccccaccttcaagccctcaggaccctcagtaccctcagtacccatggtgtccccactacccatggcttcctcggtacccttggtaccctaggctcccagggcaggtgaggagcagggggtctgactgagaatggagaaggagaagctacaaagtgggcatccaagccgggttctggctgcagaagttctgcctctgcctggggtcttggccacattggagaaaaacaggctcaaagtggggctgggacctggtgggtgaacctgagctctcccaggagacaacttagctgccagtcaccacctatgaggctcttctaccccgtgcctgcacctcggccagcatctcctatgctccctgggtcccccagacctctctgtgttgtgtgcgtggca

SEQ ID NO: 175604 - DNA, 1862 bp, Homo sapiens
  Payload ID: 14491
  Gene Symbol: RHCG
  Gene Name: Rh family, C glycoprotein
  ENST ID: ENST00000560081
  CDS Start-End: 28-1023
gccagcccggccaggcacccctgcagcatggcctggaacaccaacctccgctggcggctgccgctcacctgcctgctcctgcaggtgattatggtgattctcttcggggtgttcgtgcgctacgacttcgaggccgacgcccactggtggtcagagaggacgcacaagaacttgagcgacatggagaacgaattctactatcgctacccaagcttccaggacgtgcacgtgatggtcttcgtgggcttcggcttcctcatgactttcctgcagcgctacggcttcagcgccgtgggcttcaacttcctgttggcagccttcggcatccagtgggcgctgctcatgcagggctggttccacttcttacaagaccgctacatcgtcgtgggcgtggagaacctcatcaacgctgacttctgcgtggcctctgtctgcgtggcctttggggcagttctgggtaaagtcagccccattcagctgctcatcatgactttcttccaagtgaccctcttcgctgtgaatgagttcattctccttaacctgctaaaggtgaaggatgcaggaggctccatgaccatccacacatttggcgcctactttgggctcacagtgacccggatcctctaccgacgcaacctagagcagagcaaggagagacagaattctgtgtaccagtcggacctctttgccatgattggcaccctcttcctgtggatgtactggcccagcttcaactcagccatatcctaccatggggacagccagcaccgagccgccatcaacacctactgctccttggcagcctgcgtgcttacctcggtggcaatatccagtgccctgcacaagaagggcaagctggacatggtgcacatccagaatgccacgctcgcaggaggggtggccgtgggtaccgctgctgagatgatgctcatgccttacggtgccctcatcatcggcttcgtctgcggcatcatctccaccctgggttttgtatacctgaccgcggcatcgtgggtgctgtgacagcggcctccgccagccttgaagtctatggaaaagaagggcttgtccattcctttgactttcaaggtttcaacggggactggaccgcaagaacacagggaaagttccagatttatggtctcttggtgaccctggccatggccctgatgggtggcatcattgtggggctcattttgagattaccattctggggacaaccttcagatgagaactgctttgaggatgcggtctactgggagatgcctgaagggaacagcactgtctacatccctgaggaccccaccttcaagccctcaggaccctcagtaccctcagtacccatggtgtccccactacccatggcttcctcggtacccttggtaccctaggctcccagggcaggctccacagactgtcctggggcccagaggagctggtgctgacctagctagggatgcaagagtgagcaagcagcacccccacctgctggcttggcctcaaggtgcctccacccctgccctccccttcatcccagggggtctgactgagaatggagaaggagaagctacaaagtgggcatccaagccgggttctggctgcagaagttctgcctctgcctggggtcttggccacattggagaaaaacaggctcaaagtggggctgggacctggtgggtgaacctgagctctcccaggagacaacttagctgccagtcaccacctatgaggctcttctaccccgtgcctgcacctcggccagcatctcctatgctccctgggtcccccagacctctctgtgttgtgtgcgtggcagcctccaggaataaacattcttgttgtcctttgtaaaatggtgtgaa

SEQ ID NO: 175605 - DNA, 1388 bp, Homo sapiens
  Payload ID: 14491
  Gene Symbol: RHCG
  Gene Name: Rh family, C glycoprotein
  ENST ID: ENST00000558184
  CDS Start-End: 46-456
gcgtccgaaccgcccgctgccagcccggccaggcacccctgcagcatggcctggaacaccaacctccgctggcggctgccgctcacctgcctgctcctgcaggtgattatggtgattctcttcggggtgttcgtgcgctacgacttcgaggccgacgcccactggtggtcagagaggacgcacaagaacttgagcgacatggagaacgaattctactatcgctacccaagcttccaggacgtgcacgtgatggtcttcgtgggcttcggcttcctcatgactttcctgcagcgctacggcttcagcgccgtgggcttcaacttcctgttggcagccttcggcatccagtgggcgctgctcatgcagggctggttccacttcttacaagaccgctacatcgtcgtgggcgtggagaacgattctccagggtgggagtcgtccaagtgtcatacataggagggtctcccttcccctacgacaaaggctgcagggacttgaggctagactttcctctgggggcagggtccgaccgggcccggcacatcaaaatcgcccagccctgtgtcctgagagaccgcagcccacgggactctggtgggagaactgggatgtctgcaccagcctcagaggctccttgtgaaggaaacaccgaatggggactccagccaaatggagcctcatcaacgctgacttctgcgtggcctctgtctgcgtggcctttggggcagttctgggtaaagtcagccccattcagctgctcatcatgactttcttccaagtgaccctcttcgctgtgaatgagttcattctccttaacctgctaaaggtgaaggatgcaggaggctccatgaccatccacacatttggcgcctactttgggctcacagtgacccggatcctctaccgacgcaacctagagcagagcaaggagagacagaattctgtgtaccagtcggacctctttgccatgattggcaccctcttcctgtggatgtactggcccagcttcaactcagccatatcctaccatggggacagccagcaccgagccgccatcaacacctactgctccttggcagcctgcgtgcttacctcggtggcaatatccagtgccctgcacaagaagggcaagctggacatggtgcacatccagaatgccacgctcgcaggaggggtggccgtgggtaccgctgctgagatgatgctcatgccttacggtgccctcatcatcggcttcgtctgcggcatcatctccaccctgggttttgtatacctgaccgtaagtgccccaggcaaggggctgggggctagagaatgctgaggtctttgtgttcctgacagtgagctgagggttcctagggagggggctgagggctagagaatcctgg

SEQ ID NO: 175606 - DNA, 1283 bp, Homo sapiens
  Payload ID: 14492
  Gene Symbol: RHAG
  Gene Name: Rh-associated glycoprotein
  ENST ID: ENST00000229810
  CDS Start-End: 28-1260
agtgtgcctctgtcctttgccacaaacatgaggttcacattccctctcatggctatagtcctggaaattgccatgattgttttatttggattatttgttgagtatgaaacggaccagactgttctcgagcagctcaacatcaccaagccaacagacatgggcatattctttgagttatatcctctgttccaagatgtacatgttatgatatttgttgggtttggcttcctcatgaccttcctgaagaaatatggcttcagcagtgtgggtatcaacctactcgttgctgctttgggcctccagtggggcactattgtacagggaatcctgcaaagccagggacagaaatttaacattggaatcaaaaacatgataaatgcagacttcagtgcagccacagttctgatatcttttggagctgtcctgggaaaaacgagccccacccaaatgctgatcatgacaattttagaaattgttttctttgcccacaatgaatacctggttagtgaaatatttaaggcctctgacattggagcatcaatgacgatccatgcctttggggcctactttggcttggctgtagcaggcatcttgtatcgatctggactgagaaaggggcatgaaaatgaagagtccgcatactactcagacttgtttgcaatgattgggactctctttctgtggatgttttggcccagctttaactcggccattgctgaacctggagacaaacagtgcagggccattgtaaacacgtacttctctctcgctgcctgtgtgctcacagcctttgccttctccagcctagtggagcaccgaggcaagctcaacatggttcacattcagaatgccacccttgctggaggagttgctgtgggcacttgtgcggatatggcaattcacccatttggttctatgattattgggagcattgcaggaatggtctctgtgcttggatacaagttcctgactccactttttactactaaactgaggatccatgatacatgtggggtccataacctccacggcttacctggtgtagtgggaggccttgcaggcattgtggcagtagcaatgggcgcctccaacacgtctatggccatgcaggcagctgcactgggttcctctatcggaacagcagttgttggaggtctgatgacaggtttaattctaaagttgcctctctggggacagccatctgaccagaactgctatgatgattctgtttattggaaggtccctaagacgagagtctaaacaccattcctgctctccagctt

SEQ ID NO: 175607 - DNA, 1912 bp, Homo sapiens
  Payload ID: 14492
  Gene Symbol: RHAG
  Gene Name: Rh-associated glycoprotein
  Uniprot ID: Q02094
  ENST ID: ENST00000371175
  CDS Start-End: 28-1257
agtgtgcctctgtcctttgccacaaacatgaggttcacattccctctcatggctatagtcctggaaattgccatgattgttttatttggattatttgttgagtatgaaacggaccagactgttctcgagcagctcaacatcaccaagccaacagacatgggcatattctttgagttatatcctctgttccaagatgtacatgttatgatatttgttgggtttggcttcctcatgaccttcctgaagaaatatggcttcagcagtgtgggtatcaacctactcgttgctgctttgggcctccagtggggcactattgtacagggaatcctgcaaagccagggacagaaatttaacattggaatcaaaaacatgataaatgcagacttcagtgcagccacagttctgatatcttttggagctgtcctgggaaaaacgagccccacccaaatgctgatcatgacaattttagaaattgttttctttgcccacaatgaatacctggttagtgaaatatttaaggcctctgacattggagcatcaatgacgatccatgcctttggggcctactttggcttggctgtagcaggcatcttgtatcgatctggactgagaaaggggcatgaaaatgaagagtccgcatactactcagacttgtttgcaatgattgggactctctttctgtggatgttttggcccagctttaactcggccattgctgaacctggagacaaacagtgcagggccattgtaaacacgtacttctctctcgctgcctgtgtgctcacagcctttgccttctccagcctagtggagcaccgaggcaagctcaacatggttcacattcagaatgccacccttgctggaggagttgctgtgggcacttgtgcggatatggcaattcacccatttggttctatgattattgggagcattgcaggaatggtctctgtgcttggatacaagttcctgactccactttttactactaaactgaggatccatgatacatgtggggtccataacctccacggcttacctggtgtagtgggaggccttgcaggcattgtggcagtagcaatgggcgcctccaacacgtctatggccatgcaggcagctgcactgggttcctctatcggaacagcagttgttggaggtctgatgacaggtttaattctaaagttgcctctctggggacagccatctgaccagaactgctatgatgattctgtttattggaaggtccctaagacgagataacttgacaatcagttccatggacatggtgaccacagccagctggaacctgaagtctaaacaccattcctgctctccagcttcctttcccattatccagaatcaagtccaaataaacaaaaagggagtaaccaaagagagtatggaccagagtgaatagatcctaagtcccaaatggccagtgtaaaaatgtccttatgtctgatgctgtctcttgctcttcaatgattaattgaggggatgttactcataaaacagataatcaaatagatcttctccaggattcccaaaaagcttttggcagtgagtaaatacagagtaaacatgtcagtttcttaatgtagacactatgtcttcaatcccaaaaattataaaactgaaacccatgaagcaagaatagatgtgagaaatctatgtaaaaaaataattaaagaaatgcatgtgtgtaaagtagtaatatgatgattttaggtagtgctttttattttaaaaatagtctagttagtaatgttgtatccttgcatgaatattattcttaattccttttgcatgttgactatttgcaacgagctcaaatgctatctgatcaaagtctattttgcataaaatgtccaataattaaatattgttataaaataaaacatcagtctttgactct

SEQ ID NO: 175608 - DNA, 1203 bp, Homo sapiens
  Payload ID: 14492
  Gene Symbol: RHAG
  Gene Name: Rh-associated glycoprotein
  ENST ID: ENST00000618248
  CDS Start-End: 28-1173
agtgtgcctctgtcctttgccacaaacatgaggttcacattccctctcatggctatagtcctggaaattgccatgattgttttatttggattatttgttgagtatgaaacggaccagactgttctcgagcagctcaacatcaccaagccaacagacatgggcatattctttgagttatatcctctgttccaagatgtacatgttatgatatttgttgggtttggcttcctcatgaccttcctgaagaaatatggcttcagcagtgtgggtatcaacctactcgttgctgctttgggcctccagtggggcactattgtacagggaatcctgcaaagccagggacagaaatttaacattggaatcaaaaacatgataaatgcagacttcagtgcagccacagttctgatatcttttggagctgtcctgggaaaaacgagccccacccaaatgctgatcatgacaattttagaaattgttttctttgcccacaatgaatacctggttagtgaaatatttaaggcctctgacattggagcatcaatgacgatccatgcctttggggcctactttggcttggctgtagcaggcatcttgtatcgatctggactgagaaaggggcatgaaaatgaagagtccgcatactactcagacttgtttgcaatgattgggactctctttctgtggatgttttggcccagctttaactcggccattgctgaacctggagacaaacagtgcagggccattgtaaacacgtacttctctctcgctgcctgtgtgctcacagcctttgccttctccagcctagtggagcaccgaggcaagctcaacatggttcacattcagaatgccacccttgctggaggagttgctgtgggcacttgtgcggatatggcaattcacccatttggttctatgattattgggagcattgcaggaatggtctctgtgcttggatacaagttcctgactccactttttactactaaactgaggatccatgatacatgtggggtccataacctccacggcttacctggtgtagtgggaggccttgcaggcattgtggcagtagcaatgggcgcctccaacacgtctatggccatgcaggcagctgcactgggttcctctatcggaacagcagttgttggaggtctgatgacaggaacctgaagtctaaacaccattcctgctctccagctt

SEQ ID NO: 175609 - DNA, 1681 bp, Homo sapiens
  Payload ID: 14493
  Gene Symbol: RND1
  Gene Name: Rho family GTPase 1
  Uniprot ID: Q92730
  ENST ID: ENST00000309739
  CDS Start-End: 132-830
aaaaggcggctgtgccggcctcctcctcagttggagggaggcagggaatctggcttgattggcgtgctgagacgcacctggcgcaaccctcccttctgaatcgaagttcaagtcccgcggacactgcaaccatgaaggagagacgggccccccagccagtcgtggccagatgtaagctcgttctggtcggggacgtgcagtgtgggaagaccgcgatgttgcaagtgttagcgaaggattgctatccagagacctatgtgcccaccgtgttcgaaaattacacagcctgtttggagacagaggaacagagggtggagcttagtctctgggatacctcaggatctccctactacgataatgtccgtccactctgctacagcgactcggatgcagtattactatgttttgacatcagccgtccagagacagtggacagcgcactcaagaagtggaggacagaaatcctagattattgtcccagcacccgcgttttgctcattggctgcaagacagacctgcgaacagacctgagtactctgatggagctgtcccaccagaagcaggcgcccatctcctatgagcagggttgtgcaatagcaaagcagctgggtgcagaaatctacctggaaggctcagctttcacctcagaaaagagcatccacagcatctttcggacggcatccatgctgtgtctgaacaagcctagcccactgccccagaagagccctgtccgaagcctctccaaacgactgctccacctccccagtcgctctgaactcatctcttctaccttcaagaaggaaaaggccaaaagctgttccattatgtgaagtggaaattggaggggggagacaaccccctacttcctcccttggggtgcagaggcacggggagagggaggatgagacaatttaggacactggacatgagtttttcagatggccacggtgagggcttggaaggagacaggaatggggcgaggaaggagccaggcccggcatgaggacctgacgctgagagagaaccatcataccccaagccaggcactagattttggagggggcgactaccccagtgccccccccgctccagaggaaggaaagctgtgggggacggggggcatgctggcctcatgggcttgggggcctacagcagcctcaccttcagcttcatgcctcttccacacagcgtttccatgcaggtcaggggatgggaggggtccctgagcccttcccttcccctctaaggaggcagcaacggagagtggggaagtggagcggcagctcccttgggggcttagcccaggtgcttcgtaactgcaatcggaagtgcaggagctggtcagagccaatgagaaggaaacctcatctttgcatagcccatgcctcatggagaggtgacatcatacattcacatgcttctcacctaagtccccagggtccaagggagaagccccagacccccttctcttgcagagtgtgggggtggtggtgctgcaggggcagggctgggtgggggtcaccagactttttctgcccttagggtagtacagctggcatttgttttatagactcttgtctttggaattggggggagggggggagtgtttcaatctgttatatgttctgtgtttaatgaagaaaacctatttattaatgaaaaatataatacatataaagaa

SEQ ID NO: 175610 - DNA, 552 bp, Homo sapiens
  Payload ID: 14493
  Gene Symbol: RND1
  Gene Name: Rho family GTPase 1
  ENST ID: ENST00000550607
  CDS Start-End: 1-381
tggaggacagaaatcctagattattgtcccagcacccgcgttttgctcattggctgcaagacagacctgcgaacagacctgagtactctgatggagctgtcccaccagaagcaggcgcccatctcctatgagcagggttgtgcaatagcaaagcagctgggtgcagaaatctacctggaaggctcagctttcacctcagaaaagagcatccacagcatctttcggacggcatccatgctgtgtctgaacaagcctagcccactgccccagaagagccctgtccgaagcctctccaaacgactgctccacctccccagtcgctctgaactcatctcttctaccttcaagaaggaaaaggccaaaagctgttccattatgtgaagtgggggtcaccagactttttctgcccttagggtagtacagctggcatttgttttatagactcttgtctttggaattggggggagggggggagtgtttcaatctgttatatgttctgtgtttaatgaagaaaacctatttattaatgaaaaatataatacatataaagaa

SEQ ID NO: 175611 - DNA, 793 bp, Homo sapiens
  Payload ID: 14493
  Gene Symbol: RND1
  Gene Name: Rho family GTPase 1
  ENST ID: ENST00000551243
  CDS Start-End: 89-379
gggaatctggcttgattggcgtgctgagacgcacctggcgcaaccctcccttctgaatcgaagttcaagtcccgcggacactgcaaccatgaaggagagacgggccccccagccagtcgtggccagatgtaagctcgttctggtcggggacgtgcagtgtgggaagaccgcgatgttgcaagtgttagcgaaggattgctatccagaggtgagctgcccgcccgcccgctggccggcttttctccctgcctgcccgccttggggtagatttccacctgctcaggagacgtggctcccccagccccagcccatcctcagccgctttctgaggctttaccatcctcagctgctttttggctggaggactgccctgccttagcttcccctgagacctgttccacttctgccgccccgctggctcctcctcacctcttcacccagaggacccatcagatcccctccaccttcctgcgtccctggagtctgctctcagacctatgtgcccaccgtgttcgaaaattacacagcctgtttggagacagaggaacagagggtggagcttagtctctgggatacctcaggatctccctactacgataatgtccgtccactctgctacagcgactcggatgcagtattactatgttttgacatcagccgtccagagacagtggacagcgcactcaagaagtggaggacagaaatcctagattattgtcccagcacccgcgttttgctcattggctgcaagacagacctgcgaacagacctgagtactctgatggagctgtcc

SEQ ID NO: 175612 - DNA, 4147 bp, Homo sapiens
  Payload ID: 14494
  Gene Symbol: RND2
  Gene Name: Rho family GTPase 2
  Uniprot ID: P52198
  ENST ID: ENST00000587250
  CDS Start-End: 108-791
gagatgccggtgttggcggcccgagcggctgcagttgcaggggcgggggaggcggcggcggggcccgggagaggggtggcgtgggggaccggcgcgtagccgggaccatggaggggcagagcggccgctgcaagatcgtggtggtgggagacgcagagtgcggcaagacggcgctgctgcaggtgttcgccaaggacgcctatcccgggagttatgtccccaccgtgtttgagaactacactgcgagctttgagatcgacaagcgccgcattgagctcaacatgtgggacacttcaggttcctcttactatgataatgtccggcctctggcctatcctgattctgatgctgtgctcatctgcttcgacattagccgaccagaaacactggacagtgttctcaagaagtggcaaggagagactcaagagttctgccccaatgccaaggttgtgctggttggctgtaaactggacatgcggactgacctggccacactgagggagctgtccaagcagaggcttatccctgttacacatgagcagggcactgtgctggccaagcaggtgggggctgtgtcctatgttgagtgctcctcccggtcctctgagcgcagcgtcagggatgtcttccatgtggctacagtggcctcccttggccgtggccataggcagctgcgccgaactgactcacgccggggaatgcagcgatccgctcagctgtcaggacggccagaccgggggaatgagggcgagatacacaaggatcgagccaaaagctgcaacctcatgtgaggggctaggagagggcagagtgtgaagaggggtggtgagggacacaattgttcccctgcctgcgcccaggcttcctgacctcctgatcctggctgggaagttagggcaggcagagcgagcaattctgggcaggggagctggagggcagaagggtatcatcgtttctcatctcctcctccctcctcttctccagtggatgttgagggagctaacagggctggcatctggggcatgaactgggatggggcaggtgggcgttagggaagctggtatcaaatggtgaccttggtggagtctcctatgtgaagagtaccctccctctccacccccagtccccatatcctggttctggcccaaggaaaatgtccattctatgaccttctcttttcctctcctctcacttctgcagctattctcacacatctaacctctaggcaacatgcactaaattcaaaagcaaggagaagcccttgccccccatcagtccaccagccctagaacctcccttgcctcaacagtcacctaataaagcccacctccatggaaaacggctgtggctttagttttgttgctttttaaaaaaatcaatctaccaatctttagcagtaagagggaaagttagacctcagctggggaactttcctgtccatgtccacagatagagcagaggacaaagccataggttggatcagaagtgtccttttaggagtcagagttgggagaaggagacatcctgggactgttcatcctagttaatgaagtgggcaattctcaggccattagggggttttagagcagaccgacatataattagtcagcatttctcagcccagccaggcctgctgctagtgtgggaggggtcctgctcaccatctgtacccctggcttggagcctgctggtaccctgggggttgtggggataaggaggcatcaggccgggcgcgctggctcacgcctgtaatcccagcactttgggaggccgaggtgggcggatcacaagttcaggagatcgagaccatcctggctaacacggtgaaaccccatctctactaaaaatacaaaaaattagccaggcgcggtggcagtgcctgtagtcccagctgctcgggaggctgaggcaggagaatggtgtgaacccgggtgaacctgggaggcggagcttgcagtgagccgagattgcgccactgcattctagcctggatgacagagcaagactctgtctccaaaaaaaaaaaaaaaaaaaaaaaagaaggcatcaaaagcctccacatcacagaagctacccctgtacagcgtgaagtttcctaagaggtcagtagtttgattctggggtctccttagaggctcaggccagggacctttctctcctcccatgctgagtttcatgatggctttcaggggagcatcagctgttagagtcacccctaccctgtcccttaaaggaaagacggtggagaggacggctgagcgcctgttgtcaggaaagacagtactggtctgttttctcgggagtctggtttcagattgtcctgtattcccttcctggctctggtcccactggcctcttttcggtgacattctcccccaggaaccatccctggcccttccctcccccagccctagccagttctcccagacacactggaagagaacactgaccttacccaactatctgctgggatcccacccaaatttatagcccattcctccctcattcattcattcagcaagtatgtactgaacaccaactgtgtggcatacactggcttgggagattgcaaggaccagtctctaagcttttggaggccagcccagtgtggaagagaggtacctcaggtgtgagggtgccatggctgagggatatttgtacatgtatgggatgctatgggagctccttgcagcctgagaagccagtcctgtgagccaggtcctgagggttgaagaggagttttccgggcagggaaggggtaggaaaggcactctgggcagagggtacagcatgtgtaaacacgtggagatgagaatgagcatagcactgttggggctcccatggcagggagaatagaagacaaggctaggaaggtacactgaggctactgcagggtccacagaggaatcagaatttcattctgaggatgaatgaaatcatcctcagaggatgaagccaccaggaatttcaggcagagagtgaagtgatcagagttgttttttggatagatggttatctggatgtggtgttggagctgggagatttggctctgaggtgtgtcatttaaaataatagcttctcggcagtggctcacacctataatcccagccaagattcctcctttgggaggccaagctgggaggatcgcttgaggccaggagttagagactgcagtgagctatgatcatgccattgtcttccagcctgagtgtcagagtgagaccctgtctctaaaaaaaattaaaaaataaaaaataaaaaatagcttctcctttcccttatgccaggttccagtcttgagaggaaaggaatccctacccaccactccctggatcatcagatatccctatcccaacctctcctatgggactagttcatctcagccagtctcaaagattctaggataacttcaatggcatttgaaattatctaagtgtgcttggataaccaccccctcaaactgagacctggttagggactgactcaaagaccctgagtcctcggctaagggtacaggagagggcaggggctccaggcccagctaggtggatctccatctgtctctgaggactgaccctttccccacaaggacctgccataaaaatcgacttgcgatttttagctgagtggcttctcttttccactttggacttctcagtgtatagcaggttcaagcctgcaaccaccaaagtgcagagtgtggagtgtttgtgccccctctttcctccaacctccatatcctgccatgtgagctcagggaatgcaaatgcatttaaatatccatctaaagcaaacataattagaaaaatcaatcagctggaggaccccccaaagtttaatacattttcaataccaccaggaatggatttttggtccctttctgcaggtctgggttgccagacgttttatttctggggaggagggctctgggctgaggagctcagtgggtgggaggagggaatgggactgttgctgatcctcaaaggcctctgtaggatggagggaggggaccttactcccttccccaccccagatgcaggagtcacccagcttccttctctgcgctgtttccttcacaaattagacattggtttgggaaacaatgtagcctcgttaaacatttaatgaaataaacaaataatcacac

SEQ ID NO: 175613 - DNA, 2711 bp, Homo sapiens
  Payload ID: 14495
  Gene Symbol: RND3
  Gene Name: Rho family GTPase 3
  Uniprot ID: P61587
  ENST ID: ENST00000263895
  CDS Start-End: 185-919
aaagccgcgcagagagcgtgaaacaaagcagtcggctcggaattggacttgggaggcgcggtgaggagtcaggcttaaaacttgttggaggggagtaaccagcctgctcctctcgctctcctcctcgtctgcgccgcgtttcagagagaaaattcctgttccaagagaaaataaggcaacatcaatgaaggagagaagagccagccagaaattatccagcaaatctatcatggatcctaatcagaacgtgaaatgcaagatagttgtggtgggagacagtcagtgtggaaaaactgcgctgctccatgtcttcgccaaggactgcttccccgagaattacgttcctacagtgtttgagaattacacggccagttttgaaatcgacacacaaagaatagagttgagcctgtgggacacttcgggttctccttactatgacaatgtccgccccctctcttaccctgattcggatgctgtgctgatttgctttgacatcagtagaccagagaccctggacagtgtcctcaaaaagtggaaaggtgaaatccaggaattttgtccaaataccaaaatgctcttggtcggctgcaagtctgatctgcggacagatgttagtacattagtagagctctccaatcacaggcagacgccagtgtcctatgaccagggggcaaatatggccaaacagattggagcagctacttatatcgaatgctcagctttacagtcggaaaatagcgtcagagacatttttcacgttgccaccttggcatgtgtaaataagacaaataaaaacgttaagcggaacaaatcacagagagccacaaagcggatttcacacatgcctagcagaccagaactctcggcagttgctacggacttacgaaaggacaaagcgaagagctgcactgtgatgtgaatctttcattatctttaatgaagacaaaggaatctagtgtaaaaaacaacagcaaacaaaaaggtgaagtctaaatgaagtgcacagccaaagtcatgtataccagaggcttaggaggcgtttgagaggatactcatctttttggaatcctgaccttaggttcggcatgtagaccaagtgatgagaagtgaatacatggaagagtttttaagtgtgacttgaaaaatatgccaaaaaatgagagatacaaatgagctagaggaagatgaggggggatgcgagtacctccaagaagaaaaatcacactctgaatggtgcttgcatttttgggttttttttttttgttataatctattcatggatctccactttgatttaatttttaaatgttttaatctcctttacaaaaagtatacgttaatataccgtcctcaagggggaactggcactgtgaccttagcatttagttttctagaggatgtgatctaatttctttctagctcatcattaaaaaggaaattgtatcaggacccatgggatatatccagaggcaaactttatgaggctttgaaatcttgccttcctgaagatagctgagtaggatggttctaaggaaagcctttgcaatcttgcaagatttgtagaccagcactacaaagatcgcatagatcaaataggaaaaaaaatgtcgatttttattcagtctgatggttctgttcttcattgtgattgtcattaaaaagtggtaaattgctcaatgtaatatttttgtgcgctgtttagaagttgtgtgattttttgccatcgttgataaaaatgcaaagtcaaataaaaggtgtcttggtttgatgtcatagaatgatccaaggagagaaaaaaggtagttactgttttcaccagaaaaggtaatgagtgaaggaaagaatagtagcagaaagcacagtttgtgagtaaagctgtctggaattaagttaccaaaaatacaaagcaaaaggactattattttgggttgaagctccaaaactgacagcatctgataatctgttggtttatttcacttttcattaaatgaacattgatgagagaagatgccacttacccaagctttagagaatccctagtggaagattatatgataaactttcagtcctgacataacactagggcatttctagagtgtcattgctaaaacctcactgaacagatgcagccaaggtctgtgttcagcacttggtctctgttgttacgtaaaataataagcatttaaaatagtttacagatatttttgaccagttccttttagagattctttcagagaagaaaccagatctgacctgtttattgttggcgcttgttgaaaacgagctttctttcccatgatagtgcttcgtttttgaagtgttgaagctgtgctccccttaaatcgtggcaggagagattaaggtaattacaacactcagttctatgtcttacaagcactttgtcttgtctctgcaagaaaattcgattccagtcatttcccataaaatacagacattttaccaacataatatgctttgattgatgcagcattatgctttgggcagtattacaaaatagctggcgagtgctttctgtatttaaatattgtaaaaagaaaataagttataactgttataaagcagaacttttgttgcattttttaaactgttgaagtcactgtgtatgtttgtttggtcaatgtttccgcagtatttattaaaacatactttttttttcttcaaataaaaaagtaaccatgtctttgtctaaa

SEQ ID NO: 175614 - DNA, 2777 bp, Homo sapiens
  Payload ID: 14495
  Gene Symbol: RND3
  Gene Name: Rho family GTPase 3
  Uniprot ID: P61587
  ENST ID: ENST00000375734
  CDS Start-End: 251-985
gcagtcggctcggaattggacttgggaggcgcggtgaggagtcaggcttaaaacttgttggaggggagtaaccagcctgctcctctcgctctcctcctcgtctgcgccgcgtttcagaggttgcccatcagccttgtgatttatttttatatctgctttttataaagagagaaatatatatatatatatatatttttttttttcttcttaagagaaaattcctgttccaagagaaaataaggcaacatcaatgaaggagagaagagccagccagaaattatccagcaaatctatcatggatcctaatcagaacgtgaaatgcaagatagttgtggtgggagacagtcagtgtggaaaaactgcgctgctccatgtcttcgccaaggactgcttccccgagaattacgttcctacagtgtttgagaattacacggccagttttgaaatcgacacacaaagaatagagttgagcctgtgggacacttcgggttctccttactatgacaatgtccgccccctctcttaccctgattcggatgctgtgctgatttgctttgacatcagtagaccagagaccctggacagtgtcctcaaaaagtggaaaggtgaaatccaggaattttgtccaaataccaaaatgctcttggtcggctgcaagtctgatctgcggacagatgttagtacattagtagagctctccaatcacaggcagacgccagtgtcctatgaccagggggcaaatatggccaaacagattggagcagctacttatatcgaatgctcagctttacagtcggaaaatagcgtcagagacatttttcacgttgccaccttggcatgtgtaaataagacaaataaaaacgttaagcggaacaaatcacagagagccacaaagcggatttcacacatgcctagcagaccagaactctcggcagttgctacggacttacgaaaggacaaagcgaagagctgcactgtgatgtgaatctttcattatctttaatgaagacaaaggaatctagtgtaaaaaacaacagcaaacaaaaaggtgaagtctaaatgaagtgcacagccaaagtcatgtataccagaggcttaggaggcgtttgagaggatactcatctttttggaatcctgaccttaggttcggcatgtagaccaagtgatgagaagtgaatacatggaagagtttttaagtgtgacttgaaaaatatgccaaaaaatgagagatacaaatgagctagaggaagatgaggggggatgcgagtacctccaagaagaaaaatcacactctgaatggtgcttgcatttttgggttttttttttttgttataatctattcatggatctccactttgatttaatttttaaatgttttaatctcctttacaaaaagtatacgttaatataccgtcctcaagggggaactggcactgtgaccttagcatttagttttctagaggatgtgatctaatttctttctagctcatcattaaaaaggaaattgtatcaggacccatgggatatatccagaggcaaactttatgaggctttgaaatcttgccttcctgaagatagctgagtaggatggttctaaggaaagcctttgcaatcttgcaagatttgtagaccagcactacaaagatcgcatagatcaaataggaaaaaaaatgtcgatttttattcagtctgatggttctgttcttcattgtgattgtcattaaaaagtggtaaattgctcaatgtaatatttttgtgcgctgtttagaagttgtgtgattttttgccatcgttgataaaaatgcaaagtcaaataaaaggtgtcttggtttgatgtcatagaatgatccaaggagagaaaaaaggtagttactgttttcaccagaaaaggtaatgagtgaaggaaagaatagtagcagaaagcacagtttgtgagtaaagctgtctggaattaagttaccaaaaatacaaagcaaaaggactattattttgggttgaagctccaaaactgacagcatctgataatctgttggtttatttcacttttcattaaatgaacattgatgagagaagatgccacttacccaagctttagagaatccctagtggaagattatatgataaactttcagtcctgacataacactagggcatttctagagtgtcattgctaaaacctcactgaacagatgcagccaaggtctgtgttcagcacttggtctctgttgttacgtaaaataataagcatttaaaatagtttacagatatttttgaccagttccttttagagattctttcagagaagaaaccagatctgacctgtttattgttggcgcttgttgaaaacgagctttctttcccatgatagtgcttcgtttttgaagtgttgaagctgtgctccccttaaatcgtggcaggagagattaaggtaattacaacactcagttctatgtcttacaagcactttgtcttgtctctgcaagaaaattcgattccagtcatttcccataaaatacagacattttaccaacataatatgctttgattgatgcagcattatgctttgggcagtattacaaaatagctggcgagtgctttctgtatttaaatattgtaaaaagaaaataagttataactgttataaagcagaacttttgttgcattttttaaactgttgaagtcactgtgtatgtttgtttggtcaatgtttccgcagtatttattaaaacatactttttttttcttcaaataaaaaagtaaccatgtctttgtctaaa

SEQ ID NO: 175615 - DNA, 2372 bp, Homo sapiens
  Payload ID: 14495
  Gene Symbol: RND3
  Gene Name: Rho family GTPase 3
  ENST ID: ENST00000409557
  CDS Start-End: 247-594
gcttgaaccgctggagcccccgagggacgcgggggttcagagagcaagaggaaggaaccagactgacagggtcgccagaggcagtcccagcacaaaggttctccttactatgacaatgtccgccccctctcttaccctgattcggatgctgtgctgatttgctttgacatcagtagaccagagaccctggacagtgtcctcaaaaagtggaaaggtgaaatccaggaattttgtccaaataccaaaatgctcttggtcggctgcaagtctgatctgcggacagatgttagtacattagtagagctctccaatcacaggcagacgccagtgtcctatgaccagggggcaaatatggccaaacagattggagcagctacttatatcgaatgctcagctttacagtcggaaaatagcgtcagagacatttttcacgttgccaccttggcatgtgtaaataagacaaataaaaacgttaagcggaacaaatcacagagagccacaaagcggatttcacacatgcctagcagaccagaactctcggcagttgctacggacttacgaaaggacaaagcgaagagctgcactgtgatgtgaatctttcattatctttaatgaagacaaaggaatctagtgtaaaaaacaacagcaaacaaaaaggtgaagtctaaatgaagtgcacagccaaagtcatgtataccagaggcttaggaggcgtttgagaggatactcatctttttggaatcctgaccttaggttcggcatgtagaccaagtgatgagaagtgaatacatggaagagtttttaagtgtgacttgaaaaatatgccaaaaaatgagagatacaaatgagctagaggaagatgaggggggatgcgagtacctccaagaagaaaaatcacactctgaatggtgcttgcatttttgggttttttttttttgttataatctattcatggatctccactttgatttaatttttaaatgttttaatctcctttacaaaaagtatacgttaatataccgtcctcaagggggaactggcactgtgaccttagcatttagttttctagaggatgtgatctaatttctttctagctcatcattaaaaaggaaattgtatcaggacccatgggatatatccagaggcaaactttatgaggctttgaaatcttgccttcctgaagatagctgagtaggatggttctaaggaaagcctttgcaatcttgcaagatttgtagaccagcactacaaagatcgcatagatcaaataggaaaaaaaatgtcgatttttattcagtctgatggttctgttcttcattgtgattgtcattaaaaagtggtaaattgctcaatgtaatatttttgtgcgctgtttagaagttgtgtgattttttgccatcgttgataaaaatgcaaagtcaaataaaaggtgtcttggtttgatgtcatagaatgatccaaggagagaaaaaaggtagttactgttttcaccagaaaaggtaatgagtgaaggaaagaatagtagcagaaagcacagtttgtgagtaaagctgtctggaattaagttaccaaaaatacaaagcaaaaggactattattttgggttgaagctccaaaactgacagcatctgataatctgttggtttatttcacttttcattaaatgaacattgatgagagaagatgccacttacccaagctttagagaatccctagtggaagattatatgataaactttcagtcctgacataacactagggcatttctagagtgtcattgctaaaacctcactgaacagatgcagccaaggtctgtgttcagcacttggtctctgttgttacgtaaaataataagcatttaaaatagtttacagatatttttgaccagttccttttagagattctttcagagaagaaaccagatctgacctgtttattgttggcgcttgttgaaaacgagctttctttcccatgatagtgcttcgtttttgaagtgttgaagctgtgctccccttaaatcgtggcaggagagattaaggtaattacaacactcagttctatgtcttacaagcactttgtcttgtctctgcaagaaaattcgattccagtcatttcccataaaatacagacattttaccaacataatatgctttgattgatgcagcattatgctttgggcagtattacaaaatagctggcgagtgctttctgtatttaaatattgtaaaaagaaaataagttataactgttataaagcagaacttttgttgcattttttaaactgttgaagtcactgtgtatgtttgtttggtcaatgtttccgcagtatttattaaaacatactttttttttcttcaaataaaaaagtaacca

SEQ ID NO: 175616 - DNA, 505 bp, Homo sapiens
  Payload ID: 14495
  Gene Symbol: RND3
  Gene Name: Rho family GTPase 3
  ENST ID: ENST00000439275
  CDS Start-End: 158-505
aatgctgaaggcaaagcaaaagatggtgattttggataaatgagaaaaaggagagagtaataggaagacaagcaagaatcacaaaaggaagcacgctaggtaatatacgatcctcccagagaaaattcctgttccaagagaaaataaggcaacatcaatgaaggagagaagagccagccagaaattatccagcaaatctatcatggatcctaatcagaacgtgaaatgcaagatagttgtggtgggagacagtcagtgtggaaaaactgcgctgctccatgtcttcgccaaggactgcttccccgagaattacgttcctacagtgtttgagaattacacggccagttttgaaatcgacacacaaagaatagagttgagcctgtgggacacttcgggttctccttactatgacaatgtccgccccctctcttaccctgattcggatgctgtgctgatttgctttgacatcagtagaccagagaccctggacagtgtcctcaaaaag

SEQ ID NO: 175617 - DNA, 481 bp, Homo sapiens
  Payload ID: 14495
  Gene Symbol: RND3
  Gene Name: Rho family GTPase 3
  ENST ID: ENST00000454202
  CDS Start-End: 134-481
attgagaaagaagaggattggaaggccgggcgtataaagccgcgcagagagcgtgaaacaaagcagtcggctcggaattggacttgggaggcgcgagaaaattcctgttccaagagaaaataaggcaacatcaatgaaggagagaagagccagccagaaattatccagcaaatctatcatggatcctaatcagaacgtgaaatgcaagatagttgtggtgggagacagtcagtgtggaaaaactgcgctgctccatgtcttcgccaaggactgcttccccgagaattacgttcctacagtgtttgagaattacacggccagttttgaaatcgacacacaaagaatagagttgagcctgtgggacacttcgggttctccttactatgacaatgtccgccccctctcttaccctgattcggatgctgtgctgatttgctttgacatcagtagaccagagaccctggacagtgtcctcaaaaag

SEQ ID NO: 175618 - DNA, 1906 bp, Homo sapiens
  Payload ID: 14496
  Gene Symbol: ARHGDIA
  Gene Name: Rho GDP dissociation inhibitor (GDI) alpha
  Uniprot ID: P52565
  ENST ID: ENST00000269321
  CDS Start-End: 137-751
gagcggaagtctcgtgaccccggaagtgacaggcagggcgggcggggcggccgacgacgttcgtcatttagtgcgggagggatcctgaaccgcgcggccgaaccctccggtgtcccgacccaggctaagcttgagcatggctgagcaggagcccacagccgagcagctggcccagattgcagcggagaacgaggaggatgagcactcggtcaactacaagcccccggcccagaagagcatccaggagatccaggagctggacaaggacgacgagagcctgcgaaagtacaaggaggccctgctgggccgcgtggccgtttccgcagaccccaacgtccccaacgtcgtggtgactggcctgaccctggtgtgcagctcggccccgggccccctggagctggacctgacgggcgacctggagagcttcaagaagcagtcgtttgtgctgaaggagggtgtggagtaccggataaaaatctctttccgggttaaccgagagatagtgtccggcatgaagtacatccagcatacgtacaggaaaggcgtcaagattgacaagactgactacatggtaggcagctatgggccccgggccgaggagtacgagttcctgacccccgtggaggaggcacccaagggtatgctggcccggggcagctacagcatcaagtcccgcttcacagacgacgacaagaccgaccacctgtcctgggagtggaatctcaccatcaagaaggactggaaggactgagcccagccagaggcgggcagggcagactgacggacggacgacggacaggcggatgtgtcccccccagcccctcccctccccataccaaagtgctgacaggccctccgtgcccctcccaccctggtccgcctccctggcctggctcaaccgagtgcctccgacccccctcctcagccctcccccacccacaggcccagcctcctcggtctcctgtctcgttgctgcttctgcctgtgctgtgggggagagaggccgcagccaggcctctgctgccctttctgtgccccccaggttctatctccccgtcacacccgaggcctggcttcaggagggagcggagcagccattctccaggccccgtggttgcccctggacgtgtgcgtctgctgctccggggtggagctggggtgtgggatgcacggcctcgtgggggccgggccgtcctccagccccgctgctccctggccagcccccttgtcgctgtcggtcccgtctaaccatgatgccttaacatgtggagtgtaccgtggggcctcactagcctctaactccctgtgtctgcatgagcatgtggcctccccgtcccttccccggtggcgaacccagtgacccagggacacgtggggtgtgctgctgctgctccccagcccaccagtgcctggccagcctgcccccttccctggacagggctgtggagatggctccggcggcttggggaaagccaaattgccaaaactcaagtcacctcagtaccatccaggaggctgggtattgtcctgcctctgccttttctgtctcagcgggcagtgcccagagcccacacccccccaagagccctcgatggacagcctcactcaccccacctgggcccagccaggagccccgcctggccatcagtatttattgcctccgtccgtgccgtccctgggccactggcctggcgcctgttcccccaggctctcagtgccaccacccccggcaggccttccctgacccagccaggaacaaacaagggaccaagtgcacacattgctgagagccgtctcctgtgcctcccccgccccatccccggtcttcgtgttgtgtctgccaggctcaggcagaggcgcctgtccctgcttcttttctgaccgggaaataaatgcccctgaagga

SEQ ID NO: 175619 - DNA, 1568 bp, Homo sapiens
  Payload ID: 14496
  Gene Symbol: ARHGDIA
  Gene Name: Rho GDP dissociation inhibitor (GDI) alpha
  Uniprot ID: P52565
  ENST ID: ENST00000400721
  CDS Start-End: 107-589
aggcagggcgggcggggcggccgacgacgttcgtcatttagtgcgggagggatcctgaaccgcgcggccgaaccctccggtgtcccgacccaggctaagcttgagcatggctgagcaggagcccacagccgagcagctggcccagattgcagcggagaacgaggaggatgagcactcggtcaactacaagcccccggcccagaagagcatccaggagatccaggagctggacaaggacgacgagagcctgcgaaagtacaaggaggccctgctgggccgcgtggccgtttccgcagaccccaacgtccccaacgtcgtggtgactggcctgaccctggtgtgcagctcggccccgggccccctggagctggacctgacgggcgacctggagagcttcaagaagcagtcgtttgtgctgaaggagggtgtggagtaccggataaaaatctctttccgggttaaccgagagatagtgtccggcatgaagtacatccagcatacgtacaggaaaggcgtcaagaacgacgacaagaccgaccacctgtcctgggagtggaatctcaccatcaagaaggactggaaggactgagcccagccagaggcgggcagggcagactgacggacggacgacggacaggcggatgtgtcccccccagcccctcccctccccataccaaagtgctgacaggccctccgtgcccctcccaccctggtccgcctccctggcctggctcaaccgagtgcctccgacccccctcctcagccctcccccacccacaggcccagcctcctcggtctcctgtctcgttgctgcttctgcctgtgctgtgggggagagaggccgcagccaggcctctgctgccctttctgtgccccccaggttctatctccccgtcacacccgaggcctggcttcaggagggagcggagcagccattctccaggccccgtggttgcccctggacgtgtgcgtctgctgctccggggtggagctggggtgtgggatgcacggcctcgtgggggccgggccgtcctccagccccgctgctccctggccagcccccttgtcgctgtcggtcccgtctaaccatgatgccttaacatgtggagtgtaccgtggggcctcactagcctctaactccctgtgtctgcatgagcatgtggcctccccgtcccttccccggtggcgaacccagtgacccagggacacgtggggtgtgctgctgctgctccccagcccaccagtgcctggccagcctgcccccttccctggacagggctgtggagatggctccggcggcttggggaaagccaaattgccaaaactcaagtcacctcagtaccatccaggaggctgggtattgtcctgcctctgccttttctgtctcagcgggcagtgcccagagcccacacccccccaagagccctcgatggacagcctcactcaccccacctgggcccagccaggagccccgcctggccatcagtatttattgcctccgtccgtgccgtccctgggccactggcctggcgcctgttcccccaggctctcagtgccaccacccccgg

SEQ ID NO: 175620 - DNA, 1517 bp, Homo sapiens
  Payload ID: 14496
  Gene Symbol: ARHGDIA
  Gene Name: Rho GDP dissociation inhibitor (GDI) alpha
  Uniprot ID: P52565
  ENST ID: ENST00000541078
  CDS Start-End: 367-981
cgcgtggggcccgggccagacctgagggcccctccttggggacgcggggggcgccgggccggcagccgcggtccatcgcgttcgggggcgacgcggggattggggcgcggcctcccccagcgcccgggccacgcccggcacggattgcgggccctgcggaagtgcgggccgcgccctaggatcccggcgcctacggctatcctcgcgcggcgcggaggccccagcccctggaggaagcagggcggcctggaccccggcctgggtgtcccgggtgtgctgctccctgacccacctcccacgctgccgggaaggatctgagcctgacagatcccctgccgggtgtcccgacccaggctaagcttgagcatggctgagcaggagcccacagccgagcagctggcccagattgcagcggagaacgaggaggatgagcactcggtcaactacaagcccccggcccagaagagcatccaggagatccaggagctggacaaggacgacgagagcctgcgaaagtacaaggaggccctgctgggccgcgtggccgtttccgcagaccccaacgtccccaacgtcgtggtgactggcctgaccctggtgtgcagctcggccccgggccccctggagctggacctgacgggcgacctggagagcttcaagaagcagtcgtttgtgctgaaggagggtgtggagtaccggataaaaatctctttccgggttaaccgagagatagtgtccggcatgaagtacatccagcatacgtacaggaaaggcgtcaagattgacaagactgactacatggtaggcagctatgggccccgggccgaggagtacgagttcctgacccccgtggaggaggcacccaagggtatgctggcccggggcagctacagcatcaagtcccgcttcacagacgacgacaagaccgaccacctgtcctgggagtggaatctcaccatcaagaaggactggaaggactgagcccagccagaggcgggcagggcagactgacggacggacgacggacaggcggatgtgtcccccccagcccctcccctccccataccaaagtgctgacaggccctccgtgcccctcccaccctggtccgcctccctggcctggctcaaccgagtgcctccgacccccctcctcagccctcccccacccacaggcccagcctcctcggtctcctgtctcgttgctgcttctgcctgtgctgtgggggagagaggccgcagccaggcctctgctgccctttctgtgccccccaggttctatctccccgtcacacccgaggcctggcttcaggagggagcggagcagccattctccaggccccgtggttgcccctggacgtgtgcgtctgctgctccggggtggagctggggtgtgggatgcacggcctcgtgggggccgggccgtcctccagccccgctgctccctggccagcccccttgtcgctgtcggtcccgtctaaccatgatgccttaacatgtggagtgtaccgtggggcctc

SEQ ID NO: 175621 - DNA, 709 bp, Homo sapiens
  Payload ID: 14496
  Gene Symbol: ARHGDIA
  Gene Name: Rho GDP dissociation inhibitor (GDI) alpha
  ENST ID: ENST00000581876
  CDS Start-End: 55-444
tcctgaaccgcgcggccgaaccctccggtgtcccgacccaggctaagcttgagcatggctgagcaggagcccacagccgagcagctggcccagattgcagcggagaacgaggaggatgagcactcggtcaactacaagcccccggcccagaagagcatccaggagatccaggagctggacaaggacgacgagagcctgcgaaagtacaaggaggccctgctgggccgcgtggccgtttccgcagttgacaagactgactacatggtaggcagctatgggccccgggccgaggagtacgagttcctgacccccgtggaggaggcacccaagggtatgctggcccggggcagctacagcatcaagtcccgcttcacagacgacgacaagaccgaccacctgtcctgggagtggaatctcaccatcaagaaggactggaaggactgagcccagccagaggcgggcagggcagactgacggacggacgacggacaggcggatgtgtcccccccagcccctcccctccccataccaaagtgctgacaggccctccgtgcccctcccaccctggtccgcctccctggcctggctcaaccgagtgcctccgacccccctcctcagccctcccccacccacaggcccagcctcctcggtctcctgtctcgttgctgcttctgcctgtgctgtgggggagagaggccgcagccaggcc

SEQ ID NO: 175622 - DNA, 815 bp, Homo sapiens
  Payload ID: 14496
  Gene Symbol: ARHGDIA
  Gene Name: Rho GDP dissociation inhibitor (GDI) alpha
  ENST ID: ENST00000583868
  CDS Start-End: 68-815
agtgcgggagggatcctgaaccgcgcggccgaaccctccggtgtcccgacccaggctaagcttgagcatggctgagcaggagcccacagccgagcagctggcccagattgcagcggagaacgaggaggatgagcactcggtcaactacaagcccccggcccagaagagcatccaggagatccaggagctggacaaggacgacgagagcctgcgaaagtacaaggaggccctgctgggccgcgtggccgtttccgcagaccccaacgtccccaacgtcgtggtgactggcctgaccctggtgtgcagctcggccccgggccccctggagctggacctgacgggcgacctggagagcttcaagaagcagtcgtttgtgctgaaggagggtgtggagtaccggataaaaatctctttccgggttaaccgagagatagtgtccggcatgaagtacatccagcatacgtacaggaaaggcgtcaagattgacaagactgactacatgacgacgacaagaccgaccacctgtcctgggagtggaatctcaccatcaagaaggactggaaggactgagcccagccagaggcgggcagggcagactgacggacggacgacggacaggcggatgtgtcccccccagcccctcccctccccataccaaagtgctgacaggccctccgtgcccctcccaccctggtccgcctccctggcctggctcaaccgagtgcctccgacccccctcctcagccctcccccacccacaggcccagcctcctcggtctcctgtctcgttgctgcttctgcctgtgctgtggggg

SEQ ID NO: 175623 - DNA, 421 bp, Homo sapiens
  Payload ID: 14496
  Gene Symbol: ARHGDIA
  Gene Name: Rho GDP dissociation inhibitor (GDI) alpha
  ENST ID: ENST00000578351
  CDS Start-End: 57-335
gatcctgaaccgcgcggccgaaccctccggtgtcccgacccaggctaagcttgagcatggctgagcaggagcccacagccgagcagctggcccagattgcagcggagaacgaggaggatgagcactcggtcaactacaagcccccggcccagaagagcatccaggagatccaggagctggacaaggacgacgagagcctgcgaaagtacaaggaggccctgctgggccgcgtggccgtttccgcagaccccaacgtccccaacgtcgtggtgactggcctgaccctggtgtgcagctcggccccgggccccctggagctggacctgacgggttaaccgagagatagtgtccggcatgaagtacatccagcatacgtacaggaaaggcgtcaagattgacaagactgactacatggtaggca

SEQ ID NO: 175624 - DNA, 637 bp, Homo sapiens
  Payload ID: 14496
  Gene Symbol: ARHGDIA
  Gene Name: Rho GDP dissociation inhibitor (GDI) alpha
  ENST ID: ENST00000579121
  CDS Start-End: 57-637
ggatctgagcctgacagatcccctgccgggtgtcccgacccaggctaagcttgagcatggctgagcaggagcccacagccgagcagctggcccagattgcagcggagaacgaggaggatgagcactcggtcaactacaagcccccggcccagaagagcatccaggagatccaggagctggacaaggacgacgagagcctgcgaaagtacaaggaggccctgctgggccgcgtggccgtttccgcagaccccaacgtccccaacgtcgtggtgactggcctgaccctggtgtgcagctcggccccgggccccctggagctggacctgacgggcgacctggagagcttcaagaagcagtcgtttgtgctgaaggagggtgtggagtaccggataaaaatctctttccgggttaaccgagagatagtgtccggcatgaagtacatccagcatacgtacaggaaaggcgtcaagattgacaagactgactacatggtaggcagctatgggccccgggccgaggagtacgagttcctgacccccgtggaggaggcacccaagggttctatctccccgtcacacccgaggcctggcttcaggagggagcggagcagccattctccaggccccgtggttgcccc

SEQ ID NO: 175625 - DNA, 547 bp, Homo sapiens
  Payload ID: 14496
  Gene Symbol: ARHGDIA
  Gene Name: Rho GDP dissociation inhibitor (GDI) alpha
  ENST ID: ENST00000580033
  CDS Start-End: 56-334
atcctgaaccgcgcggccgaaccctccggtgtcccgacccaggctaagcttgagcatggctgagcaggagcccacagccgagcagctggcccagattgcagcggagaacgaggaggatgagcactcggtcaactacaagcccccggcccagaagagcatccaggagatccaggagctggacaaggacgacgagagcctgcgaaagtacaaggaggccctgctgggccgcgtggccgtttccgcagaccccaacgtccccaacgtcgtggtgactggcctgaccctggtgtgcagctcggccccgggccccctggagctggacctgacgggttaaccgagagatagtgtccggcatgaagtacatccagcatacgtacaggaaaggcgtcaagattgacaagactgactacatggtaggcagctatgggccccgggccgaggagtacgagttcctgacccccgtggaggaggcacccaagggtatgctggcccggggcagctacagcatcaagtcccgcttcacagacgacgacaagaccgaccacct

SEQ ID NO: 175626 - DNA, 886 bp, Homo sapiens
  Payload ID: 14496
  Gene Symbol: ARHGDIA
  Gene Name: Rho GDP dissociation inhibitor (GDI) alpha
  ENST ID: ENST00000584461
  CDS Start-End: 60-767
agggatcctgaaccgcgcggccgaaccctccggtgtcccgacccaggctaagcttgagcatggctgagcaggagcccacagccgagcagctggcccagattgcagcggagaacgaggaggatgagcactcggtcaactacaagcccccggcccagaagagcatccaggagatccaggagctggacaaggacgacgagagcctgcgaaagtacaaggaggccctgctgggccgcgtggccgtttccgcagaccccaacgtccccaacgtcgtggtgactggcctgaccctggtgtgcagctcggccccgggccccctggagctggacctgacgggcgacctggagagcttcaagaagcagtcgtttgtgctgaaggagggtgtggagtaccggataaaaatctctttccgggttaaccgagagatagtgtccggcatgaagtacatccagcatacgtacaggaaaggcgtcaagattgacaagactgactacatggtaggcagctatgggccccgggccgaggagtacgagttcctgacccccgtggaggaggcacccaagggttctatctccccgtcacacccgaggcctggcttcaggagggagcggagcagccattctccaggccccgtggttgcccctggacgtgtgcgtctgctgctccggggtggagctggggtgtgggatgcacggcctcgtgggggccgggccgtcctccagccccgctgctccctggccagcccccttgtcgctgtcggtcccgtctaaccatgatgccttaacatgtggagtgtaccgtggggcctcactagcctctaactccctgtgtctgcatgagcatgtggcctccccgtcccttccccggtggcgaacccagtgacccaggg

SEQ ID NO: 175627 - DNA, 1201 bp, Homo sapiens
  Payload ID: 14496
  Gene Symbol: ARHGDIA
  Gene Name: Rho GDP dissociation inhibitor (GDI) alpha
  Uniprot ID: P52565
  ENST ID: ENST00000580685
  CDS Start-End: 77-691
gcctccgttggggatccaggtccaaggcctgtcaccgtcccgcccacaggtgtcccgacccaggctaagcttgagcatggctgagcaggagcccacagccgagcagctggcccagattgcagcggagaacgaggaggatgagcactcggtcaactacaagcccccggcccagaagagcatccaggagatccaggagctggacaaggacgacgagagcctgcgaaagtacaaggaggccctgctgggccgcgtggccgtttccgcagaccccaacgtccccaacgtcgtggtgactggcctgaccctggtgtgcagctcggccccgggccccctggagctggacctgacgggcgacctggagagcttcaagaagcagtcgtttgtgctgaaggagggtgtggagtaccggataaaaatctctttccgggttaaccgagagatagtgtccggcatgaagtacatccagcatacgtacaggaaaggcgtcaagattgacaagactgactacatggtaggcagctatgggccccgggccgaggagtacgagttcctgacccccgtggaggaggcacccaagggtatgctggcccggggcagctacagcatcaagtcccgcttcacagacgacgacaagaccgaccacctgtcctgggagtggaatctcaccatcaagaaggactggaaggactgagcccagccagaggcgggcagggcagactgacggacggacgacggacaggcggatgtgtcccccccagcccctcccctccccataccaaagtgctgacaggccctccgtgcccctcccaccctggtccgcctccctggcctggctcaaccgagtgcctccgacccccctcctcagccctcccccacccacaggcccagcctcctcggtctcctgtctcgttgctgcttctgcctgtgctgtgggggagagaggccgcagccaggcctctgctgccctttctgtgccccccaggttctatctccccgtcacacccgaggcctggcttcaggagggagcggagcagccattctccaggccccgtggttgcccctggacgtgtgcgtctgctgctccggggtggagctggggtgtgggatgcacggcctcgtgggggccgggccgtcctccagccccgctgctccctggccagcccccttgtcgctgtcggtcccgtctaaccatgatgcctta

SEQ ID NO: 175628 - DNA, 1256 bp, Homo sapiens
  Payload ID: 14497
  Gene Symbol: ARHGDIB
  Gene Name: Rho GDP dissociation inhibitor (GDI) beta
  Uniprot ID: P52566
  ENST ID: ENST00000228945
  CDS Start-End: 146-751
ccagggtttcctcttcaagtaggtctaaaacatttttttttctcattgacttccttcctgttctaactgccagtactcagaagtcagagttgagagacagaggcaccccggacagagacgtgaagcactgaataaatagatcagaatgactgaaaaagccccagagccacatgtggaggaggatgacgatgatgagctggacagcaagctcaattataagcctccaccacagaagtccctgaaagagctgcaggaaatggacaaagatgatgagagtctaattaagtacaagaaaacgctgctgggagatggtcctgtggtgacagatccgaaagcccccaatgtcgttgtcacccggctcaccctggtttgtgagagtgccccgggaccaatcaccatggaccttactggagatctggaagccctcaaaaaggaaaccattgtgttaaaggaaggttctgaatatagagtcaaaattcacttcaaagtgaacagggatattgtgtcaggcctgaaatacgttcagcacacctacaggactggggtgaaagtggataaagcaacatttatggttggcagctatggacctcggcctgaggagtatgagttcctcactccagttgaggaggctcccaagggcatgctggcgcgaggcacgtaccacaacaagtccttcttcaccgacgatgacaagcaagaccacctcagctgggagtggaacctgtcgattaagaaggagtggacagaatgaatgcatccacccctttccccacccttgccacctggaagaattctctcaggcgtgttcagcaccctgtccctcctccctgtccacagctgggtccctcttcaacactgccacatttccttattgatgcatcttttcccaccctgtcactcaacgtggtccctagaacaagaggcttaaaaccgggctttcacccaacctgctccctctgatcctccatcagggccagatcttccacgtctccatctcagtacacaatcatttaatatttccctgtcttacccctattcaagcaactagaggccagaaaatgggcaaattatcactaacaggtctttgactcaggttccagtagttcattctaatgcctagattcttttgtggttgttgctggcccaatgagtccctagtcacatcccctgccagagggagttcttcttttgtgagagacactgtaaacgacacaagagaacaagaataaaacaataactgtgtgtgttctggctga

SEQ ID NO: 175629 - DNA, 463 bp, Homo sapiens
  Payload ID: 14497
  Gene Symbol: ARHGDIB
  Gene Name: Rho GDP dissociation inhibitor (GDI) beta
  ENST ID: ENST00000541380
  CDS Start-End: 126-463
tcagaagggctctgagaacacgcaccgggagtgcctggaggggtttcctgcaaagtaggagcaggcacctggccaggcttggaagaaaaagactgtagatccaaaatgatacgaaatagatcagaatgactgaaaaagccccagagccacatgtggaggaggatgacgatgatgagctggacagcaagctcaattataagcctccaccacagaagtccctgaaagagctgcaggaaatggacaaagatgatgagagtctaattaagtacaagaaaacgctgctgggagatggtcctgtggtgacagatccgaaagcccccaatgtcgttgtcacccggctcaccctggtttgtgagagtgccccgggaccaatcaccatggaccttactggagatctggaagccctcaaaaaggaaaccattgtgttaaaggaaggttctgaatatagagtcaaaattcactt

SEQ ID NO: 175630 - DNA, 859 bp, Homo sapiens
  Payload ID: 14497
  Gene Symbol: ARHGDIB
  Gene Name: Rho GDP dissociation inhibitor (GDI) beta
  Uniprot ID: P52566
  ENST ID: ENST00000541546
  CDS Start-End: 240-845
aactgccagtactcagaagtcagagttgagagacagaggcaccccggacagagacgtgaagcactgaataggatgaaactggggcccagtgaggttaagcaacttgcaggaggtaacgcaggaaccgagttgcgctgaaacatcgttatctgacacttccctgctttgttaaagctgtctctgcagagcttgcaaagaagcatttacctctgcttgtgcacctccagaaatagatcagaatgactgaaaaagccccagagccacatgtggaggaggatgacgatgatgagctggacagcaagctcaattataagcctccaccacagaagtccctgaaagagctgcaggaaatggacaaagatgatgagagtctaattaagtacaagaaaacgctgctgggagatggtcctgtggtgacagatccgaaagcccccaatgtcgttgtcacccggctcaccctggtttgtgagagtgccccgggaccaatcaccatggaccttactggagatctggaagccctcaaaaaggaaaccattgtgttaaaggaaggttctgaatatagagtcaaaattcacttcaaagtgaacagggatattgtgtcaggcctgaaatacgttcagcacacctacaggactggggtgaaagtggataaagcaacatttatggttggcagctatggacctcggcctgaggagtatgagttcctcactccagttgaggaggctcccaagggcatgctggcgcgaggcacgtaccacaacaagtccttcttcaccgacgatgacaagcaagaccacctcagctgggagtggaacctgtcgattaagaaggagtggacagaatgaatgcatccacccct

SEQ ID NO: 175631 - DNA, 911 bp, Homo sapiens
  Payload ID: 14497
  Gene Symbol: ARHGDIB
  Gene Name: Rho GDP dissociation inhibitor (GDI) beta
  Uniprot ID: P52566
  ENST ID: ENST00000541644
  CDS Start-End: 114-719
ggctggctggatttggaggactgtgataactcctacagctttttgactgggcttttgcttcatttgttcaggagtctttgtgccatgttgcttcactcgtaaaatagatcagaatgactgaaaaagccccagagccacatgtggaggaggatgacgatgatgagctggacagcaagctcaattataagcctccaccacagaagtccctgaaagagctgcaggaaatggacaaagatgatgagagtctaattaagtacaagaaaacgctgctgggagatggtcctgtggtgacagatccgaaagcccccaatgtcgttgtcacccggctcaccctggtttgtgagagtgccccgggaccaatcaccatggaccttactggagatctggaagccctcaaaaaggaaaccattgtgttaaaggaaggttctgaatatagagtcaaaattcacttcaaagtgaacagggatattgtgtcaggcctgaaatacgttcagcacacctacaggactggggtgaaagtggataaagcaacatttatggttggcagctatggacctcggcctgaggagtatgagttcctcactccagttgaggaggctcccaagggcatgctggcgcgaggcacgtaccacaacaagtccttcttcaccgacgatgacaagcaagaccacctcagctgggagtggaacctgtcgattaagaaggagtggacagaatgaatgcatccacccctttccccacccttgccacctggaagaattctctcaggcgtgttcagcaccctgtccctcctccctgtccacagctgggtccctcttcaacactgccacatttccttattgatgcatcttttcccaccctgtcactcaacgtggtccctagaacaagaggcttaaaaccgggctttcacc

SEQ ID NO: 175632 - DNA, 1063 bp, Homo sapiens
  Payload ID: 14497
  Gene Symbol: ARHGDIB
  Gene Name: Rho GDP dissociation inhibitor (GDI) beta
  ENST ID: ENST00000536592
  CDS Start-End: 1-586
agagccacatgtggaggaggatgacgatgatgagctggacagcaagctcaattataagcctccaccacagaagtccctgaaagagctgcaggaaatggacaaagatgatgagagtctaattaagtacaagaaaacgctgctgggagatggtcctgtggtgacagatccgaaagcccccaatgtcgttgtcacccggctcaccctggtttgtgagagtgccccgggaccaatcaccatggaccttactgatctggaagccctcaaaaaggaaaccattgtgttaaaggaaggttctgaatatagagtcaaaattcacttcaaagtgaacagggatattgtgtcaggcctgaaatacgttcagcacacctacaggactggggtgaaagtggataaagcaacatttatggttggcagctatggacctcggcctgaggagtatgagttcctcactccagttgaggaggctcccaagggcatgctggcgcgaggcacgtaccacaacaagtccttcttcaccgacgatgacaagcaagaccacctcagctgggagtggaacctgtcgattaagaaggagtggacagaatgaatgcatccacccctttccccacccttgccacctggaagaattctctcaggcgtgttcagcaccctgtccctcctccctgtccacagctgggtccctcttcaacactgccacatttccttattgatgcatcttttcccaccctgtcactcaacgtggtccctagaacaagaggcttaaaaccgggctttcacccaacctgctccctctgatcctccatcagggccagatcttccacgtctccatctcagtacacaatcatttaatatttccctgtcttacccctattcaagcaactagaggccagaaaatgggcaaattatcactaacaggtctttgactcaggttccagtagttcattctaatgcctagattcttttgtggttgttgctggcccaatgagtccctagtcacatcccctgccagagggagttcttcttttgtgagagacactgtaaacgacacaagagaacaagaata

SEQ ID NO: 175633 - DNA, 723 bp, Homo sapiens
  Payload ID: 14497
  Gene Symbol: ARHGDIB
  Gene Name: Rho GDP dissociation inhibitor (GDI) beta
  ENST ID: ENST00000545895
  CDS Start-End: 248-723
cattatcactcagactgtgcatgctgcaagctttgacgctagccaggctggctggatttggaggactgtgataactcctacagctttttgactgggcttttgcttcatttgttcaggagtctttgtgccatgttgcttcactcgtagtacgttattcacatatgagtgatttctttcttgtcagttttgttcagtgaatagaagatactacaatggtacagagaaattcaggcagaaatagatcagaatgactgaaaaagccccagagccacatgtggaggaggatgacgatgatgagctggacagcaagctcaattataagcctccaccacagaagtccctgaaagagctgcaggaaatggacaaagatgatgagagtctaattaagtacaagaaaacgctgctgggagatggtcctgtggtgacagatccgaaagcccccaatgtcgttgtcacccggctcaccctggtttgtgagagtgccccgggaccaatcaccatggaccttactggagatctggaagccctcaaaaaggaaaccattgtgttaaaggaaggttctgaatatagagtcaaaattcacttcaaagtgaacagggatattgtgtcaggcctgaaatacgttcagcacacctacaggactggggtgaaagtggataaagcaacatttatggttggcagctatggacctcggcctgaggagtatgagttcctcactccagt

SEQ ID NO: 175634 - DNA, 354 bp, Homo sapiens
  Payload ID: 14497
  Gene Symbol: ARHGDIB
  Gene Name: Rho GDP dissociation inhibitor (GDI) beta
  ENST ID: ENST00000542276
  CDS Start-End: 90-354
gctgctcaagttggctgatcaagagataggcagtgcaaaggaacaggatttgagacagcccagggtttcctcttcaaaaatagatcagaatgactgaaaaagccccagagccacatgtggaggaggatgacgatgatgagctggacagcaagctcaattataagcctccaccacagaagtccctgaaagagctgcaggaaatggacaaagatgatgagagtctaattaagtacaagaaaacgctgctgggagatggtcctgtggtgacagatccgaaagcccccaatgtcgttgtcacccggctcaccctggtttgtgagagtgccccgggaccaatcaccatggaccttactg

SEQ ID NO: 175635 - DNA, 949 bp, Homo sapiens
  Payload ID: 14498
  Gene Symbol: ARHGDIG
  Gene Name: Rho GDP dissociation inhibitor (GDI) gamma
  Uniprot ID: Q99819
  ENST ID: ENST00000219409
  CDS Start-End: 76-753
gagcgccgagcggggcggcggcggggcgggcggcggctcctcggcggctccgcggcgcccgggccgcgcgccgccatgctgggcctggacgcgtgcgagctgggggcgcagctgctggagctgctccggctggcgctgtgcgcccgagtcctcctggctgacaaggagggtgggccgccggcagtggacgaggtgttggatgaggctgtgcccgagtaccgggcgccggggaggaagagcctcttggagatccggcagctggacccggacgacaggagcctggccaagtacaagcgggtgctgctggggcccctgccaccggccgtggacccaagcctgcccaatgtgcaggtgaccaggctgacactcctgtcggaacaggctccggggcccgtcgtcatggatctcacaggggacctggctgttctgaaggaccaggtgtttgtcctgaaggaaggtgttgattacagagtgaagatctccttcaaggtccacagggagattgtcagcggcctcaagtgtctgcaccacacctaccgccggggcctgcgcgtggacaagaccgtctacatggtgggcagctatggcccgagcgcccaggagtatgagtttgtgactccggtggaggaagcgccgaggggtgcgctggtgcggggcccctatctggtggtgtccctcttcaccgacgatgacaggacgcaccacctgtcctgggagtggggtctctgcatctgccaggactggaaggactgaacccccagtccgtgtctcccctacctccctcagttgttgcacagggacccccaagcatccccagcaccccccgtgagtgaccagaccctcccctgctgcccctgctgcccctgctgcccctgctctgtcccgggaccccctggcctggcgctgtcccctgagctgtcccattaaacatggccctgtctctctcggt

SEQ ID NO: 175636 - DNA, 519 bp, Homo sapiens
  Payload ID: 14498
  Gene Symbol: ARHGDIG
  Gene Name: Rho GDP dissociation inhibitor (GDI) gamma
  ENST ID: ENST00000435035
  CDS Start-End: 111-519
gtgacctcgaggcagcctcagcacggcactctcttgggtcctcttccaggctcacactgggcgacagcggagaggctcttggacggggcagagctcgcgccgagacctgcatgtccgcgtcttgtgacgggtgtgtgggaagccgcccgcctgtgcatcttgcttccgggtattcgctggctgatttactggttttagagatggggatgggcacccagtgctggactgaagaccagagaaggtggagctccctgtggccttggtctcacctctcttcagtcctcctggctgacaaggagggtgggccgccggcagtggacgaggtgttggatgaggctgtgcccgagtaccgggcgccggggaggaagagcctcttggagatccggcagctggacccggacgacaggagcctggccaagtacaagcgggtgctgctggggcccctgccaccggccgtggacccaagcctgcccaatgtgcaggtgaccaggctgacactcctgtcggaacaggctccgg

SEQ ID NO: 175637 - DNA, 765 bp, Homo sapiens
  Payload ID: 14498
  Gene Symbol: ARHGDIG
  Gene Name: Rho GDP dissociation inhibitor (GDI) gamma
  ENST ID: ENST00000447871
  CDS Start-End: 232-765
cggcgggggcgacccgggtgccggcccgtgcgggcgacacgcgcgtctctgcggggctgcgcggggtccggagcggctgggggctctctgccgggcgcggctgggcgcggggggcgctcccggccgggatgagctcaccgcagtcgcgccggggctgagcgccgagcggggcggcggcggggcgggcggcggctcctcggcggctccgcggcgcccgggccgcgcgccgccatgctgggcctggacgcgtgcgagctgggggcgcagctgctggagctgctccggctggcgctgtgcgcccgagtcctcctggctgacaaggagggtgggccgccggcagtggacgaggtgttggatgaggctgtgcccgagtaccgggcgccggggaggaagagcctcttggagatccggcagctggacccggacgacaggagcctggccaagtacaagcgggtgctgctggggcccctgccaccggccgtggacccaagcctgcccaatgtgcaggtgaccaggctgacactcctgtcggaacaggctccggggcccgtcgtcatggatctcacaggggacctggctgttctgaaggaccaggtgtttgtcctgaaggaaggtgttgattacagagtccacagggagattgtcagcggcctcaagtgtctgcaccacacctaccgccggggcctgcgcgtggacaagaccgtctacatggtgggcagctatggcccgagcgcccaggagtatgagtttgtgactccggtggag

SEQ ID NO: 175638 - DNA, 339 bp, Homo sapiens
  Payload ID: 14498
  Gene Symbol: ARHGDIG
  Gene Name: Rho GDP dissociation inhibitor (GDI) gamma
  ENST ID: ENST00000412541
  CDS Start-End: 111-339
gtgacctcgaggcagcctcagcacggcactctcttgggtcctcttccaggctcacactgggcgacagcggagaggctcttggacggggcagagctcgcgccgagacctgcatgtccgcgtcttgtgacgggtgtgtgggaagccgcccgcctgtgcatcttgcttccgggtattcgctggctgatttactggttttagagatggggatgggcacccagtgctggactgaagaccagagaaggtggagctccctgtggccttggtctcacctctcttcagacccaagcctgcccaatgtgcaggtgaccaggctgacactcctgtcggaacaggctccgg

SEQ ID NO: 175639 - DNA, 680 bp, Homo sapiens
  Payload ID: 14498
  Gene Symbol: ARHGDIG
  Gene Name: Rho GDP dissociation inhibitor (GDI) gamma
  ENST ID: ENST00000414650
  CDS Start-End: 331-680
gcggcgccgaccccccggctggggtctggcaggggtgggggacttcatccaggctccagccctgtggggaagggaccagtcctcctggctgacaaggagggtgggccgccggcagtggacgaggtgttggatgaggctgtgcccgagtaccgggcgccggggaggaagagcctcttggagatccggcagctggacccggacgacaggagcctggccaagtacaagcgggtgctgctggggcccctgccaccggccgtggacccaagcctgcccaatgtgcaggtgaccaggctgacactcctgtcggaacaggctccggggcccgtcgtcatggatctcacaggggacctggctgttctgaaggaccaggtgtttgtcctgaaggaaggtgttgattacagagtgaagatctccttcaaggtccacagggagattgtcagcggcctcaagtgtctgcaccacacctaccgccggggcctgcgcgtggacaagaccgtctacatggtgggcagctatggcccgagcgcccaggagtatgagtttgtgactccggtggaggaagcgccgaggggtgcgctggtgcggggcccctatctggtggtgtccctcttcaccgacgatgacaggacgcaccacctgtcctgggagtggggtctctgcatctgccaggactggaagga

SEQ ID NO: 175640 - DNA, 3375 bp, Homo sapiens
  Payload ID: 14499
  Gene Symbol: ARHGAP1
  Gene Name: Rho GTPase activating protein 1
  Uniprot ID: Q07960
  ENST ID: ENST00000311956
  CDS Start-End: 99-1418
gtttgccgagccttgacaggcgtggcagagggagcagtgcccgagcgcggtttctcttaaggttctgcagggcaaggctgtctgggacaggcttggccatggatccgctctcagagctgcaggatgatctgaccttggatgacaccagcgaggctctgaaccagctgaagctggcctccatcgatgagaagaactggccctcggatgaaatgcctgacttccccaagtcagatgactccaaaagcagctccccggaacttgtcacacacctgaagtgggatgacccatactatgacatcgcccggcaccagatcgtggaggtggcaggagatgacaagtatgggcggaagatcattgtgtttagtgcctgtcgaatgccccccagccaccagctcgaccacagcaagctcctggggtacctgaagcacaccctggaccagtacgtggagagtgactacacacttctgtatctgcaccacggcctgaccagcgacaacaagccctccctcagctggctccgtgatgcctaccgggagtttgaccgcaagtacaagaaaaacatcaaggccttgtacatcgtgcatccaaccatgttcatcaaaactctgctcatcctcttcaagcccctcatcagcttcaagttcgggcagaagatcttctatgtgaattacctgagcgagctgagcgagcacgtgaagctggagcagctggggatccctcgccaagtgctcaaatatgacgacttcctgaaatccacacagaagagccccgcgacagcccccaagcccatgcccccacggccccccctgcccaaccagcagtttggagtctcgctgcagcacctccaggagaagaatccagagcaggagcccattcccattgtactcagggagactgttgcctacttacaggcccacgctctcaccaccgagggcatcttccggaggtcggccaacacccaagtggtccgggaagtgcagcagaagtacaacatggggctgcctgtggatttcgaccagtacaatgagctgcacctgccagcagtcatcctcaagaccttcctccgggagcttcctgagcccctgctcacctttgacctctacccccatgtggtgggcttcctcaacattgatgaaagccagagggtgccagcgacactgcaggtcctccagacgctgcccgaggagaactaccaggtgcttcgtttcctgactgctttcctggtgcagatttctgcacacagtgaccagaacaagatgaccaacactaacctggctgttgttttcggccctaacctgctgtgggccaaggatgcggccatcaccctcaaggccattaatcccatcaacaccttcaccaagttccttctggatcaccaaggggagctgttcccaagcccggaccccagcgggctctgaacctggcccctgccccaccagccccttctctggtagcccgggtttggactcttcctcctggcatcaggggccatgaagccccctggagagagatgttggagccacccatcaggcatgctctcccccacctctgtccagcccgcctcacggccctggcggcctcgctgttaccagaagacgtttttctctgccttacacttctcactgcctctctggacaccgggcttttgctgggctctccagagctgggcttggctcttccagctggagaaggactgagccccagtaacccctttcctgctttttcctgcctctgtttccctagcaagtgtggatgaatcaaatgactgccggctgggctggtagcaggggccagtcctcccctcttgattgctgggaatgagcagctgagctctttggtgtggacaccgccccaagctgaggtgcctccctatctggtaggctgccctgctttgcagaagccccactgcatgaaggcctgagtgcaagcacccttgctcctgtactgcccccagcagcgcagtctggggtatttcccctgctgaggagtgacagggctggagactgtgtctgctttctgcctcctcttccacacatcctgggtcagcctttcccaagtgatactgcccctggggtgtcctaaccccttggttgtgcagggactggtagcttggatgacatggctcagagtcccagcatccacttgaaacctccctctccacctccccgcccccgagagctacagcgtgtgatggaatcagtgaccggccaggttagcctctcccctcttggcctcctttcccacacgggcagatcatcagccttcatgttcttgtggacctgtctgttacggagtcacactggcccctgccccagccagaggtgactcagtgcctcaggatcttatggctccttcctccagctgggggactcttaaaggggctggggtagagactaagagtgcccgtaggaggggcagagattgtgctgataggtcagtccagataggtgggttctagcaatttccccaggggattaaggggctctagggccacctttttttttttttttctgagatggagtctcgctctgtcaccaggctggagtgcagtggcgcgatctcggcacacctccgccttctgggttcaagcaattctcctgcctcagcctcctgagtagctgggactataggtgcatgccaccatgcccagctaatttttgtatttttagtagagacggggtttcaccatgttggccaggatggtctcgatctcctgacctcatgatccacccacctcggcctcccaaagtgctgggattccaggcgtgagccactgcacccggccagccctgttgtctttcaaagaacctcggccccagtgatggctgatctcactcccactgtctcgtagaattacactccttcctggggatccctcttcctgcagccttgtccttggggagtacagggaagtacctgcagtgaccctgcccccatgaccttggccaggcaggatgattccagagcccgtactgtggggatcctcactgaccagcccagccccatccgcaagccaggctgggcctgggcataacttcgctgggctctcccaagaccatcagcagtgcatccagccccctggggcctgggctgctgctggttcttcatcagtcccttggtctctagcctcggccagggctgctctgctctccgccctcctttgtgtatcaagtgtcgctcacagccccattcactggggagcctttcggatctatttggtctttctcatgtcccccactggtctgtaccccagggagcgggtgcttgtactgtgtgaatccagtgttcacattcacacttaatgacttccttggcaccaatcatgtatttcaccgtttgcactttttgtatttcaataaaaatgttgatgcaaaa

SEQ ID NO: 175641 - DNA, 890 bp, Homo sapiens
  Payload ID: 14499
  Gene Symbol: ARHGAP1
  Gene Name: Rho GTPase activating protein 1
  ENST ID: ENST00000525488
  CDS Start-End: 314-890
gttgctgcccattagggctgagggcagaggtgcctacccccaggctgcatgcggctgcagccttctggccagattccagacctacagaaacccagcttggtggtcgagtctgccttgtgcctgccggagctgctgttctgctggtgacctcctcatctcagcaccccagacatcacgagcatccccctttcccatctgcgccctccaatccttagggccgtcaacctttccaccttgaaactggtgtcaggagcaccctgcagagtttctcttaaggttctgcagggcaaggctgtctgggacaggcttggccatggatccgctctcagagctgcaggatgatctgaccttggatgacaccagcgaggctctgaaccagctgaagctggcctccatcgatgagaagaactggccctcggatgaaatgcctgacttccccaagtcagatgactccaaaagcagctccccggaacttgtcacacacctgaagtgggatgacccatactatgacatcgcccggcaccagatcgtggaggtggcaggagatgacaagtatgggcggaagatcattgtgtttagtgcctgtcgaatgccccccagccaccagctcgaccacagcaagctcctggggtacctgaagcacaccctggaccagtacgtggagagtgactacacacttctgtatctgcaccacggcctgaccagcgacaacaagccctccctcagctggctccgtgatgcctaccgggagtttgaccgcaagtacaagaaaaacatcaaggccttgtacatcgtgcatccaaccatgttcatcaaaactctgctcatcctcttcaagcccctcatcagcttcaagttcgggcagaagatcttctatgtgaattacctga

SEQ ID NO: 175642 - DNA, 1000 bp, Homo sapiens
  Payload ID: 14499
  Gene Symbol: ARHGAP1
  Gene Name: Rho GTPase activating protein 1
  ENST ID: ENST00000528837
  CDS Start-End: 1-1000
gctctcagagctgcaggatgatctgaccttggatgacaccagcgaggctctgaaccagctgaagctggcctccatcgatgagaagaactggccctcggatgaaatgcctgacttccccaagtcagatgactccaaaagcagctccccggaacttgtcacacacctgaagtgggatgacccatactatgacatcgcccggcaccagatcgtggaggtggcaggagatgacaagtatgggcggaagatcattgtgtttagtgcctgtcgaatgccccccagccaccagctcgaccacagcaagctcctggggtacaagaaaaacatcaaggccttgtacatcgtgcatccaaccatgttcatcaaaactctgctcatcctcttcaagcccctcatcagcttcaagttcgggcagaagatcttctatgtgaattacctgagcgagctgagcgagcacgtgaagctggagcagctggggatccctcgccaagtgctcaaatatgacgacttcctgaaatccacacagaagagccccgcgacagcccccaagcccatgcccccacggccccccctgcccaaccagcagtttggagtctcgctgcagcacctccaggagaagaatccagagcaggagcccattcccattgtactcagggagactgttgcctacttacaggcccacgctctcaccaccgagggcatcttccggaggtcggccaacacccaagtggtccgggaagtgcagcagaagtacaacatggggctgcctgtggatttcgaccagtacaatgagctgcacctgccagcagtcatcctcaagaccttcctccgggagcttcctgagcccctgctcacctttgacctctacccccatgtggtgggcttcctcaacattgatgaaagccagagggtgccagcgacactgcaggtcctccagacgctgcccgaggagaactaccaggtgcttcgtttcctgactgctttcctggtgcagatttctgca

SEQ ID NO: 175643 - DNA, 3299 bp, Homo sapiens
  Payload ID: 14500
  Gene Symbol: ARHGAP10
  Gene Name: Rho GTPase activating protein 10
  Uniprot ID: A1A4S6
  ENST ID: ENST00000336498
  CDS Start-End: 240-2600
gagctcggcgggggctgccgggattggggcgccgcagctagcgctggtctcggtggcagctcctccgcgccgcaggactcggctctacgggacatgtccgtgccgcgctcgccgcgcgcccgggcctgctagctcctctgtgctccctgaacgcgcggcgccgcacctggcagcggcctcggagctcggctcgggcaggagcgcgcggccgtgcgcaccgcgcagcgaccgctgccgtcatggggctgcagcccctggagttcagcgactgctacctcgacagcccgtggttccgggagaggatccgcgctcacgaagcggaactcgagaggaccaacaagttcatcaaagagctcattaaggacgggaagaacctcatcgctgcgacgaaaagtctgtcagtggcccagcggaagtttgctcattcactcagagactttaagtttgagtttatcggtgatgctgtgacagatgatgaacgatgcatagatgcttccttacgtgaattttcaaattttttgaagaatctggaggaacagagagaaattatggcattaagtgtaactgaaaccctgattaaacccttggaaaaattcagaaaagagcaacttggagctgtaaaggaagaaaaaaagaagtttgacaaagagacagaaaagaattatagtctaattgataaacatttgaatttatcagcaaaaaagaaagactcacatttacaagaggcagatatccaagtagagcagaaccggcaacacttctatgaactgtctctcgagtatgtgtgtaagctgcaggaaatccaagaaagaaagaagtttgagtttgtggaacctatgctgtcattttttcaggggatgtttaccttctatcatcagggccatgaacttgccaaagacttcaatcactacaaaatggaactacagatcaacattcagaatacacggaatcgatttgaaggaacaaggtcagaagtggaagagctcatgaacaaaatcagacagaatcccaaggaccacaaacgagcaagtcagtttacagccgaaggctacctgtatgtccaggaaaaaaggcctgctccgtttggttccagttgggtcaaacactattgcatgtatcgaaaagcagcaaagaagttcaacatgatcccatttgagcacagatctggagggaaacttggggacggagaggtgttctttttgaaagaatgtaccaagaggcatactgactccattgacagaaggttttgttttgacatagaagctgctgatcggcctggcgtttccttgaccatgcaggcattttccgaagaggaaaggaagcagtggttggaagctctgggtggaaaggaagctctgtcccatagttttaatacagccatcatcccaagaccagaaggaaatgcacagttggataagatggggttcacaattatcagaaaatgcatcagtgccgttgaaacacgaggtataaatgaccaaggattgtacagagttgtgggggtgagttcaaaggtccagagacttctgagtatgttgatggatgtaaaaacatgcaatgaggtggacctggagaattctgcagattgggaagtgaagacaataacaagtgccttgaaacagtatttgaggagtcttccagagcctctcatgacctatgagttacatggagatttcattgttccagccaaaagcggcagcccagaatctcgtgttaatgcgatccatttcttggtacacaaactgccagagaagaataaagagatgttggatattttggtgaaacacttaacaaatgtttcaaatcactccaagcagaacctgatgactgtggcaaacttaggagtggtgtttggaccaactctgatgaggccacaggaagaaactgtcgctgccctcatggacttgaagtttcagaatattgttgtggaaatcttaattgaaaaccatgaaaagatttttcggacgccgcccgatactacattccctgagcccacctgcctgtcagcatcacccccaaatgcgccaccaaggcagtcgaagagacaaggccagagaaccaagaggcccgtggccgtctacaatctttgtctggagctggaagatggtgacaatccttacccttccaaggaggacacccctaccagcagtctggactcactttcctccccgtctcccgtgactacagctgtccctgggcctcctggaccagacaaaaaccaccttctggcagatggagggagctttggagactgggcatccactatcccaggccagacccgatcgtctatggtccagtggcttaacccacagtctccaaccacaacaagctccaactcagctgtgacacctctttcacccgggtcgtcccctttccccttttctcctcctgctactgtagcggacaagccacctgaaagcatccgcagtcggaaggctcgagccgtgtatccgtgtgaagcagaacacagctcggaattatcttttgaaataggagcaatttttgaggatgtacaaacctccagggaacctggctggctagaagggactctgaacggcaagagggggctgattccacagaactacgtcaagctgctgtagctcctggcctcagagcccctgctgaccctggcacccagggacctgcctgggggcagagagctgtcttcctcctccgaggctctgggctgcacccacaggtacctccacacttgggagttaccatcatcacagtcagccctgggggtggggggtggtgggcagggatgggacgcaccacacagaactgtgattgtggatcaggaggggaatgtcaggattcgcaaaatggacttttcatttgtcaagtattgggacttgtgatttttaattatccagcatatagaatgagagggagggcagccttctgccacctgtgtcgcctccactggcagtcacgccaccagagccaccctggctccctctcctccctgagcacctgctgctgcgattttaaagggaactgtactactcgcagtgataggtttgcagagtgtgtgcttggctgtggcagcctagcttggagaagctgctgttggtgcaagggagatggtctcaagtcagagggaagcagagacgcgcgtctcaagcctgcccttcctagacggccacctgcaggaccccacactcactgcactggcagcgtgcactggcgtatttgtaacaggcttctcggtgctcctcacccgtgtgctgttttccaaacaccacctttttgcctcaaggtctctgtaaatgaaataaactgtaatttactatttg

SEQ ID NO: 175644 - DNA, 1934 bp, Homo sapiens
  Payload ID: 14500
  Gene Symbol: ARHGAP10
  Gene Name: Rho GTPase activating protein 10
  ENST ID: ENST00000507661
  CDS Start-End: 1-1240
atgtaccaagaggcatactgactccattgacagaaggttttgttttgacatagaagctgctgatcggcctggcgtttccttgaccatgcaggcattttccgaagaggaaaggaagcagtggttggaagctctgggtggaaaggaagctctgtcccatagttttaatacagccatcatcccaagaccagaaggaaatgcacagttggataagatggggttcacaattatcagaaaatgcatcagtgccgttgaaacacgaggtataaatgaccaaggattgtacagagttgtgggggtgagttcaaaggtccagagacttctgagtatgttgatggatgtaaaaacatgcaatgaggtggacctggagaattctgcagattgggaagtgaagacaataacaagtgccttgaaacagtatttgaggagtcttccagagcctctcatgacctatgagttacatggagatttcattgttccagccaaaagcggcagcccagaatctcgtgttaatgcgatccatttcttggtacacaaactgccagagaagaataaagagatgttggatattttggtgaaacacttaacaaatgtttcaaatcactccaagcagaacctgatgactgtggcaaacttaggagtggtgtttggaccaactctgatgaggccacaggaagaaactgtcgctgccctcatggacttgaagtttcagaatattgttgtggaaatcttaattgaaaaccatgaaaagatttttcggacgccgcccgatactacattccctgagcccacctgcctgtcagcatcacccccaaatgcgccaccaaggcagtcgaagagacaaggccagagaaccaagaggcccgtggccgtctacaatctttgtctggagctggaagatggtgacaatccttacccttccaaggaggacacccctaccagcagtctggactcactttcctccccgtctcccgtgactacagctgtccctgggcctcctggaccagacaaaaaccaccttctggcagatggagggagctttggagactgggcatccactatcatccgcagtcggaaggctcgagccgtgtatccgtgtgaagcagaacacagctcggaattatcttttgaaataggagcaatttttgaggatgtacaaacctccagggaacctggctggctagaagggactctgaacggcaagagggggctgattccacagaactacgtcaagctgctgtagctcctggcctcagagcccctgctgaccctggcacccagggacctgcctgggggcagagagctgtcttcctcctccgaggctctgggctgcacccacaggtacctccacacttgggagttaccatcatcacagtcagccctgggggtggggggtggtgggcagggatgggacgcaccacacagaactgtgattgtggatcaggaggggaatgtcaggattcgcaaaatggacttttcatttgtcaagtattgggacttgtgatttttaattatccagcatatagaatgagagggagggcagccttctgccacctgtgtcgcctccactggcagtcacgccaccagagccaccctggctccctctcctccctgagcacctgctgctgcgattttaaagggaactgtactactcgcagtgataggtttgcagagtgtgtgcttggctgtggcagcctagcttggagaagctgctgttggtgcaagggagatggtctcaagtcagagggaagcagagacgcgcgtctcaagcctgcccttcctagacggccacctgcaggaccccacactcactgcactggcagcgtgcactggcgtatttgtaacaggcttctcggtgctcctcacccgtgtgctgttttccaaacaccacctttttgcctcaaggtctctgtaaatgaaataaactgtaatttact

SEQ ID NO: 175645 - DNA, 5898 bp, Homo sapiens
  Payload ID: 14501
  Gene Symbol: ARHGAP11A
  Gene Name: Rho GTPase activating protein 11A
  Uniprot ID: Q6P4F7
  ENST ID: ENST00000361627
  CDS Start-End: 723-3794
gaaactgcgggtgtgacccccccgtggtggctctgggtgtctgcggaggagctgggggcggaagcatgaggctaacggcttggcttcagtgaacgcaccgggatgtgcaggccgggaggtagaggcaggctgatgggggagggaacgagcagcctgtgagacggggtgacggcggctaccagcccgggcgggcaccgggactggaagagttgcctgagcagccggctggtccggcggccaggctagggcgggggcgagcgcccagttgagcctgctggggctggaggagcgagaagggttttcttcacatttcagagcgaaccagacggggacagtaaggtttggaggaagggggatcgttggaagtagcaagaagtggagagaatctggcaatagacgagaaaccgaaagaatcagaaagaagtctatgtgagtagctgaaagcattgggtgaccagaaagaaggtcggtgtaagtgaaggaagagtgaggtgtggctggatcaaagggctaagagaagcgggtctgtgtaagtggatgtgagtgaggatcaaggaaaagccgtggaagtggccgggggtcggggccgcagaagtgccagacggggccggaaagcagccgagcggagttcaaatttgagagcgtttggaaattggaagacttggtggcgaacgagggtcaggacctgcatcctgcctcagagagttatcgacgtatccggaatgtgggatcagaggctggtgaggttggccctgttgcagcatctgcgggccttctatggtattaaggtgaagggtgtccgtgggcagtgcgatcgcaggagacatgaaacagcagccacggaaatagggggtaaaatatttggagtaccttttaatgcactgccccattctgctgtaccagaatatggacacattccaagctttcttgtcgatgcttgcacatctttagaagaccatattcataccgaagggctttttcggaaatcaggatctgtgattcgcctaaaagcactaaagaataaagtggatcatggtgaaggttgcctatcttctgcacctccttgtgatattgcgggacttcttaagcagttttttagggaactgccagagcccattctcccagctgatttgcatgaagcacttttgaaagctcaacagttaggcacagaggaaaagaataaagctacactgttgctctcctgtcttctggctgaccacacagttcatgtattaagatacttctttaactttctcaggaatgtttctcttagatccagtgagaataagatggacagcagcaatcttgcagtaatatttgcaccgaatcttcttcagacaagtgaaggacatgaaaagatgtcttctaacacagaaaagaagctacgattacaggctgcagtagtacagactcttatcgattatgcatcagatattgggcgtgtaccagattttatcctggaaaagataccagccatgttgggtattgatggtctctgtgctactccatcactggaaggctttgaagaaggtgaatatgaaactcctggtgaatataagagaaagagaagacaaagtgtaggagattttgttagtggagcactaaataaatttaaacctaacagaacaccttctattacacctcaagaagaaagaattgcccagctatctgaatcaccagtgattcttacaccaaatgctaagcgtacattgccagtagattcttctcatggtttctcaagtaagaaaaggaagtccatcaagcacaattttaactttgagctgttgccaagtaatctcttcaatagcagttctacaccggtatcagttcacatcgatacaagctcagaagggtcatctcagagttcactctctcctgtactcattggtggaaaccatttgatcactgcaggtgtgccaaggcgaagtaaaagaattgcaggcaaaaaagtttgcagagtggaatcaggaaaagcaggctgcttttctcctaaaatcagccataaagaaaaggttcgaagatctctgcgtttgaaattcaatctagggaaaaatggcagagaagtaaatggatgttctggtgtcaatagatatgaaagtgttggttggcgacttgcaaatcaacaaagtttaaaaaatcgaattgaatctgtaaaaacaggtttgctttttagcccagatgttgatgaaaagttaccaaagaaaggttcagaaaagatcagtaagtctgaggaaaccttactaactccagagcgactagttggaacaaattaccggatgtcttggacaggacctaataattcaagttttcaagaagtagatgcaaatgaagcttcttcaatggtggaaaatcttgaggtagaaaactctttggagcctgatattatggtagaaaagtcacctgctacttcatgtgaactcaccccttccaatttaaacaataagcataatagcaacataacaagtagccctcttagcggggatgaaaataacatgaccaaagagactttggtgaaagttcaaaaagcgttttctgaatctggaagtaatcttcacgcattgatgaatcagaggcagtcatcagtaactaatgtggggaaagtaaaattaactgaaccatcttatttagaagatagcccagaggaaaatctatttgaaactaatgatttgactatagtagaatcaaaggagaaatatgaacaccacactggtaaaggtgaaaaatgtttttcagagagggacttttcaccccttcaaactcaaacatttaatagagaaacaactataaaatgttattcaactcagatgaagatggaacatgaaaaagacattcattcaaatatgccaaaagattatttaagcaagcaagaattctccagtgatgaagaaataaagaaacagcagtccccaaaggataaactaaataataaattaaaagagaatgagaatatgatggaaggtaacttaccgaagtgtgcagcacatagcaaggacgaggctagatcctctttctcacagcagagtacatgtgttgtaacaaacttgtcaaaacctaggcctatgagaattgctaaacagcagtcattggaaacatgtgagaaaacagtttctgaaagttcacaaatgacagaacatagaaaggtttctgatcacatacagtggtttaacaagctttctttaaatgaaccaaatagaataaaagtcaagtcacctcttaagtttcagcgtactcctgttcgtcagtccgtcagaagaattaattctttgttggagtatagcagacaacctacagggcataagttggcgagtcttggtgatacagcttctcctttggtcaaatcagtgagctgtgacggtgctctttcctcttgtatagaaagtgcatcaaaagattcctctgtttcatgtatcaaatcaggtcctaaagaacagaagtccatgtcatgtgaagagtcaaatattggtgcaatttcaaagtcaagcatggagttaccctcgaaatctttcttaaagatgaggaagcacccagattcagtgaatgcttctcttaggtctactacagtttataaacagaagatcttatctgatggccaagttaaggttcccttggatgatctgactaatcatgatatagtaaaaccagttgtaaataacaacatgggcatttcttctgggataaataacagggtccttaggagaccatcagaaagaggaagggcctggtacaaaggttctccaaaacatcctatcggaaaaactcaattactaccaacaagtaaacctgtagatttgtaattggtaaatgttatacttgtcattaatgtaaataaagtgagtaattggtatgacttgcaggatgatgtacatgttagtttgtagctcaggatgattgttaagcaatagatttgctctattgaaaatgtttcatttttttcactgtacaagcaacttagatttttatttgtacaaattacttctttgtttttcttaatgatggcaatttttaaactttaattttattgtgatctcttaaagcagaggttagactttacctttctgactctgtcgtccaggctggagtgcagtggcgcaatctcactgcaagctccacttcctgggttcatgccattttcctgcctcagcctcccgagtagctgggactacaggtgcccgccaccacgcccagctaattttttgtatttttagtagagacggtttcaccgtgttagccaggatggtctcgatctcctgacgttgtgatccgcccgcctcagcctcccaaagtgctgggattacaggcatgagccaccacgcccggctagactttacctttctaaagaaattgtttactggatttataagaagttaatttttgaaaatgacatatttttgtgtgatagaaagaatggagcaagttgtgcctatttcctccaagtcagataaggtttctaaaataaataaatttctagcatataaagggtagagataaactctgcaaatcttatgtctggaattatattaatgtttattgtccttgccaaaattcctagaaattaatttccttcaatagcatcctaaaactctatttttatttggggcagagtaatttcatttatagtgccagtaggtgtaccttgtgttcactcgaactaagaacaatggttaaggcagaataatgactaaaatatgttcatatattatgatgtggaaataattgataacttttaagccatactatgtttttaaagataatttgcacaaacacgtttgtgtctgttctgtccaatatagatttggcaattatttaaagagggataatcttgaaaaaaattaaccaaggtgatttcttatatgtagatgctcgattttggaatttgaaatagtagatgcacctctttaccttttttacttggataaaaacctatgatgattttgtcctgtgtgtaaatgttatttatttagcatagacattaaagataactctctggaaaatgacttgactaaggctctcatgaaattcaaagtgccatttagaacatgcaccaaattgtcaagtaaatctgtctaaatttatattttaaattattacaaattacacatctttgaggaaagagtattatgaacaatagaacatattctctaggttgtagaggaaggaataagcagacagaatcaaccactaaaggtagtttttcagattggttgttagaatgtcatgtttagatgttggagcagattagagcagcattcatgccactcggagcaaccagacttacagcataagtatgtacgaggaatttcaaatcatcagatgtttgcttggctaggttctactttgtttatttgatatcaaataggtttgtagatgtttatggcatttctaattgtaagtagagacaaaatattcatatagtcagatatatgttgtctgctttaaacaatttttaaattttaaaaatgcattaacgtctttttatatccatcaagggaaggatgaaatgttgaatttgaagactaattcagtaagaagtcctaggggtttaactgtacatactacctgaactggcttttctgagagatgaatcaataatgaaacatgtctgttttaaaaactaccacatgtgactcctatttttgttagctgaaagctgctatacggagtattacaggaatgtgaaggtgactagcttgaaggtagggtaactagagagccagaaaagttttgttttaaacttgatttaatgcgtttttattttttcttatacaaaatagagataatgttgctaacttcatggaatatttgaggaaatgatatgaaagtgtctggacgtgcagtaacctcatgggttcttctcactgtcttataaatgtaaataaagatctaatattaatttggtta

SEQ ID NO: 175646 - DNA, 3152 bp, Homo sapiens
  Payload ID: 14501
  Gene Symbol: ARHGAP11A
  Gene Name: Rho GTPase activating protein 11A
  Uniprot ID: Q6P4F7
  ENST ID: ENST00000543522
  CDS Start-End: 590-3094
ggcttcagtgaacgcaccgggatgtgcaggccgggagagcgaaccagacggggacagtaaggtttggaggaagggggatcgttggaagtagcaagaagtggagagaatctggcaatagacgagaaaccgaaagaatcagaaagaagtctatggtaaaatatttggagtaccttttaatgcactgccccattctgctgtaccagaatatggacacattccaagctttcttgtcgatgcttgcacatctttagaagaccatattcataccgaagggctttttcggaaatcaggatctgtgattcgcctaaaagcactaaagaataaagtggatcatggtgaaggttgcctatcttctgcacctccttgtgatattgcgggacttcttaagcagttttttagggaactgccagagcccattctcccagctgatttgcatgaagcacttttgaaagctcaacagttaggcacagaggaaaagaataaagctacactgttgctctcctgtcttctggctgaccacacagttcatgtattaagatacttctttaactttctcaggaatgtttctcttagatccagtgagaataagatggacagcagcaatcttgcagtaatatttgcaccgaatcttcttcagacaagtgaaggacatgaaaagatgtcttctaacacagaaaagaagctacgattacaggctgcagtagtacagactcttatcgattatgcatcagatattgggcgtgtaccagattttatcctggaaaagataccagccatgttgggtattgatggtctctgtgctactccatcactggaaggctttgaagaaggtgaatatgaaactcctggtgaatataagagaaagagaagacaaagtgtaggagattttgttagtggagcactaaataaatttaaacctaacagaacaccttctattacacctcaagaagaaagaattgcccagctatctgaatcaccagtgattcttacaccaaatgctaagcgtacattgccagtagattcttctcatggtttctcaagtaagaaaaggaagtccatcaagcacaattttaactttgagctgttgccaagtaatctcttcaatagcagttctacaccggtatcagttcacatcgatacaagctcagaagggtcatctcagagttcactctctcctgtactcattggtggaaaccatttgatcactgcaggtgtgccaaggcgaagtaaaagaattgcaggcaaaaaagtttgcagagtggaatcaggaaaagcaggctgcttttctcctaaaatcagccataaagaaaaggttcgaagatctctgcgtttgaaattcaatctagggaaaaatggcagagaagtaaatggatgttctggtgtcaatagatatgaaagtgttggttggcgacttgcaaatcaacaaagtttaaaaaatcgaattgaatctgtaaaaacaggtttgctttttagcccagatgttgatgaaaagttaccaaagaaaggttcagaaaagatcagtaagtctgaggaaaccttactaactccagagcgactagttggaacaaattaccggatgtcttggacaggacctaataattcaagttttcaagaagtagatgcaaatgaagcttcttcaatggtggaaaatcttgaggtagaaaactctttggagcctgatattatggtagaaaagtcacctgctacttcatgtgaactcaccccttccaatttaaacaataagcataatagcaacataacaagtagccctcttagcggggatgaaaataacatgaccaaagagactttggtgaaagttcaaaaagcgttttctgaatctggaagtaatcttcacgcattgatgaatcagaggcagtcatcagtaactaatgtggggaaagtaaaattaactgaaccatcttatttagaagatagcccagaggaaaatctatttgaaactaatgatttgactatagtagaatcaaaggagaaatatgaacaccacactggtaaaggtgaaaaatgtttttcagagagggacttttcaccccttcaaactcaaacatttaatagagaaacaactataaaatgttattcaactcagatgaagatggaacatgaaaaagacattcattcaaatatgccaaaagattatttaagcaagcaagaattctccagtgatgaagaaataaagaaacagcagtccccaaaggataaactaaataataaattaaaagagaatgagaatatgatggaaggtaacttaccgaagtgtgcagcacatagcaaggacgaggctagatcctctttctcacagcagagtacatgtgttgtaacaaacttgtcaaaacctaggcctatgagaattgctaaacagcagtcattggaaacatgtgagaaaacagtttctgaaagttcacaaatgacagaacatagaaaggtttctgatcacatacagtggtttaacaagctttctttaaatgaaccaaatagaataaaagtcaagtcacctcttaagtttcagcgtactcctgttcgtcagtccgtcagaagaattaattctttgttggagtatagcagacaacctacagggcataagttggcgagtcttggtgatacagcttctcctttggtcaaatcagtgagctgtgacggtgctctttcctcttgtatagaaagtgcatcaaaagattcctctgtttcatgtatcaaatcaggtcctaaagaacagaagtccatgtcatgtgaagagtcaaatattggtgcaatttcaaagtcaagcatggagttaccctcgaaatctttcttaaagatgaggaagcacccagattcagtgaatgcttctcttaggtctactacagtttataaacagaagatcttatctgatggccaagttaaggttcccttggatgatctgactaatcatgatatagtaaaaccagttgtaaataacaacatgggcatttcttctgggataaataacagggtccttaggagaccatcagaaagaggaagggcctggtacaaaggttctccaaaacatcctatcggaaaaactcaattactaccaacaagtaaacctgtagatttgtaattggtaaatgttatacttgtcattaatgtaaataaagtgagtaattggtatgacttgc

SEQ ID NO: 175647 - DNA, 2422 bp, Homo sapiens
  Payload ID: 14501
  Gene Symbol: ARHGAP11A
  Gene Name: Rho GTPase activating protein 11A
  Uniprot ID: Q6P4F7
  ENST ID: ENST00000567348
  CDS Start-End: 674-2179
agctgggggcggaagcatgaggctaacggcttggcttcagtgaacgcaccgggatgtgcaggccgggaggtagaggcaggctgatgggggagggaacgagcagcctgtgagacggggtgacggcggctaccagcccgggcgggcaccgggactggaagagttgcctgagcagccggctggtccggcggccaggctagggcgggggcgagcgcccagttgagcctgctggggctggaggagcgagaagggttttcttcacatttcagagcgaaccagacggggacagtaaggtttggaggaagggggatcgttggaagtagcaagaagtggagagaatctggcaatagacgagaaaccgaaagaatcagaaagaagtctatgtgagtagctgaaagcattgggtgaccagaaagaaggtcggtgtaagtgaaggaagagtgaggtgtggctggatcaaagggctaagagaagcgggtctgtgtaagtggatgtgagtgaggatcaaggaaaagccgtggaagtggccgggggtcggggccgcagaagtgccagacggggccggaaagcagccgagcggagttcaaatttgagagcgtttggaaattggaagacttggtggcgaacgagggtcaggacctgcatcctgcctcagagagttatcgacgtatccggaatgtgggatcagaggctggtgaggttggccctgttgcagcatctgcgggccttctatggtattaaggtgaagggtgtccgtgggcagtgcgatcgcaggagacatgaaacagcagccacggaaatagggggtaaaatatttggagtaccttttaatgcactgccccattctgctgtaccagaatatggacacattccaagctttcttgtcgatgcttgcacatctttagaagaccatattcataccgaagggctttttcggaaatcaggatctgtgattcgcctaaaagcactaaagaataaagtggatcatggtgaaggttgcctatcttctgcacctccttgtgatattgcgggacttcttaagcagttttttagggaactgccagagcccattctcccagctgatttgcatgaagcacttttgaaagctcaacagttaggcacagaggaaaagaataaagctacactgttgctctcctgtcttctggctgaccacacagttcatgtattaagatacttctttaactttctcaggaatgtttctcttagatccagtgagaataagatggacagcagcaatcttgcagtaatatttgcaccgaatcttcttcagacaagtgaaggacatgaaaagatgtcttctaacacagaaaagaagctacgattacaggctgcagtagtacagactcttatcgattatgcatcagatattgggcgtgtaccagattttatcctggaaaagataccagccatgttgggtattgatggtctctgtgctactccatcactggaaggctttgaagaaggtgaatatgaaactcctggtgaatataagagaaagagaagacaaagtgtaggagattttgttagtggagcactaaataaatttaaacctaacagaacaccttctattacacctcaagaagaaagaattgcccagctatctgaatcaccagtgattcttacaccaaatgctaagcgtacattgccagtagattcttctcatggtttctcaagtaagaaaaggaagtccatcaagcacaattttaactttgagctgttgccaagtaatctcttcaatagcagttctacaccggtatcagttcacatcgatacaagctcagaagggtcatctcagagttcactctctcctgtactcattggtggaaaccatttgatcactgcaggtgtgccaaggcgaagtaaaagaattgcaggcaaaaaagtttgcagagtggaatcaggaaaagcaggctgcttttctcctaaaatcagccataaagaaaaggttcgaagatctctgcgtttgaaattcaatctagggaaaaatggcagagaagtaaatggatgttctggtgtcaatagatatgaaagtgttggttggcgacttgcaaatcaacaaagtttaaaaaatcgaattgaatctgtaaaaacaggtttgctttttagcccagatgttgatgaaaagttaccaaagaaaggtacatttacatactactgttagagttttacctaaaaatcctgctttagttgcttttttaatggcaaaacatattaattaatttactgttctagagattaaaagttcatgtttgaatagtgaaaatattagaattggcaatgtatttttctatcaacaattgggaaatgcttatacatgtaaatatgaaaatgtttgacattcttatgttaaaaattatttcttgtaacacaaatactttattagaattaaatgcttagtgactta

SEQ ID NO: 175648 - DNA, 620 bp, Homo sapiens
  Payload ID: 14501
  Gene Symbol: ARHGAP11A
  Gene Name: Rho GTPase activating protein 11A
  ENST ID: ENST00000562481
  CDS Start-End: 1-620
attttgttagtggagcactaaataaatttaaacctaacagaacaccttctattacacctcaagaagaaagaattgcccagctatctgaatcaccagtgattcttacaccaaatgctaagcgtacattgccagtagattcttctcatggtttctcaattcacatcgatacaagctcagaagggtcatctcagagttcactctctcctgtactcattggtggaaaccatttgatcactgcaggtgtgccaaggcgaagtaaaagaattgcaggcaaaaaagtttgcagagtggaatcaggaaaagcaggctgcttttctcctaaaatcagccataaagaaaaggttcgaagatctctgcgtttgaaattcaatctagggaaaaatggcagagaagtaaatggatgttctggtgtcaatagatatgaaagtgttggttggcgacttgcaaatcaacaaagtttaaaaaatcgaattgaatctgtaaaaacaggtttgctttttagcccagatgttgatgaaaagttaccaaagaaaggttcagaaaagatcagtaagtctgaggaaaccttactaactccagagcgactagttggaacaaattaccggatgtcttggacagga

SEQ ID NO: 175649 - DNA, 3318 bp, Homo sapiens
  Payload ID: 14501
  Gene Symbol: ARHGAP11A
  Gene Name: Rho GTPase activating protein 11A
  Uniprot ID: Q6P4F7
  ENST ID: ENST00000565905
  CDS Start-End: 549-3053
aagaacggtttcttcataagagggccttcagcgacagccaagctcggaaaagaacgggaataagttgtcttttatatttcctcaaatactgtgaatggtctgaggcgcagggtaaaatatttggagtaccttttaatgcactgccccattctgctgtaccagaatatggacacattccaagctttcttgtcgatgcttgcacatctttagaagaccatattcataccgaagggctttttcggaaatcaggatctgtgattcgcctaaaagcactaaagaataaagtggatcatggtgaaggttgcctatcttctgcacctccttgtgatattgcgggacttcttaagcagttttttagggaactgccagagcccattctcccagctgatttgcatgaagcacttttgaaagctcaacagttaggcacagaggaaaagaataaagctacactgttgctctcctgtcttctggctgaccacacagttcatgtattaagatacttctttaactttctcaggaatgtttctcttagatccagtgagaataagatggacagcagcaatcttgcagtaatatttgcaccgaatcttcttcagacaagtgaaggacatgaaaagatgtcttctaacacagaaaagaagctacgattacaggctgcagtagtacagactcttatcgattatgcatcagatattgggcgtgtaccagattttatcctggaaaagataccagccatgttgggtattgatggtctctgtgctactccatcactggaaggctttgaagaaggtgaatatgaaactcctggtgaatataagagaaagagaagacaaagtgtaggagattttgttagtggagcactaaataaatttaaacctaacagaacaccttctattacacctcaagaagaaagaattgcccagctatctgaatcaccagtgattcttacaccaaatgctaagcgtacattgccagtagattcttctcatggtttctcaagtaagaaaaggaagtccatcaagcacaattttaactttgagctgttgccaagtaatctcttcaatagcagttctacaccggtatcagttcacatcgatacaagctcagaagggtcatctcagagttcactctctcctgtactcattggtggaaaccatttgatcactgcaggtgtgccaaggcgaagtaaaagaattgcaggcaaaaaagtttgcagagtggaatcaggaaaagcaggctgcttttctcctaaaatcagccataaagaaaaggttcgaagatctctgcgtttgaaattcaatctagggaaaaatggcagagaagtaaatggatgttctggtgtcaatagatatgaaagtgttggttggcgacttgcaaatcaacaaagtttaaaaaatcgaattgaatctgtaaaaacaggtttgctttttagcccagatgttgatgaaaagttaccaaagaaaggttcagaaaagatcagtaagtctgaggaaaccttactaactccagagcgactagttggaacaaattaccggatgtcttggacaggacctaataattcaagttttcaagaagtagatgcaaatgaagcttcttcaatggtggaaaatcttgaggtagaaaactctttggagcctgatattatggtagaaaagtcacctgctacttcatgtgaactcaccccttccaatttaaacaataagcataatagcaacataacaagtagccctcttagcggggatgaaaataacatgaccaaagagactttggtgaaagttcaaaaagcgttttctgaatctggaagtaatcttcacgcattgatgaatcagaggcagtcatcagtaactaatgtggggaaagtaaaattaactgaaccatcttatttagaagatagcccagaggaaaatctatttgaaactaatgatttgactatagtagaatcaaaggagaaatatgaacaccacactggtaaaggtgaaaaatgtttttcagagagggacttttcaccccttcaaactcaaacatttaatagagaaacaactataaaatgttattcaactcagatgaagatggaacatgaaaaagacattcattcaaatatgccaaaagattatttaagcaagcaagaattctccagtgatgaagaaataaagaaacagcagtccccaaaggataaactaaataataaattaaaagagaatgagaatatgatggaaggtaacttaccgaagtgtgcagcacatagcaaggacgaggctagatcctctttctcacagcagagtacatgtgttgtaacaaacttgtcaaaacctaggcctatgagaattgctaaacagcagtcattggaaacatgtgagaaaacagtttctgaaagttcacaaatgacagaacatagaaaggtttctgatcacatacagtggtttaacaagctttctttaaatgaaccaaatagaataaaagtcaagtcacctcttaagtttcagcgtactcctgttcgtcagtccgtcagaagaattaattctttgttggagtatagcagacaacctacagggcataagttggcgagtcttggtgatacagcttctcctttggtcaaatcagtgagctgtgacggtgctctttcctcttgtatagaaagtgcatcaaaagattcctctgtttcatgtatcaaatcaggtcctaaagaacagaagtccatgtcatgtgaagagtcaaatattggtgcaatttcaaagtcaagcatggagttaccctcgaaatctttcttaaagatgaggaagcacccagattcagtgaatgcttctcttaggtctactacagtttataaacagaagatcttatctgatggccaagttaaggttcccttggatgatctgactaatcatgatatagtaaaaccagttgtaaataacaacatgggcatttcttctgggataaataacagggtccttaggagaccatcagaaagaggaagggcctggtacaaaggttctccaaaacatcctatcggaaaaactcaattactaccaacaagtaaacctgtagatttgtaattggtaaatgttatacttgtcattaatgtaaataaagtgagtaattggtatgacttgcaggatgatgtacatgttagtttgtagctcaggatgattgttaagcaatagatttgctctattgaaaatgtttcatttttttcactgtacaagcaacttagatttttatttgtacaaattacttctttgtttttcttaatgatggcaatttttaaactttaattttattgtgatctcttaaagcagaggttagactttacctttctga

SEQ ID NO: 175650 - DNA, 2279 bp, Homo sapiens
  Payload ID: 14501
  Gene Symbol: ARHGAP11A
  Gene Name: Rho GTPase activating protein 11A
  ENST ID: ENST00000563864
  CDS Start-End: 648-2069
cggcttggcttcagtgaacgcaccgggatgtgcaggccgggaggtagaggcaggctgatgggggagggaacgagcagcctgtgagacggggtgacggcggctaccagcccgggcgggcaccgggactggaagagttgcctgagcagccggctggtccggcggccaggctagggcgggggcgagcgcccagttgagcctgctggggctggaggagcgagaagggttttcttcacatttcagagcgaaccagacggggacagtaaggtttggaggaagggggatcgttggaagtagcaagaagtggagagaatctggcaatagacgagaaaccgaaagaatcagaaagaagtctatgtgagtagctgaaagcattgggtgaccagaaagaaggtcggtgtaagtgaaggaagagtgaggtgtggctggatcaaagggctaagagaagcgggtctgtgtaagtggatgtgagtgaggatcaaggaaaagccgtggaagtggccgggggtcggggccgcagaagtgccagacggggccggaaagcagccgagcggagttcaaatttgagagcgtttggaaattggaagacttggtggcgaacgagggtcaggacctgcatcctgcctcagagagttatcgacgtatccggaatgtgggatcagaggctggtgaggttggccctgttgcagcatctgcgggccttctatggtattaaggtgaagggtgtccgtgggcagtgcgatcgcaggagacatgaaacagcagccacggaaatagggggtaaaatatttggagtaccttttaatgcactgccccattctgctgtaccagaatatggacacattccaagctttcttgtcgatgcttgcacatctttagaagaccatattcataccgaagggctttttcggaaatcaggatctgtgattcgcctaaaagcactaaagaataaagtggatcatggtgaaggttgcctatcttctgcacctccttgtgatattgcgggacttcttaagcagttttttagggaactgccagagcccattctcccagctgatttgcatgaagcacttttgaaagctcaacagttaggcacagaggaaaagaataaagctacactgttgctctcctgtcttctggctgaccacacagttcatgtattaagatacttctttaactttctcaggaatgtttctcttagatccagtgagaataagatggacagcagcaatcttgcagtaatatttgcaccgaatcttcttcagacaagtgaaggacatgaaaagatgtcttctaacacagaaaagaagctacgattacaggctgcagtagtacagactcttatcgattatgcatcagatattgggcgtgtaccagattttatcctggaaaagataccagccatgttgggtattgatggtctctgtgctactccatcactggaaggctttgaagaaggtgaatatgaaactcctggtgaatataagagaaagagaagacaaagtgtaggagattttgttagtggagcactaaataaatttaaacctaacagaacaccttctattacacctcaagaagaaagaattgcccagctatctgaatcaccagtgattcttacaccaaatgctaagcgtacattgccagtagattcttctcatggtttctcaagtaagaaaaggaagtccatcaagcacaattttaactttgagctgttgccaagtaatctcttcaatagcagttctacaccggtatcaggtgtgccaaggcgaagtaaaagaattgcaggcaaaaaagtttgcagagtggaatcaggaaaagcaggctgcttttctcctaaaatcagccataaagaaaaggttcgaagatctctgcgtttgaaattcaatctagggaaaaatggcagagaagtaaatggatgttctggtgtcaatagatatgaaagtgttggttggcgacttgcaaatcaacaaagtttaaaaaatcgaattgaatctgtaaaaacaggtttgctttttagcccagatgttgatgaaaagttaccaaagaaaggtacatttacatactactgttagagttttacctaaaaatcctgctttagttgcttttttaatggcaaaacatattaattaatttactgttctagagattaaaagttcatgtttgaatagtgaaaatattagaattggcaatgtatttttctatcaacaattgggaaatgcttatacatgtaaatatgaaaatgtttgacattcttatgttaaaaattatttcttgtaacacaa

SEQ ID NO: 175651 - DNA, 5898 bp, Homo sapiens
  Payload ID: 14501
  Gene Symbol: ARHGAP11A
  Gene Name: Rho GTPase activating protein 11A
  Uniprot ID: Q6P4F7
  ENST ID: ENST00000619401
  CDS Start-End: 723-3794
gaaactgcgggtgtgacccccccgtggtggctctgggtgtctgcggaggagctgggggcggaagcatgaggctaacggcttggcttcagtgaacgcaccgggatgtgcaggccgggaggtagaggcaggctgatgggggagggaacgagcagcctgtgagacggggtgacggcggctaccagcccgggcgggcaccgggactggaagagttgcctgagcagccggctggtccggcggccaggctagggcgggggcgagcgcccagttgagcctgctggggctggaggagcgagaagggttttcttcacatttcagagcgaaccagacggggacagtaaggtttggaggaagggggatcgttggaagtagcaagaagtggagagaatctggcaatagacgagaaaccgaaagaatcagaaagaagtctatgtgagtagctgaaagcattgggtgaccagaaagaaggtcggtgtaagtgaaggaagagtgaggtgtggctggatcaaagggctaagagaagcgggtctgtgtaagtggatgtgagtgaggatcaaggaaaagccgtggaagtggccgggggtcggggccgcagaagtgccagacggggccggaaagcagccgagcggagttcaaatttgagagcgtttggaaattggaagacttggtggcgaacgagggtcaggacctgcatcctgcctcagagagttatcgacgtatccggaatgtgggatcagaggctggtgaggttggccctgttgcagcatctgcgggccttctatggtattaaggtgaagggtgtccgtgggcagtgcgatcgcaggagacatgaaacagcagccacggaaatagggggtaaaatatttggagtaccttttaatgcactgccccattctgctgtaccagaatatggacacattccaagctttcttgtcgatgcttgcacatctttagaagaccatattcataccgaagggctttttcggaaatcaggatctgtgattcgcctaaaagcactaaagaataaagtggatcatggtgaaggttgcctatcttctgcacctccttgtgatattgcgggacttcttaagcagttttttagggaactgccagagcccattctcccagctgatttgcatgaagcacttttgaaagctcaacagttaggcacagaggaaaagaataaagctacactgttgctctcctgtcttctggctgaccacacagttcatgtattaagatacttctttaactttctcaggaatgtttctcttagatccagtgagaataagatggacagcagcaatcttgcagtaatatttgcaccgaatcttcttcagacaagtgaaggacatgaaaagatgtcttctaacacagaaaagaagctacgattacaggctgcagtagtacagactcttatcgattatgcatcagatattgggcgtgtaccagattttatcctggaaaagataccagccatgttgggtattgatggtctctgtgctactccatcactggaaggctttgaagaaggtgaatatgaaactcctggtgaatataagagaaagagaagacaaagtgtaggagattttgttagtggagcactaaataaatttaaacctaacagaacaccttctattacacctcaagaagaaagaattgcccagctatctgaatcaccagtgattcttacaccaaatgctaagcgtacattgccagtagattcttctcatggtttctcaagtaagaaaaggaagtccatcaagcacaattttaactttgagctgttgccaagtaatctcttcaatagcagttctacaccggtatcagttcacatcgatacaagctcagaagggtcatctcagagttcactctctcctgtactcattggtggaaaccatttgatcactgcaggtgtgccaaggcgaagtaaaagaattgcaggcaaaaaagtttgcagagtggaatcaggaaaagcaggctgcttttctcctaaaatcagccataaagaaaaggttcgaagatctctgcgtttgaaattcaatctagggaaaaatggcagagaagtaaatggatgttctggtgtcaatagatatgaaagtgttggttggcgacttgcaaatcaacaaagtttaaaaaatcgaattgaatctgtaaaaacaggtttgctttttagcccagatgttgatgaaaagttaccaaagaaaggttcagaaaagatcagtaagtctgaggaaaccttactaactccagagcgactagttggaacaaattaccggatgtcttggacaggacctaataattcaagttttcaagaagtagatgcaaatgaagcttcttcaatggtggaaaatcttgaggtagaaaactctttggagcctgatattatggtagaaaagtcacctgctacttcatgtgaactcaccccttccaatttaaacaataagcataatagcaacataacaagtagccctcttagcggggatgaaaataacatgaccaaagagactttggtgaaagttcaaaaagcgttttctgaatctggaagtaatcttcacgcattgatgaatcagaggcagtcatcagtaactaatgtggggaaagtaaaattaactgaaccatcttatttagaagatagcccagaggaaaatctatttgaaactaatgatttgactatagtagaatcaaaggagaaatatgaacaccacactggtaaaggtgaaaaatgtttttcagagagggacttttcaccccttcaaactcaaacatttaatagagaaacaactataaaatgttattcaactcagatgaagatggaacatgaaaaagacattcattcaaatatgccaaaagattatttaagcaagcaagaattctccagtgatgaagaaataaagaaacagcagtccccaaaggataaactaaataataaattaaaagagaatgagaatatgatggaaggtaacttaccgaagtgtgcagcacatagcaaggacgaggctagatcctctttctcacagcagagtacatgtgttgtaacaaacttgtcaaaacctaggcctatgagaattgctaaacagcagtcattggaaacatgtgagaaaacagtttctgaaagttcacaaatgacagaacatagaaaggtttctgatcacatacagtggtttaacaagctttctttaaatgaaccaaatagaataaaagtcaagtcacctcttaagtttcagcgtactcctgttcgtcagtccgtcagaagaattaattctttgttggagtatagcagacaacctacagggcataagttggcgagtcttggtgatacagcttctcctttggtcaaatcagtgagctgtgacggtgctctttcctcttgtatagaaagtgcatcaaaagattcctctgtttcatgtatcaaatcaggtcctaaagaacagaagtccatgtcatgtgaagagtcaaatattggtgcaatttcaaagtcaagcatggagttaccctcgaaatctttcttaaagatgaggaagcacccagattcagtgaatgcttctcttaggtctactacagtttataaacagaagatcttatctgatggccaagttaaggttcccttggatgatctgactaatcatgatatagtaaaaccagttgtaaataacaacatgggcatttcttctgggataaataacagggtccttaggagaccatcagaaagaggaagggcctggtacaaaggttctccaaaacatcctatcggaaaaactcaattactaccaacaagtaaacctgtagatttgtaattggtaaatgttatacttgtcattaatgtaaataaagtgagtaattggtatgacttgcaggatgatgtacatgttagtttgtagctcaggatgattgttaagcaatagatttgctctattgaaaatgtttcatttttttcactgtacaagcaacttagatttttatttgtacaaattacttctttgtttttcttaatgatggcaatttttaaactttaattttattgtgatctcttaaagcagaggttagactttacctttctgactctgtcgtccaggctggagtgcagtggcgcaatctcaccgcaagctccacttcctgggttcatgccattttcctgcctcagcctcccgagtagctgggactacaggtgcccgccaccacgcccagctaattttttgtatttttagtagagacggtttcaccgtgttagccaggatggtctcgatctcctgacgttgtgatccgcccgcctcagcctcccaaagtgctgggattacaggcatgagccaccacgcccggctagactttacctttctaaagaaattgtttactggatttataagaagttaatttttgaaaatgacatatttttgtgtgatagaaagaatggagcaagttgtgcctatttcctccaagtcagataaggtttctaaaataaataaatttctagcatataaagggtagagataaactctgcaaatcttatgtctggaattatattaatgtttattgtccttgccaaaattcctagaaattaatttccttcaatagcatcctaaaactctatttttatttggggcagagtaatttcatttatagtgccagtaggtgtaccttgtgttcactcgaactaagaacaatggttaaggcagaataatgactaaaatatgttcatatattatgatgtggaaataattgataacttttaagccatactatgtttttaaagataatttgcacaaacacgtttgtgtctgttctgtccaatatagatttggcaattatttaaagagggataatcttgaaaaaaattaaccaaggtgatttcttatatgtagatgctcgattttggaatttgaaatagtagatgcacctctttaccttttttacttggataaaaacctatgatgattttgtcctgtgtgtaaatgttatttatttagcatagacattaaagataactctctggaaaatgacttgactaaggctctcatgaaattcaaagtgccatttagaacatgcaccaaattgtcaagtaaatctgtctaaatttatattttaaattattacaaattacacatctttgaggaaagagtattatgaacaatagaacatattctctaggttgtagaggaaggaataagcagacagaatcaaccactaaaggtagtttttcagattggttgttagaatgtcatgtttagatgttggagcagattagagcagcattcatgccactcggagcaaccagacttacagcataagtatgtacgaggaatttcaaatcatcagatgtttgcttggctaggttctactttgtttatttgatatcaaataggtttgtagatgtttatggcatttctaattgtaagtagagacaaaatattcatatagtcagatatatgttgtctgctttaaacaatttttaaattttaaaaatgcattaacgtctttttatatccatcaagggaaggatgaaatgttgaatttgaagactaattcagtaagaagtcctaggggtttaactgtacatactacctgaactggcttttctgagagatgaatcaataatgaaacatgtctgttttaaaaactaccacatgtgactcctatttttgttagctgaaagctgctatacggagtattacaggaatgtgaaggtgactagcttgaaggtagggtaactagagagccagaaaagttttgttttaaacttgatttaatgcgtttttattttttcttatacaaaatagagataatgttgctaacttcatggaatatttgaggaaatgatatgaaagtgtctggacgtgcagtaacctcatgggttcttctcactgtcttataaatgtaaataaagatctaatattaatttggtta

SEQ ID NO: 175652 - DNA, 5279 bp, Homo sapiens
  Payload ID: 14501
  Gene Symbol: ARHGAP11A
  Gene Name: Rho GTPase activating protein 11A
  Uniprot ID: Q6P4F7
  ENST ID: ENST00000611363
  CDS Start-End: 671-3175
gaaactgcgggtgtgacccccccgtggtggctctgggtgtctgcggaggagctgggggcggaagcatgaggctaacggcttggcttcagtgaacgcaccgggatgtgcaggccgggagagcgaaccagacggggacagtaaggtttggaggaagggggatcgttggaagtagcaagaagtggagagaatctggcaatagacgagaaaccgaaagaatcagaaagaagtctatggtaaaatatttggagtaccttttaatgcactgccccattctgctgtaccagaatatggacacattccaagctttcttgtcgatgcttgcacatctttagaagaccatattcataccgaagggctttttcggaaatcaggatctgtgattcgcctaaaagcactaaagaataaagtggatcatggtgaaggttgcctatcttctgcacctccttgtgatattgcgggacttcttaagcagttttttagggaactgccagagcccattctcccagctgatttgcatgaagcacttttgaaagctcaacagttaggcacagaggaaaagaataaagctacactgttgctctcctgtcttctggctgaccacacagttcatgtattaagatacttctttaactttctcaggaatgtttctcttagatccagtgagaataagatggacagcagcaatcttgcagtaatatttgcaccgaatcttcttcagacaagtgaaggacatgaaaagatgtcttctaacacagaaaagaagctacgattacaggctgcagtagtacagactcttatcgattatgcatcagatattgggcgtgtaccagattttatcctggaaaagataccagccatgttgggtattgatggtctctgtgctactccatcactggaaggctttgaagaaggtgaatatgaaactcctggtgaatataagagaaagagaagacaaagtgtaggagattttgttagtggagcactaaataaatttaaacctaacagaacaccttctattacacctcaagaagaaagaattgcccagctatctgaatcaccagtgattcttacaccaaatgctaagcgtacattgccagtagattcttctcatggtttctcaagtaagaaaaggaagtccatcaagcacaattttaactttgagctgttgccaagtaatctcttcaatagcagttctacaccggtatcagttcacatcgatacaagctcagaagggtcatctcagagttcactctctcctgtactcattggtggaaaccatttgatcactgcaggtgtgccaaggcgaagtaaaagaattgcaggcaaaaaagtttgcagagtggaatcaggaaaagcaggctgcttttctcctaaaatcagccataaagaaaaggttcgaagatctctgcgtttgaaattcaatctagggaaaaatggcagagaagtaaatggatgttctggtgtcaatagatatgaaagtgttggttggcgacttgcaaatcaacaaagtttaaaaaatcgaattgaatctgtaaaaacaggtttgctttttagcccagatgttgatgaaaagttaccaaagaaaggttcagaaaagatcagtaagtctgaggaaaccttactaactccagagcgactagttggaacaaattaccggatgtcttggacaggacctaataattcaagttttcaagaagtagatgcaaatgaagcttcttcaatggtggaaaatcttgaggtagaaaactctttggagcctgatattatggtagaaaagtcacctgctacttcatgtgaactcaccccttccaatttaaacaataagcataatagcaacataacaagtagccctcttagcggggatgaaaataacatgaccaaagagactttggtgaaagttcaaaaagcgttttctgaatctggaagtaatcttcacgcattgatgaatcagaggcagtcatcagtaactaatgtggggaaagtaaaattaactgaaccatcttatttagaagatagcccagaggaaaatctatttgaaactaatgatttgactatagtagaatcaaaggagaaatatgaacaccacactggtaaaggtgaaaaatgtttttcagagagggacttttcaccccttcaaactcaaacatttaatagagaaacaactataaaatgttattcaactcagatgaagatggaacatgaaaaagacattcattcaaatatgccaaaagattatttaagcaagcaagaattctccagtgatgaagaaataaagaaacagcagtccccaaaggataaactaaataataaattaaaagagaatgagaatatgatggaaggtaacttaccgaagtgtgcagcacatagcaaggacgaggctagatcctctttctcacagcagagtacatgtgttgtaacaaacttgtcaaaacctaggcctatgagaattgctaaacagcagtcattggaaacatgtgagaaaacagtttctgaaagttcacaaatgacagaacatagaaaggtttctgatcacatacagtggtttaacaagctttctttaaatgaaccaaatagaataaaagtcaagtcacctcttaagtttcagcgtactcctgttcgtcagtccgtcagaagaattaattctttgttggagtatagcagacaacctacagggcataagttggcgagtcttggtgatacagcttctcctttggtcaaatcagtgagctgtgacggtgctctttcctcttgtatagaaagtgcatcaaaagattcctctgtttcatgtatcaaatcaggtcctaaagaacagaagtccatgtcatgtgaagagtcaaatattggtgcaatttcaaagtcaagcatggagttaccctcgaaatctttcttaaagatgaggaagcacccagattcagtgaatgcttctcttaggtctactacagtttataaacagaagatcttatctgatggccaagttaaggttcccttggatgatctgactaatcatgatatagtaaaaccagttgtaaataacaacatgggcatttcttctgggataaataacagggtccttaggagaccatcagaaagaggaagggcctggtacaaaggttctccaaaacatcctatcggaaaaactcaattactaccaacaagtaaacctgtagatttgtaattggtaaatgttatacttgtcattaatgtaaataaagtgagtaattggtatgacttgcaggatgatgtacatgttagtttgtagctcaggatgattgttaagcaatagatttgctctattgaaaatgtttcatttttttcactgtacaagcaacttagatttttatttgtacaaattacttctttgtttttcttaatgatggcaatttttaaactttaattttattgtgatctcttaaagcagaggttagactttacctttctgactctgtcgtccaggctggagtgcagtggcgcaatctcaccgcaagctccacttcctgggttcatgccattttcctgcctcagcctcccgagtagctgggactacaggtgcccgccaccacgcccagctaattttttgtatttttagtagagacggtttcaccgtgttagccaggatggtctcgatctcctgacgttgtgatccgcccgcctcagcctcccaaagtgctgggattacaggcatgagccaccacgcccggctagactttacctttctaaagaaattgtttactggatttataagaagttaatttttgaaaatgacatatttttgtgtgatagaaagaatggagcaagttgtgcctatttcctccaagtcagataaggtttctaaaataaataaatttctagcatataaagggtagagataaactctgcaaatcttatgtctggaattatattaatgtttattgtccttgccaaaattcctagaaattaatttccttcaatagcatcctaaaactctatttttatttggggcagagtaatttcatttatagtgccagtaggtgtaccttgtgttcactcgaactaagaacaatggttaaggcagaataatgactaaaatatgttcatatattatgatgtggaaataattgataacttttaagccatactatgtttttaaagataatttgcacaaacacgtttgtgtctgttctgtccaatatagatttggcaattatttaaagagggataatcttgaaaaaaattaaccaaggtgatttcttatatgtagatgctcgattttggaatttgaaatagtagatgcacctctttaccttttttacttggataaaaacctatgatgattttgtcctgtgtgtaaatgttatttatttagcatagacattaaagataactctctggaaaatgacttgactaaggctctcatgaaattcaaagtgccatttagaacatgcaccaaattgtcaagtaaatctgtctaaatttatattttaaattattacaaattacacatctttgaggaaagagtattatgaacaatagaacatattctctaggttgtagaggaaggaataagcagacagaatcaaccactaaaggtagtttttcagattggttgttagaatgtcatgtttagatgttggagcagattagagcagcattcatgccactcggagcaaccagacttacagcataagtatgtacgaggaatttcaaatcatcagatgtttgcttggctaggttctactttgtttatttgatatcaaataggtttgtagatgtttatggcatttctaattgtaagtagagacaaaatattcatatagtcagatatatgttgtctgctttaaacaatttttaaattttaaaaatgcattaacgtctttttatatccatcaagggaaggatgaaatgttgaatttgaagactaattcagtaagaagtcctaggggtttaactgtacatactacctgaactggcttttctgagagatgaatcaataatgaaacatgtctgttttaaaaactaccacatgtgactcctatttttgttagctgaaagctgctatacggagtattacaggaatgtgaaggtgactagcttgaaggtagggtaactagagagccagaaaagttttgttttaaacttgatttaatgcgtttttattttttcttatacaaaatagagataatgttgctaacttcatggaatatttgaggaaatgatatgaaagtgtctggacgtgcagtaacctcatgggttcttctcactgtcttataaatgtaaataaagatctaatattaatttggtta

SEQ ID NO: 175653 - DNA, 5157 bp, Homo sapiens
  Payload ID: 14501
  Gene Symbol: ARHGAP11A
  Gene Name: Rho GTPase activating protein 11A
  Uniprot ID: Q6P4F7
  ENST ID: ENST00000622253
  CDS Start-End: 549-3053
aagaacggtttcttcataagagggccttcagcgacagccaagctcggaaaagaacgggaataagttgtcttttatatttcctcaaatactgtgaatggtctgaggcgcagggtaaaatatttggagtaccttttaatgcactgccccattctgctgtaccagaatatggacacattccaagctttcttgtcgatgcttgcacatctttagaagaccatattcataccgaagggctttttcggaaatcaggatctgtgattcgcctaaaagcactaaagaataaagtggatcatggtgaaggttgcctatcttctgcacctccttgtgatattgcgggacttcttaagcagttttttagggaactgccagagcccattctcccagctgatttgcatgaagcacttttgaaagctcaacagttaggcacagaggaaaagaataaagctacactgttgctctcctgtcttctggctgaccacacagttcatgtattaagatacttctttaactttctcaggaatgtttctcttagatccagtgagaataagatggacagcagcaatcttgcagtaatatttgcaccgaatcttcttcagacaagtgaaggacatgaaaagatgtcttctaacacagaaaagaagctacgattacaggctgcagtagtacagactcttatcgattatgcatcagatattgggcgtgtaccagattttatcctggaaaagataccagccatgttgggtattgatggtctctgtgctactccatcactggaaggctttgaagaaggtgaatatgaaactcctggtgaatataagagaaagagaagacaaagtgtaggagattttgttagtggagcactaaataaatttaaacctaacagaacaccttctattacacctcaagaagaaagaattgcccagctatctgaatcaccagtgattcttacaccaaatgctaagcgtacattgccagtagattcttctcatggtttctcaagtaagaaaaggaagtccatcaagcacaattttaactttgagctgttgccaagtaatctcttcaatagcagttctacaccggtatcagttcacatcgatacaagctcagaagggtcatctcagagttcactctctcctgtactcattggtggaaaccatttgatcactgcaggtgtgccaaggcgaagtaaaagaattgcaggcaaaaaagtttgcagagtggaatcaggaaaagcaggctgcttttctcctaaaatcagccataaagaaaaggttcgaagatctctgcgtttgaaattcaatctagggaaaaatggcagagaagtaaatggatgttctggtgtcaatagatatgaaagtgttggttggcgacttgcaaatcaacaaagtttaaaaaatcgaattgaatctgtaaaaacaggtttgctttttagcccagatgttgatgaaaagttaccaaagaaaggttcagaaaagatcagtaagtctgaggaaaccttactaactccagagcgactagttggaacaaattaccggatgtcttggacaggacctaataattcaagttttcaagaagtagatgcaaatgaagcttcttcaatggtggaaaatcttgaggtagaaaactctttggagcctgatattatggtagaaaagtcacctgctacttcatgtgaactcaccccttccaatttaaacaataagcataatagcaacataacaagtagccctcttagcggggatgaaaataacatgaccaaagagactttggtgaaagttcaaaaagcgttttctgaatctggaagtaatcttcacgcattgatgaatcagaggcagtcatcagtaactaatgtggggaaagtaaaattaactgaaccatcttatttagaagatagcccagaggaaaatctatttgaaactaatgatttgactatagtagaatcaaaggagaaatatgaacaccacactggtaaaggtgaaaaatgtttttcagagagggacttttcaccccttcaaactcaaacatttaatagagaaacaactataaaatgttattcaactcagatgaagatggaacatgaaaaagacattcattcaaatatgccaaaagattatttaagcaagcaagaattctccagtgatgaagaaataaagaaacagcagtccccaaaggataaactaaataataaattaaaagagaatgagaatatgatggaaggtaacttaccgaagtgtgcagcacatagcaaggacgaggctagatcctctttctcacagcagagtacatgtgttgtaacaaacttgtcaaaacctaggcctatgagaattgctaaacagcagtcattggaaacatgtgagaaaacagtttctgaaagttcacaaatgacagaacatagaaaggtttctgatcacatacagtggtttaacaagctttctttaaatgaaccaaatagaataaaagtcaagtcacctcttaagtttcagcgtactcctgttcgtcagtccgtcagaagaattaattctttgttggagtatagcagacaacctacagggcataagttggcgagtcttggtgatacagcttctcctttggtcaaatcagtgagctgtgacggtgctctttcctcttgtatagaaagtgcatcaaaagattcctctgtttcatgtatcaaatcaggtcctaaagaacagaagtccatgtcatgtgaagagtcaaatattggtgcaatttcaaagtcaagcatggagttaccctcgaaatctttcttaaagatgaggaagcacccagattcagtgaatgcttctcttaggtctactacagtttataaacagaagatcttatctgatggccaagttaaggttcccttggatgatctgactaatcatgatatagtaaaaccagttgtaaataacaacatgggcatttcttctgggataaataacagggtccttaggagaccatcagaaagaggaagggcctggtacaaaggttctccaaaacatcctatcggaaaaactcaattactaccaacaagtaaacctgtagatttgtaattggtaaatgttatacttgtcattaatgtaaataaagtgagtaattggtatgacttgcaggatgatgtacatgttagtttgtagctcaggatgattgttaagcaatagatttgctctattgaaaatgtttcatttttttcactgtacaagcaacttagatttttatttgtacaaattacttctttgtttttcttaatgatggcaatttttaaactttaattttattgtgatctcttaaagcagaggttagactttacctttctgactctgtcgtccaggctggagtgcagtggcgcaatctcaccgcaagctccacttcctgggttcatgccattttcctgcctcagcctcccgagtagctgggactacaggtgcccgccaccacgcccagctaattttttgtatttttagtagagacggtttcaccgtgttagccaggatggtctcgatctcctgacgttgtgatccgcccgcctcagcctcccaaagtgctgggattacaggcatgagccaccacgcccggctagactttacctttctaaagaaattgtttactggatttataagaagttaatttttgaaaatgacatatttttgtgtgatagaaagaatggagcaagttgtgcctatttcctccaagtcagataaggtttctaaaataaataaatttctagcatataaagggtagagataaactctgcaaatcttatgtctggaattatattaatgtttattgtccttgccaaaattcctagaaattaatttccttcaatagcatcctaaaactctatttttatttggggcagagtaatttcatttatagtgccagtaggtgtaccttgtgttcactcgaactaagaacaatggttaaggcagaataatgactaaaatatgttcatatattatgatgtggaaataattgataacttttaagccatactatgtttttaaagataatttgcacaaacacgtttgtgtctgttctgtccaatatagatttggcaattatttaaagagggataatcttgaaaaaaattaaccaaggtgatttcttatatgtagatgctcgattttggaatttgaaatagtagatgcacctctttaccttttttacttggataaaaacctatgatgattttgtcctgtgtgtaaatgttatttatttagcatagacattaaagataactctctggaaaatgacttgactaaggctctcatgaaattcaaagtgccatttagaacatgcaccaaattgtcaagtaaatctgtctaaatttatattttaaattattacaaattacacatctttgaggaaagagtattatgaacaatagaacatattctctaggttgtagaggaaggaataagcagacagaatcaaccactaaaggtagtttttcagattggttgttagaatgtcatgtttagatgttggagcagattagagcagcattcatgccactcggagcaaccagacttacagcataagtatgtacgaggaatttcaaatcatcagatgtttgcttggctaggttctactttgtttatttgatatcaaataggtttgtagatgtttatggcatttctaattgtaagtagagacaaaatattcatatagtcagatatatgttgtctgctttaaacaatttttaaattttaaaaatgcattaacgtctttttatatccatcaagggaaggatgaaatgttgaatttgaagactaattcagtaagaagtcctaggggtttaactgtacatactacctgaactggcttttctgagagatgaatcaataatgaaacatgtctgttttaaaaactaccacatgtgactcctatttttgttagctgaaagctgctatacggagtattacaggaatgtgaaggtgactagcttgaaggtagggtaactagagagccagaaaagttttgttttaaacttgatttaatgcgtttttattttttcttatacaaaatagagataatgttgctaacttcatggaatatttgaggaaatgatatgaaagtgtctggacgtgcagtaacctcatgggttcttctcactgtcttataaatgtaaataaagatctaatattaatttggtta

SEQ ID NO: 175654 - DNA, 5898 bp, Homo sapiens
  Payload ID: 14501
  Gene Symbol: ARHGAP11A
  Gene Name: Rho GTPase activating protein 11A
  ENST ID: ENST00000633634
  CDS Start-End: 723-3794
gaaactgcgggtgtgacccccccgtggtggctctgggtgtctgcggaggagctgggggcggaagcatgaggctaacggcttggcttcagtgaacgcaccgggatgtgcaggccgggaggtagaggcaggctgatgggggagggaacgagcagcctgtgagacggggtgacggcggctaccagcccgggcgggcaccgggactggaagagttgcctgagcagccggctggtccggcggccaggctagggcgggggcgagcgcccagttgagcctgctggggctggaggagcgagaagggttttcttcacatttcagagcgaaccagacggggacagtaaggtttggaggaagggggatcgttggaagtagcaagaagtggagagaatctggcaatagacgagaaaccgaaagaatcagaaagaagtctatgtgagtagctgaaagcattgggtgaccagaaagaaggtcggtgtaagtgaaggaagagtgaggtgtggctggatcaaagggctaagagaagcgggtctgtgtaagtggatgtgagtgaggatcaaggaaaagccgtggaagtggccgggggtcggggccgcagaagtgccagacggggccggaaagcagccgagcggagttcaaatttgagagcgtttggaaattggaagacttggtggcgaacgagggtcaggacctgcatcctgcctcagagagttatcgacgtatccggaatgtgggatcagaggctggtgaggttggccctgttgcagcatctgcgggccttctatggtattaaggtgaagggtgtccgtgggcagtgcgatcgcaggagacatgaaacagcagccacggaaatagggggtaaaatatttggagtaccttttaatgcactgccccattctgctgtaccagaatatggacacattccaagctttcttgtcgatgcttgcacatctttagaagaccatattcataccgaagggctttttcggaaatcaggatctgtgattcgcctaaaagcactaaagaataaagtggatcatggtgaaggttgcctatcttctgcacctccttgtgatattgcgggacttcttaagcagttttttagggaactgccagagcccattctcccagctgatttgcatgaagcacttttgaaagctcaacagttaggcacagaggaaaagaataaagctacactgttgctctcctgtcttctggctgaccacacagttcatgtattaagatacttctttaactttctcaggaatgtttctcttagatccagtgagaataagatggacagcagcaatcttgcagtaatatttgcaccgaatcttcttcagacaagtgaaggacatgaaaagatgtcttctaacacagaaaagaagctacgattacaggctgcagtagtacagactcttatcgattatgcatcagatattgggcgtgtaccagattttatcctggaaaagataccagccatgttgggtattgatggtctctgtgctactccatcactggaaggctttgaagaaggtgaatatgaaactcctggtgaatataagagaaagagaagacaaagtgtaggagattttgttagtggagcactaaataaatttaaacctaacagaacaccttctattacacctcaagaagaaagaattgcccagctatctgaatcaccagtgattcttacaccaaatgctaagcgtacattgccagtagattcttctcatggtttctcaagtaagaaaaggaagtccatcaagcacaattttaactttgagctgttgccaagtaatctcttcaatagcagttctacaccggtatcagttcacatcgatacaagctcagaagggtcatctcagagttcactctcgcctgtactcattggtggaaaccatttgatcactgcaggtgtgccaaggcgaagtaaaagaattgcaggcaaaaaagtttgcagagtggaatcaggaaaagcaggctgcttttctcctaaaatcagccataaagaaaaggttcgaagatctctgcgtttgaaattcaatctagggaaaaatggcagagaagtaaatggatgttctggtgtcaatagatatgaaagtgttggttggcgacttgcaaatcaacaaagtttaaaaaatcgaattgaatctgtaaaaacaggtttgctttttagcccagatgttgatgaaaagttaccaaagaaaggttcagaaaagatcagtaagtctgaggaaaccttactaactccagagcgactagttggaacaaattaccggatgtcttggacaggacctaataattcaagttttcaagaagtagatgcaaatgaagcttcttcaatggtggaaaatcttgaggtagaaaactctttggagcctgatattatggtagaaaagtcacctgctacttcatgtgaactcaccccttccaatttaaacaataagcataatagcaacataacaagtagccctcttagcggggatgaaaataacatgaccaaagagactttggtgaaagttcaaaaagcgttttctgaatctggaagtaatcttcacgcattgatgaatcagaggcagtcatcagtaactaatgtggggaaagtaaaattaactgaaccatcttatttagaagatagcccagaggaaaatctatttgaaactaatgatttgactatagtagaatcaaaggagaaatatgaacaccacactggtaaaggtgaaaaatgtttttcagagagggacttttcaccccttcaaactcaaacatttaatagagaaacaactataaaatgttattcaactcagatgaagatggaacatgaaaaagacattcattcaaatatgccaaaagattatttaagcaagcaagaattctccagtgatgaagaaataaagaaacagcagtccccaaaggataaactaaataataaattaaaagagaatgagaatatgatggaaggtaacttaccgaagtgtgcagcacatagcaaggacgaggctagatcctctttctcacagcagagtacatgtgttgtaacaaacttgtcaaaacctaggcctatgagaattgctaaacagcagtcattggaaacatgtgagaaaacagtttctgaaagttcacaaatgacagaacatagaaaggtttctgatcacatacagtggtttaacaagctttctttaaatgaaccaaatagaataaaagtcaagtcacctcttaagtttcagcgtactcctgttcgtcagtccgtcagaagaattaattctttgttggagtatagcagacaacctacagggcataagttggcgagtcttggtgatacagcttctcctttggtcaaatcagtgagctgtgacggtgctctttcctcttgtatagaaagtgcatcaaaagattcctctgtttcatgtatcaaatcaggtcctaaagaacagaagtccatgtcatgtgaagagtcaaatattggtgcaatttcaaagtcaagcatggagttaccctcgaaatctttcttaaagatgaggaagcacccagattcagtgaatgcttctcttaggtctactacagtttataaacagaagatcttatctgatggccaagttaaggttcccttggatgatctgactaatcatgatatagtaaaaccagttgtaaataacaacatgggcatttcttctgggataaataacagggtccttaggagaccatcagaaagaggaagggcctggtacaaaggttctccaaaacatcctatcggaaaaactcaattactaccaacaagtaaacctgtagatttgtaattggtaaatgttatacttgtcattaatgtaaataaagtgagtaattggtatgacttgcaggatgatgtacatgttagtttgtagctcaggatgattgttaagcaatagatttgctctattgaaaatgtttcatttttttcactgtacaagcaacttagatttttatttgtacaaattacttctttgtttttcttaatgatggcaatttttaaactttaattttattgtgatctcttaaagcagaggttagactttacctttctgactctgtcgtccaggctggagtgcagtggcgcaatctcactgcaagctccacttcctgggttcatgccattttcctgcctcagcctcccgagtagctgggactacaggtgcccgccaccacgcccagctaattttttgtatttttagtagagacggtttcaccgtgttagccaggatggtctcgatctcctgaccttgtgatccgcccgcctcagcctcccaaagtgctgggattacaggcatgagccaccacgcccggctagactttacctttctaaagaaattgtttactggatttataagaagttaatttttgaaaatgacatatttttgtgtgatagaaagaatggagcaagttgtgcctatttcctccaagtcagataaggtttctaaaataaataaatttctagcatataaagggtagagataaactctgcaaatcttatgtctggaattatattaatgtttattgtccttgccaaaattcctagaaattaatttccttcaatagcatcctaaaactctatttttatttggggcagagtaatttcatttatagtgccagtaggtgtaccttgtgttcactcgaactaagaacaatggttaaggcagaataatgactaaaatatgttcatatattatgatgtggaaataattgataacttttaagccatactatgtttttaaagataatttgcacaaacacgtttgtgtctgttctgtccaatatagatttggcaattatttaaagagggataatcttgaaaaaaattaaccaaggtgatttcttatatgtagatgctcgattttggaatttgaaatagtagatgcacctctttaccttttttacttggataaaaacctatgatgattttgtcctgtgtgtaaatgttatttatttagcatagacattaaagataactctctggaaaatgacttgactaaggctctcatgaaattcaaagtgccatttagaacatgcaccaaattgtcaagtaaatctgtctaaatttatattttaaattattacaaattacacatctttgaggaaagagtattatgaacaatagaacatattctctaggttgtagaggaaggaataagcagacagaatcaaccactaaaggtagtttttcagattggttgttagaatgtcatgtttagatgttggagcagattagagcagcattcatgccactcggagcaaccagacttacagcataagtatgtacgaggaatttcaaatcatcagatgtttgcttggctaggttctactttgtttatttgatatcaaataggtttgtagatgtttatggcatttctaattgtaagtagagacaaaatattcatatagtcagatatatgttgtctgctttaaacaatttttaaattttaaaaatgcattaacgtctttttatatccatcaagggaaggatgaaatgttgaatttgaagactaattcagtaagaagtcctaggggtttaactgtacatactacctgaactggcttttctgagagatgaatcaataatgaaacatgtctgttttaaaaactaccacatgtgactcctatttttgttagctgaaagctgcaatacggagtattacagaaatgtgaaggtgactagcttgaaggtagggtaactagagagccagaaaagttttgttttaaacttgatttaatgcgtttttattttttcttatacaaaatagagataatgttgctaacttcatggaatatttgaggaaatgatatgaaagtgtctggacgtgcagtaacctcatggcttcttctcactgtcttataaatgtaaataaagatctaatattaatttggtta

SEQ ID NO: 175655 - DNA, 1017 bp, Homo sapiens
  Payload ID: 14502
  Gene Symbol: ARHGAP11B
  Gene Name: Rho GTPase activating protein 11B
  Uniprot ID: Q3KRB8
  ENST ID: ENST00000428041
  CDS Start-End: 146-949
gggggtcggggccgcagaagtgccagacggggccggaaagcagccgagcggagttcaaatttgagagcgtttggaaattggaagacttggtggcgaacgagggtcaggacctgcatcctgcctcagagttatcgacgtatccggaatgtgggatcagaggctggtgaagttggccctgttgcagcatctgcgggccttctatggtattaaggtgaagggtgtccgtgggcagtgcgatcgcaggagacatgaaacagcagccacggaaatagggggtaaaatatttggagtaccttttaatgcactgccccattctgctgtaccagaatatggacacattccaagctttcttgtcgatgcttgcacatctttagaagaacatattcataccgaagggctttttcggaaatcaggatctgtgattcgcctaaaagcactaaagaataaagtggatcatggtgaaggttgcctatcttctgcacctccttgtgatattgcgggacttcttaagcagttttttagggaactgccagagcccattctcccagctgatttgcatgaagcacttttgaaagctcaacagttaggcacagaggaaaagaataaagctatactgttgctctcctgtcttctggctgaccacacagttcatgtattaagatacttctttaactttctcaggaatgtttctcttagatccagtgagaataagatggatagcagcaatcttgcagtaatatttgcaccaaatcttcttcagacaagtgaaggacatgaaaagatgtcttctaacgcagaaaagaagggcgtgtaccagactttatcctggaaaagataccagccatgttgggtattgatggtctctgtgctactccatcactggaaggctttgaagaaggtgaatatgaaactcctggtgaatataagagaaagagaagacaacgtgtaggagattttgttagtggagcactaaataaatttaaacctaacagaacaccttctattacacctcaacaa

SEQ ID NO: 175656 - DNA, 2043 bp, Homo sapiens
  Payload ID: 14502
  Gene Symbol: ARHGAP11B
  Gene Name: Rho GTPase activating protein 11B
  Uniprot ID: Q3KRB8
  ENST ID: ENST00000563110
  CDS Start-End: 622-1425
ccgggatgtgcaggccgggaggtagaggcaggctgatgggggagggaacgagcagcctgtgagacggggtgacggcggctaccagcccgggcgggcaccgggactggaagagttgcctgagcagccggctggtccggcggccaggctagggcgggggcgagcgcccagttgagcctgctggggctggaggagcgagaagggttctcttcacatttcagagcgaaccagacggacagtaaggtttggaggaagggggatcgttggaagtagcaggaagtggagagaatctggcaataggcgagaaaccgaaagaatcagaaagaagtctatgtgagtagctgaaagcattgggtgaccagaaagaaggtcgctgtaagtgaaggaagagtgaggtgtggctggatcaaagggctaagagaagcgggtctgtgtaagtggatgtgagtgaggatcaaggaaaagccgtggaagtggccgggggtcggggccgcagaagtgccagacggggccggaaagcagccgagcggagttcaaatttgagagcgtttggaaattggaagacttggtggcgaacgagggtcaggacctgcatcctgcctcagagttatcgacgtatccggaatgtgggatcagaggctggtgaagttggccctgttgcagcatctgcgggccttctatggtattaaggtgaagggtgtccgtgggcagtgcgatcgcaggagacatgaaacagcagccacggaaatagggggtaaaatatttggagtaccttttaatgcactgccccattctgctgtaccagaatatggacacattccaagctttcttgtcgatgcttgcacatctttagaagaacatattcataccgaagggctttttcggaaatcaggatctgtgattcgcctaaaagcactaaagaataaagtggatcatggtgaaggttgcctatcttctgcacctccttgtgatattgcgggacttcttaagcagttttttagggaactgccagagcccattctcccagctgatttgcatgaagcacttttgaaagctcaacagttaggcacagaggaaaagaataaagctatactgttgctctcctgtcttctggctgaccacacagttcatgtattaagatacttctttaactttctcaggaatgtttctcttagatccagtgagaataagatggatagcagcaatcttgcagtaatatttgcaccaaatcttcttcagacaagtgaaggacatgaaaagatgtcttctaacgcagaaaagaagggcgtgtaccagactttatcctggaaaagataccagccatgttgggtattgatggtctctgtgctactccatcactggaaggctttgaagaaggtgaatatgaaactcctggtgaatataagagaaagagaagacaacgtgtaggagattttgttagtggagcactaaataaatttaaacctaacagaacaccttctattacacctcaacaagaaagaattgataatgaaacaaccaccatcggttaaatttgatccaaaaatattgcatctaccagcattttcagtggataagttataatttctgaaagaccaagattggaatgactttttgtaacaagtgtgctcgcagatcgactccagtgagaagagctcggggacctcctgagccaagtttaatctcctttgctatttgtgcatggtggctggtcaccaggaggtggccaccaggcttctcctttccccgctgttctaattgctaatccagtatttgcggatagctccaaactgggatatgaccaccattgtatatgcagaccattgactggaacatcatgatctatctgcacatgactgtaaataacaactattggatgtggcacagatggaagctacataaacactctatacaatatggccaattcaccgggctccctgttagtcttgtgagcaattttaaactcttccacgattctttctctgctttggagtgtttcaattaattctccattatattacaatttacatttttattaagccttta

SEQ ID NO: 175657 - DNA, 2042 bp, Homo sapiens; identical to SEQ ID NO: 103651
  Payload ID: 14502
  Gene Symbol: ARHGAP11B
  Gene Name: Rho GTPase activating protein 11B
  Uniprot ID: Q3KRB8
  ENST ID: ENST00000622744
  CDS Start-End: 622-1425

SEQ ID NO: 175658 - DNA, 4625 bp, Homo sapiens
  Payload ID: 14503
  Gene Symbol: ARHGAP12
  Gene Name: Rho GTPase activating protein 12
  Uniprot ID: Q8IWW6
  ENST ID: ENST00000311380
  CDS Start-End: 20-2404
gagaggtgaatattattgaatgaaaatggctgacagaagtgggaagattattccaggacaagtgtatattgaggtggaatatgattatgaatatgaagcaaaggacagaaagattgtgataaaacaaggggagaggtacatcttggtgaaaaagaccaatgatgactggtggcaagtcaagccagatgaaaactccaaagcgttttatgtgccagcccagtatgtgaaggaggtcacgcgcaaagctctcatgccacctgttaagcaggtagctggtctgccaaataactccacgaaaataatgcagagtttgcatcttcagagatcaacagaaaatgtgaacaaattgcctgagctttcaagtttcggaaagccatcgtcatctgttcaaggaacaggtcttattcgtgatgccaatcagaattttggacccagttataatcaaggtcagactgtcaacctaagcctggacctgacccataataacggaaagtttaacaatgactcacattctcctaaagtttccagccagaataggacacgctcatttggtcattttcccggtccagagttcttggatgtagagaaaactagcttctcccaggaacaatcttgtgattccgcaggagaaggctctgaaagaatacatcaagattctgaatctggtgatgaacttagcagcagctccactgaacagataagggcaaccacacctccaaatcaaggaaggccagattctcctgtctatgctaaccttcaagaactgaaaatatcccagtctgctcttcccccacttcctgggagcccggcaattcagattaatggagaatgggaaactcataaagacagctcagggcgttgctattactataacagagggacacaggaaagaacttggaaacctcctcgttggactcgggatgcaagcatcagcaaaggagatttccaaaatccaggggatcaagagtggctcaagcatgttgatgatcaaggtagacaatattactacagtgcagacggatctcggtcagaatgggaattgccaaagtataatgcttcatcccagcagcaaagagaaataattaaaagtaggagcctggacaggcggctgcaagaaccaatagtattaacaaagtggagacatagcaccattgtattggacactaatgataaggaatctccaactgcctcaaaaccctgctttcctgaaaatgagtcttctccctcctcaccaaagcaccaagatacagatcaagagaaatatggattattaaatgtaacaaaaattgctgaaaatgggaaaaaggttcgaaagaactggttgtcttcttgggcggtgttgcagggttcatctttactttttaccaaaactcaaggaagtagcacaagttggtttggcagtaatcagtccaaaccagagttcacagtggacctcaagggggcaacaattgagatggcttcaaaggataaatccagcaaaaagaatgtatttgagctgaaaactcgtcaaggaacagaactgctaattcagtctgacaatgacactgttattaatgattggtttaaagttcttagtagtacaatcaataatcaggcagtagaaactgatgaaggaattgaagaggagataccggattcaccaggaatagaaaagcatgataaagaaaaggaacaaaaggatcccaaaaagcttcgttcctttaaagtatctagcatagattcttcagaacagaaaaaaaccaagaaaaacttaaagaagtttcttacacgacgccccactttgcaagctgttcgtgaaaaaggttatattaaagatcaggtatttggatccaatctcgctaatctgtgtcagagagagaatggcacagtaccaaagtttgtgaagttatgtattgaacatgttgaagaacatggtttggatattgatgggatatacagagtaagtggcaacctcgcagtgatccagaaactaaggtttgcagtcaatcatgatgagaaattggacttgaatgacagtaaatgggaagatattcatgtcattactggagccctcaaaatgttttttcgagaattaccagaacctctttttacatttaatcattttaatgattttgttaatgcaattaagcaagaaccaagacagcgagtcgctgctgttaaggacctaatcagacagttgccaaagccaaaccaagacacaatgcagattcttttccgacatctcagaagagttatagaaaatggagagaaaaatcgaatgacctatcagagtatagcaattgtttttggtcccactctattaaaaccagaaaaagagactggtaatatagcagttcatactgtgtaccagaatcagattgtagaattaattcttctggaactgagttccatcttcggacgttgattcttactgaagacaacctgtggaatagaagctggattccatcagatttcaaatgtttatacacaatgtattttattttttggaccaagcagtgactctttgattttgcactttttttttgagggatcagaagggaaggggagagtcgagatgtgtgttaggccctcatatttgctgctttgttgcaagttgatataactgcgtgtaattatgaattcattttatcctgaatgtttgcatttcatactctgaatttcagtaaaaatcaaaacttaaaattctaaccagtcatatacactggataatttggtaagaaaactgtattttttttccctgaaattggataatgtactttcttctcaagattcatgacttgatagaacaatactttcagttatgttgcaaaggctcttgggcattttaaacaaaatgaagtatatccattttgaaacctgtgtatttctttttcggggtttctgcatgcagtggcagtcttaagtgccaaaattcattataaccccaaaataaccccttgatgaaggcttgctgtcttttactgtgttacacagcatccttactggatatcttagttgcttgtttgggcagcacactaatattacttaaaacactgtgatatactggagttttagttagcggaagtcagttcagggcattttagggctgtcttgctatactgaattgtagctaacaatcctaattatatctagtaccatactgagttattggtatgaccctgtggaaacacacattattttatgtaaatataggctaaagacttaatgtcctttagcttgtgtatataattgtgttgtatagtctcagagtacattctaaccctacatttctaatcattgttattggtaatcttttctgtgaatattaggtttcctccagaaatagtccgttatttgggaaagttaactgtgtgcacttttagatattaactacatttacaggcaaatcactgtaatgagaatggtactggaaaaatactgaatagacttgctaaatggcacatgcactacaagaggaaccttttgggttatttaatatgtacagaaaacattagaaaaaatttattacagaattctaattccagtatgaatagtggaaacccatctgtaaattagatggatgttggatggaaaatgacattgctaaatttgagaatttctttttacctactaatgtagattgctttgtataataaaacacagggtttggaaggttttgttacagggagcatggtctgttgaagatttttaaaatgtatttttctagattaacttctgtacatgaaatgtctaataaaactataagaggtttagagatttttccattggaaatgtgcattttggtttctaatttttttgttttttcatttactggcatactgttatacctcatttttaaaaatcaactgaatccaatatttcctgtggcaaataacactttcctcatttcataccttttctcctctcttccatgccaacatttctccacccacaacgtacactttttatttctccatcaatatttgaaagcgagtgatttgtgaccaggatttttttttcttagggttgcatttataatttacagattgccttccttgggaacaagtatttttttgtatgatctgtctaaaaacctctcacctgaattttgtggtagaaagtctgtatttgttgttgtgagcgtgttaaattgataacaaaccaaactacttgatagctaaagcagattgtttcgggtggggagaaaaagccctaaatcagaatgtttatatttgcctaaagatgtccttaataatacaatatgctttagatcttgcttatttagtgattgtataccaggaaaacaattagactcaaatcagtgatgttcttgttcttggtgttcatgaacatatatcaaagattaaaattgtcctgtgtttcttgtttcaaggtacgtgtgtgtgtgtgtgtgtgtgtgtgtgtgtgtgtgtgaagtcttaaatgttttattagtctacagctaatcagtttattgtaatattgtatgtacagtgagattaatgtcttgcgttttcatcctttgtgaattaaaaattctcacttgttttgtaataacaaagctagtaatattttcctgtcttgacagcttggttttatagtagaaaatatattaaaagctgaaataaattatcagtggaatttta

SEQ ID NO: 175659 - DNA, 4128 bp, Homo sapiens
  Payload ID: 14503
  Gene Symbol: ARHGAP12
  Gene Name: Rho GTPase activating protein 12
  Uniprot ID: Q8IWW6
  ENST ID: ENST00000344936
  CDS Start-End: 236-2776
agcctgcggggacgggccggccgcggccgtagccgtgtgaacgctcttcgggctcgcgtcgtcgacccgcagccgcggggcggactaagaagggagccgcctgctgcgaggccgccgggctcccggtttaaatgtgatactggtgtagatctccttgttctaagctatattcatccaacaagccataaagccataatgtggtataacatcctttttgagaggtgaatattattgaatgaaaatggctgacagaagtgggaagattattccaggacaagtgtatattgaggtggaatatgattatgaatatgaagcaaaggacagaaagattgtgataaaacaaggggagaggtacatcttggtgaaaaagaccaatgatgactggtggcaagtcaagccagatgaaaactccaaagcgttttatgtgccagcccagtatgtgaaggaggtcacgcgcaaagctctcatgccacctgttaagcaggtagctggtctgccaaataactccacgaaaataatgcagagtttgcatcttcagagatcaacagaaaatgtgaacaaattgcctgagctttcaagtttcggaaagccatcgtcatctgttcaaggaacaggtcttattcgtgatgccaatcagaattttggacccagttataatcaaggtcagactgtcaacctaagcctggacctgacccataataacggaaagtttaacaatgactcacattctcctaaagtttccagccagaataggacacgctcatttggtcattttcccggtccagagttcttggatgtagagaaaactagcttctcccaggaacaatcttgtgattccgcaggagaaggctctgaaagaatacatcaagattctgaatctggtgatgaacttagcagcagctccactgaacagataagggcaaccacacctccaaatcaaggaaggccagattctcctgtctatgctaaccttcaagaactgaaaatatcccagtctgctcttcccccacttcctgggagcccggcaattcagattaatggagaatgggaaactcataaagacagctcagggcgttgctattactataacagagggacacaggaaagaacttggaaacctcctcgttggactcgggatgcaagcatcagcaaaggagatttccaaaatccaggggatcaagagcttctttcatcggaagaaaactactacagcacttcttacagccagtcagatagtcagtgtggttctcctccaaggggttggtcagaagagttggatgaacgtgggcataccttatataccagtgactatactaatgaaaagtggctcaagcatgttgatgatcaaggtagacaatattactacagtgcagacggatctcggtcagaatgggaattgccaaagtataatgcttcatcccagcagcaaagagaaataattaaaagtaggagcctggacaggcggctgcaagaaccaatagtattaacaaagtggagacatagcaccattgtattggacactaatgataaggaatctccaactgcctcaaaaccctgctttcctgaaaatgagtcttctccctcctcaccaaagcaccaagatacagccagcagtccaaaggatcaagagaaatatggattattaaatgtaacaaaaattgctgaaaatgggaaaaaggttcgaaagaactggttgtcttcttgggcggtgttgcagggttcatctttactttttaccaaaactcaaggaagtagcacaagttggtttggcagtaatcagtccaaaccagagttcacagtggacctcaagggggcaacaattgagatggcttcaaaggataaatccagcaaaaagaatgtatttgagctgaaaactcgtcaaggaacagaactgctaattcagtctgacaatgacactgttattaatgattggtttaaagttcttagtagtacaatcaataatcaggcagtagaaactgatgaaggaattgaagaggagataccggattcaccaggaatagaaaagcatgataaagaaaaggaacaaaaggatcccaaaaagcttcgttcctttaaagtatctagcatagattcttcagaacagaaaaaaaccaagaaaaacttaaagaagtttcttacacgacgccccactttgcaagctgttcgtgaaaaaggttatattaaagatcaggtatttggatccaatctcgctaatctgtgtcagagagagaatggcacagtaccaaagtttgtgaagttatgtattgaacatgttgaagaacatggtttggatattgatgggatatacagagtaagtggcaacctcgcagtgatccagaaactaaggtttgcagtcaatcatgatgagaaattggacttgaatgacagtaaatgggaagatattcatgtcattactggagccctcaaaatgttttttcgagaattaccagaacctctttttacatttaatcattttaatgattttgttaatgcaattaagcaagaaccaagacagcgagtcgctgctgttaaggacctaatcagacagttgccaaagccaaaccaagacacaatgcagattcttttccgacatctcagaagagttatagaaaatggagagaaaaatcgaatgacctatcagagtatagcaattgtttttggtcccactctattaaaaccagaaaaagagactggtaatatagcagttcatactgtgtaccagaatcagattgtagaattaattcttctggaactgagttccatcttcggacgttgattcttactgaagacaacctgtggaatagaagctggattccatcagatttcaaatgtttatacacaatgtattttattttttggaccaagcagtgactctttgattttgcactttttttttgagggatcagaagggaaggggagagtcgagatgtgtgttaggccctcatatttgctgctttgttgcaagttgatataactgcgtgtaattatgaattcattttatcctgaatgtttgcatttcatactctgaatttcagtaaaaatcaaaacttaaaattctaaccagtcatatacactggataatttggtaagaaaactgtattttttttccctgaaattggataatgtactttcttctcaagattcatgacttgatagaacaatactttcagttatgttgcaaaggctcttgggcattttaaacaaaatgaagtatatccattttgaaacctgtgtatttctttttcggggtttctgcatgcagtggcagtcttaagtgccaaaattcattataaccccaaaataaccccttgatgaaggcttgctgtcttttactgtgttacacagcatccttactggatatcttagttgcttgtttgggcagcacactaatattacttaaaacactgtgatatactggagttttagttagcggaagtcagttcagggcattttagggctgtcttgctatactgaattgtagctaacaatcctaattatatctagtaccatactgagttattggtatgaccctgtggaaacacacattattttatgtaaatataggctaaagacttaatgtcctttagcttgtgtatataattgtgttgtatagtctcagagtacattctaaccctacatttctaatcattgttattggtaatcttttctgtgaatattaggtttcctccagaaatagtccgttatttgggaaagttaactgtgtgcacttttagatattaactacatttacaggcaaatcactgtaatgagaatggtactggaaaaatactgaatagacttgctaaatggcacatgcactacaagaggaaccttttgggttatttaatatgtacagaaaacattagaaaaaatttattacagaattctaattccagtatgaatagtggaaacccatctgtaaattagatggatgttggatggaaaatgacattgctaaatttgagaatttctttttacctactaatgtagattgctttgtataataaaacacagggtttggaaggttttgttacagggagcatggtctgttgaagatttttaaaatgtatttttctagattaacttctgtacatgaaatgtctaataaaactataagaggtttagaga

SEQ ID NO: 175660 - DNA, 4958 bp, Homo sapiens
  Payload ID: 14503
  Gene Symbol: ARHGAP12
  Gene Name: Rho GTPase activating protein 12
  ENST ID: ENST00000375245
  CDS Start-End: 305-2704
gtcacgtgagccccgcccccgcgccggcgcgctccgacgtgccctgtaacttaccctccctcagaggccagcctgcggggacgggccggccgcggccgtagccgtgtgaacgctcttcgggctcgcgtcgtcgacccgcagccgcggggcggactaagaagggagccgcctgctgcgaggccgccgggctcccggtttaaatgtgatactggtgtagatctccttgttctaagctatattcatccaacaagccataaagccataatgtggtataacatcctttttgagaggtgaatattattgaatgaaaatggctgacagaagtgggaagattattccaggacaagtgtatattgaggtggaatatgattatgaatatgaagcaaaggacagaaagattgtgataaaacaaggggagaggtacatcttggtgaaaaagaccaatgatgactggtggcaagtcaagccagatgaaaactccaaagcgttttatgtgccagcccagtatgtgaaggaggtcacgcgcaaagctctcatgccacctgttaagcaggtagctggtctgccaaataactccacgaaaataatgcagagtttgcatcttcagagatcaacagaaaatgtgaacaaattgcctgagctttcaagtttcggaaagccatcgtcatctgttcaaggaacaggtcttattcgtgatgccaatcagaattttggacccagttataatcaaggtcagactgtcaacctaagcctggacctgacccataataacggaaagtttaacaatgactcacattctcctaaagtttccagccagaataggacacgctcatttggtcattttcccggtccagagttcttggatgtagagaaaactagcttctcccaggaacaatcttgtgattccgcaggagaaggctctgaaagaatacatcaagattctgaatctggtgatgaacttagcagcagctccactgaacagataagggcaaccacacctccaaatcaaggaaggccagattctcctgtctatgctaaccttcaagaactgaaaatatcccagtctgctcttcccccacttcctgggagcccggcaattcagattaatggagaatgggaaactcataaagacagctcagggcgttgctattactataacagagggacacaggaaagaacttggaaacctcctcgttggactcgggatgcaagcatcagcaaaggagatttccaaaatccaggggatcaagagtggctcaagcatgttgatgatcaaggtagacaatattactacagtgcagacggatctcggtcagaatgggaattgccaaagtataatgcttcatcccagcagcaaagagaaataattaaaagtaggagcctggacaggcggctgcaagaaccaatagtattaacaaagtggagacatagcaccattgtattggacactaatgataaggaatctccaactgcctcaaaaccctgctttcctgaaaatgagtcttctccctcctcaccaaagcaccaagatacagccagcagtccaaaggatcaagagaaatatggattattaaatgtaacaaaaattgctgaaaatgggaaaaaggttcgaaagaactggttgtcttcttgggcggtgttgcagggttcatctttactttttaccaaaactcaaggaagtagcacaagttggtttggcagtaatcagtccaaaccagagttcacagtggacctcaagggggcaacaattgagatggcttcaaaggataaatccagcaaaaagaatgtatttgagctgaaaactcgtcaaggaacagaactgctaattcagtctgacaatgacactgttattaatgattggtttaaagttcttagtagtacaatcaataatcaggcagtagaaactgatgaaggaattgaagaggagataccggattcaccaggaatagaaaagcatgataaagaaaaggaacaaaaggatcccaaaaagcttcgttcctttaaagtatctagcatagattcttcagaacagaaaaaaaccaagaaaaacttaaagaagtttcttacacgacgccccactttgcaagctgttcgtgaaaaaggttatattaaagatcaggtatttggatccaatctcgctaatctgtgtcagagagagaatggcacagtaccaaagtttgtgaagttatgtattgaacatgttgaagaacatggtttggatattgatgggatatacagagtaagtggcaacctcgcagtgatccagaaactaaggtttgcagtcaatcatgatgagaaattggacttgaatgacagtaaatgggaagatattcatgtcattactggagccctcaaaatgttttttcgagaattaccagaacctctttttacatttaatcattttaatgattttgttaatgcaattaagcaagaaccaagacagcgagtcgctgctgttaaggacctaatcagacagttgccaaagccaaaccaagacacaatgcagattcttttccgacatctcagaagagttatagaaaatggagagaaaaatcgaatgacctatcagagtatagcaattgtttttggtcccactctattaaaaccagaaaaagagactggtaatatagcagttcatactgtgtaccagaatcagattgtagaattaattcttctggaactgagttccatcttcggacgttgattcttactgaagacaacctgtggaatagaagctggattccatcagatttcaaatgtttatacacaatgtattttattttttggaccaagcagtgactctttgattttgcactttttttttgagggatcagaagggaaggggagagtcgagatgtgtgttaggccctcatatttgctgctttgttgcaagttgatataactgcgtgtaattatgaattcattttatcctgaatgtttgcatttcatactctgaatttcagtaaaaatcaaaacttaaaattctaaccagtcatatacactggataatttggtaagaaaactgtattttttttccctgaaattggataatgtactttcttctcaagattcatgacttgatagaacaatactttcagttatgttgcaaaggctcttgggcattttaaacaaaatgaagtatatccattttgaaacctgtgtatttctttttcggggtttctgcatgcagtggcagtcttaagtgccaaaattcattataaccccaaaataaccccttgatgaaggcttgctgtcttttactgtgttacacagcatccttactggatatcttagttgcttgtttgggcagcacactaatattacttaaaacactgtgatatactggagttttagttagcggaagtcagttcagggcattttagggctgtcttgctatactgaattgtagctaacaatcctaattatatctagtaccatactgagttattggtatgaccctgtggaaacacacattattttatgtaaatataggctaaagacttaatgtcctttagcttgtgtatataattgtgttgtatagtctcagagtacattctaaccctacatttctaatcattgttattggtaatcttttctgtgaatattaggtttcctccagaaatagtccgttatttgggaaagttaactgtgtgcacttttagatattaactacatttacaggcaaatcactgtaatgagaatggtactggaaaaatactgaatagacttgctaaatggcacatgcactacaagaggaaccttttgggttatttaatatgtacagaaaacattagaaaaaatttattacagaattctaattccagtatgaatagtggaaacccatctgtaaattagatggatgttggatggaaaatgacattgctaaatttgagaatttctttttacctactaatgtagattgctttgtataataaaacacagggtttggaaggttttgttacagggagcatggtctgttgaagatttttaaaatgtatttttctagattaacttctgtacatgaaatgtctaataaaactataagaggtttagagatttttccattggaaatgtgcattttggtttctaatttttttgttttttcatttactggcatactgttatacctcatttttaaaaatcaactgaatccaatatttcctgtggcaaataacactttcctcatttcataccttttctcctctcttccatgccaacatttctccacccacaacgtacactttttatttctccatcaatatttgaaagcgagtgatttgtgaccaggatttttttttcttagggttgcatttataatttacagattgccttccttgggaacaagtatttttttgtatgatctgtctaaaaacctctcacctgaattttgtggtagaaagtctgtatttgttgttgtgagcgtgttaaattgataacaaaccaaactacttgatagctaaagcagattgtttcgggtggggagaaaaagccctaaatcagaatgtttatatttgcctaaagatgtccttaataatacaatatgctttagatcttgcttatttagtgattgtataccaggaaaacaattagactcaaatcagtgatgttcttgttcttggtgttcatgaacatatatcaaagattaaaattgtcctgtgtttcttgtttcaaggtacgtgtgtgtgtgtgtgtgtgtgtgtgtgtgtgtgtgtgaagtcttaaatgttttattagtctacagctaatcagtttattgtaatattgtatgtacagtgagattaatgtcttgcgttttcatcctttgtgaattaaaaattctcacttgttttgtaataacaaagctagtaatattttcctgtcttgacagcttggttttatagtagaaaatatattaaaagctgaaataaattatcagtggaattttatttgttagtaagtcttccttcataatgtcattg

SEQ ID NO: 175661 - DNA, 4914 bp, Homo sapiens
  Payload ID: 14503
  Gene Symbol: ARHGAP12
  Gene Name: Rho GTPase activating protein 12
  Uniprot ID: Q8IWW6
  ENST ID: ENST00000375250
  CDS Start-End: 243-2693
agaggccagcctgcggggacgggccggccgcggccgtagccgtgtgaacgctcttcgggctcgcgtcgtcgacccgcagccgcggggcggactaagaagggagccgcctgctgcgaggccgccgggctcccggtttaaatgtgatactggtgtagatctccttgttctaagctatattcatccaacaagccataaagccataatgtggtataacatcctttttgagaggtgaatattattgaatgaaaatggctgacagaagtgggaagattattccaggacaagtgtatattgaggtggaatatgattatgaatatgaagcaaaggacagaaagattgtgataaaacaaggggagaggtacatcttggtgaaaaagaccaatgatgactggtggcaagtcaagccagatgaaaactccaaagcgttttatgtgccagcccagtatgtgaaggaggtcacgcgcaaagctctcatgccacctgttaagcaggtagctggtctgccaaataactccacgaaaataatgcagagtttgcatcttcagagatcaacagaaaatgtgaacaaattgcctgagctttcaagtttcggaaagccatcgtcatctgttcaaggaacaggtcttattcgtgatgccaatcagaattttggacccagttataatcaaggtcagactgtcaacctaagcctggacctgacccataataacggaaagtttaacaatgactcacattctcctaaagtttccagccagaataggacacgctcatttggtcattttcccggtccagagttcttggatgtagagaaaactagcttctcccaggaacaatcttgtgattccgcaggagaaggctctgaaagaatacatcaagattctgaatctggtgatgaacttagcagcagctccactgaacagataagggcaaccacacctccaaatcaaggaaggccagattctcctgtctatgctaaccttcaagaactgaaaatatcccagtctgctcttcccccacttcctgggagcccggcaattcagattaatggagaatgggaaactcataaagacagctcagggcgttgctattactataacagagggacacaggaaagaacttggaaacctcctcgttggactcgggatgcaagcatcagcaaaggagatttccaaaatccaggggatcaagagcttctttcatcggaagaaaactactacagcacttcttacagccagtcagatagtcagtgtggttctcctccaaggggttggtcagaagagttggatgaacgtgggcataccttatataccagtgactatactaatgaaaagtggctcaagcatgttgatgatcaaggtagacaatattactacagtgcagacggatctcggtcagaatgggaattgccaaagtataatgcttcatcccagcagcaaagagaaataattaaaagtaggagcctggacaggcggctgcaagaaccaatagtattaacaaagtggagacatagcaccattgtattggacactaatgataaggatcaagagaaatatggattattaaatgtaacaaaaattgctgaaaatgggaaaaaggttcgaaagaactggttgtcttcttgggcggtgttgcagggttcatctttactttttaccaaaactcaaggaagtagcacaagttggtttggcagtaatcagtccaaaccagagttcacagtggacctcaagggggcaacaattgagatggcttcaaaggataaatccagcaaaaagaatgtatttgagctgaaaactcgtcaaggaacagaactgctaattcagtctgacaatgacactgttattaatgattggtttaaagttcttagtagtacaatcaataatcaggcagtagaaactgatgaaggaattgaagaggagataccggattcaccaggaatagaaaagcatgataaagaaaaggaacaaaaggatcccaaaaagcttcgttcctttaaagtatctagcatagattcttcagaacagaaaaaaaccaagaaaaacttaaagaagtttcttacacgacgccccactttgcaagctgttcgtgaaaaaggttatattaaagatcaggtatttggatccaatctcgctaatctgtgtcagagagagaatggcacagtaccaaagtttgtgaagttatgtattgaacatgttgaagaacatggtttggatattgatgggatatacagagtaagtggcaacctcgcagtgatccagaaactaaggtttgcagtcaatcatgatgagaaattggacttgaatgacagtaaatgggaagatattcatgtcattactggagccctcaaaatgttttttcgagaattaccagaacctctttttacatttaatcattttaatgattttgttaatgcaattaagcaagaaccaagacagcgagtcgctgctgttaaggacctaatcagacagttgccaaagccaaaccaagacacaatgcagattcttttccgacatctcagaagagttatagaaaatggagagaaaaatcgaatgacctatcagagtatagcaattgtttttggtcccactctattaaaaccagaaaaagagactggtaatatagcagttcatactgtgtaccagaatcagattgtagaattaattcttctggaactgagttccatcttcggacgttgattcttactgaagacaacctgtggaatagaagctggattccatcagatttcaaatgtttatacacaatgtattttattttttggaccaagcagtgactctttgattttgcactttttttttgagggatcagaagggaaggggagagtcgagatgtgtgttaggccctcatatttgctgctttgttgcaagttgatataactgcgtgtaattatgaattcattttatcctgaatgtttgcatttcatactctgaatttcagtaaaaatcaaaacttaaaattctaaccagtcatatacactggataatttggtaagaaaactgtattttttttccctgaaattggataatgtactttcttctcaagattcatgacttgatagaacaatactttcagttatgttgcaaaggctcttgggcattttaaacaaaatgaagtatatccattttgaaacctgtgtatttctttttcggggtttctgcatgcagtggcagtcttaagtgccaaaattcattataaccccaaaataaccccttgatgaaggcttgctgtcttttactgtgttacacagcatccttactggatatcttagttgcttgtttgggcagcacactaatattacttaaaacactgtgatatactggagttttagttagcggaagtcagttcagggcattttagggctgtcttgctatactgaattgtagctaacaatcctaattatatctagtaccatactgagttattggtatgaccctgtggaaacacacattattttatgtaaatataggctaaagacttaatgtcctttagcttgtgtatataattgtgttgtatagtctcagagtacattctaaccctacatttctaatcattgttattggtaatcttttctgtgaatattaggtttcctccagaaatagtccgttatttgggaaagttaactgtgtgcacttttagatattaactacatttacaggcaaatcactgtaatgagaatggtactggaaaaatactgaatagacttgctaaatggcacatgcactacaagaggaaccttttgggttatttaatatgtacagaaaacattagaaaaaatttattacagaattctaattccagtatgaatagtggaaacccatctgtaaattagatggatgttggatggaaaatgacattgctaaatttgagaatttctttttacctactaatgtagattgctttgtataataaaacacagggtttggaaggttttgttacagggagcatggtctgttgaagatttttaaaatgtatttttctagattaacttctgtacatgaaatgtctaataaaactataagaggtttagagatttttccattggaaatgtgcattttggtttctaatttttttgttttttcatttactggcatactgttatacctcatttttaaaaatcaactgaatccaatatttcctgtggcaaataacactttcctcatttcataccttttctcctctcttccatgccaacatttctccacccacaacgtacactttttatttctccatcaatatttgaaagcgagtgatttgtgaccaggatttttttttcttagggttgcatttataatttacagattgccttccttgggaacaagtatttttttgtatgatctgtctaaaaacctctcacctgaattttgtggtagaaagtctgtatttgttgttgtgagcgtgttaaattgataacaaaccaaactacttgatagctaaagcagattgtttcgggtggggagaaaaagccctaaatcagaatgtttatatttgcctaaagatgtccttaataatacaatatgctttagatcttgcttatttagtgattgtataccaggaaaacaattagactcaaatcagtgatgttcttgttcttggtgttcatgaacatatatcaaagattaaaattgtcctgtgtttcttgtttcaaggtacgtgtgtgtgtgtgtgtgtgtgtgtgtgtgtgtgtgtgaagtcttaaatgttttattagtctacagctaatcagtttattgtaatattgtatgtacagtgagattaatgtcttgcgttttcatcctttgtgaattaaaaattctcacttgttttgtaataacaaagctagtaatattttcctgtcttgacagcttggttttatagtagaaaatatattaaaagctgaaataaattatcagtggaatttta

SEQ ID NO: 175662 - DNA, 5084 bp, Homo sapiens
  Payload ID: 14503
  Gene Symbol: ARHGAP12
  Gene Name: Rho GTPase activating protein 12
  Uniprot ID: Q8IWW6
  ENST ID: ENST00000396144
  CDS Start-End: 305-2830
gtcacgtgagccccgcccccgcgccggcgcgctccgacgtgccctgtaacttaccctccctcagaggccagcctgcggggacgggccggccgcggccgtagccgtgtgaacgctcttcgggctcgcgtcgtcgacccgcagccgcggggcggactaagaagggagccgcctgctgcgaggccgccgggctcccggtttaaatgtgatactggtgtagatctccttgttctaagctatattcatccaacaagccataaagccataatgtggtataacatcctttttgagaggtgaatattattgaatgaaaatggctgacagaagtgggaagattattccaggacaagtgtatattgaggtggaatatgattatgaatatgaagcaaaggacagaaagattgtgataaaacaaggggagaggtacatcttggtgaaaaagaccaatgatgactggtggcaagtcaagccagatgaaaactccaaagcgttttatgtgccagcccagtatgtgaaggaggtcacgcgcaaagctctcatgccacctgttaagcaggtagctggtctgccaaataactccacgaaaataatgcagagtttgcatcttcagagatcaacagaaaatgtgaacaaattgcctgagctttcaagtttcggaaagccatcgtcatctgttcaaggaacaggtcttattcgtgatgccaatcagaattttggacccagttataatcaaggtcagactgtcaacctaagcctggacctgacccataataacggaaagtttaacaatgactcacattctcctaaagtttccagccagaataggacacgctcatttggtcattttcccggtccagagttcttggatgtagagaaaactagcttctcccaggaacaatcttgtgattccgcaggagaaggctctgaaagaatacatcaagattctgaatctggtgatgaacttagcagcagctccactgaacagataagggcaaccacacctccaaatcaaggaaggccagattctcctgtctatgctaaccttcaagaactgaaaatatcccagtctgctcttcccccacttcctgggagcccggcaattcagattaatggagaatgggaaactcataaagacagctcagggcgttgctattactataacagagggacacaggaaagaacttggaaacctcctcgttggactcgggatgcaagcatcagcaaaggagatttccaaaatccaggggatcaagagcttctttcatcggaagaaaactactacagcacttcttacagccagtcagatagtcagtgtggttctcctccaaggggttggtcagaagagttggatgaacgtgggcataccttatataccagtgactatactaatgaaaagtggctcaagcatgttgatgatcaaggtagacaatattactacagtgcagacggatctcggtcagaatgggaattgccaaagtataatgcttcatcccagcagcaaagagaaataattaaaagtaggagcctggacaggcggctgcaagaaccaatagtattaacaaagtggagacatagcaccattgtattggacactaatgataaggaatctccaactgcctcaaaaccctgctttcctgaaaatgagtcttctccctcctcaccaaagcaccaagatacagatcaagagaaatatggattattaaatgtaacaaaaattgctgaaaatgggaaaaaggttcgaaagaactggttgtcttcttgggcggtgttgcagggttcatctttactttttaccaaaactcaaggaagtagcacaagttggtttggcagtaatcagtccaaaccagagttcacagtggacctcaagggggcaacaattgagatggcttcaaaggataaatccagcaaaaagaatgtatttgagctgaaaactcgtcaaggaacagaactgctaattcagtctgacaatgacactgttattaatgattggtttaaagttcttagtagtacaatcaataatcaggcagtagaaactgatgaaggaattgaagaggagataccggattcaccaggaatagaaaagcatgataaagaaaaggaacaaaaggatcccaaaaagcttcgttcctttaaagtatctagcatagattcttcagaacagaaaaaaaccaagaaaaacttaaagaagtttcttacacgacgccccactttgcaagctgttcgtgaaaaaggttatattaaagatcaggtatttggatccaatctcgctaatctgtgtcagagagagaatggcacagtaccaaagtttgtgaagttatgtattgaacatgttgaagaacatggtttggatattgatgggatatacagagtaagtggcaacctcgcagtgatccagaaactaaggtttgcagtcaatcatgatgagaaattggacttgaatgacagtaaatgggaagatattcatgtcattactggagccctcaaaatgttttttcgagaattaccagaacctctttttacatttaatcattttaatgattttgttaatgcaattaagcaagaaccaagacagcgagtcgctgctgttaaggacctaatcagacagttgccaaagccaaaccaagacacaatgcagattcttttccgacatctcagaagagttatagaaaatggagagaaaaatcgaatgacctatcagagtatagcaattgtttttggtcccactctattaaaaccagaaaaagagactggtaatatagcagttcatactgtgtaccagaatcagattgtagaattaattcttctggaactgagttccatcttcggacgttgattcttactgaagacaacctgtggaatagaagctggattccatcagatttcaaatgtttatacacaatgtattttattttttggaccaagcagtgactctttgattttgcactttttttttgagggatcagaagggaaggggagagtcgagatgtgtgttaggccctcatatttgctgctttgttgcaagttgatataactgcgtgtaattatgaattcattttatcctgaatgtttgcatttcatactctgaatttcagtaaaaatcaaaacttaaaattctaaccagtcatatacactggataatttggtaagaaaactgtattttttttccctgaaattggataatgtactttcttctcaagattcatgacttgatagaacaatactttcagttatgttgcaaaggctcttgggcattttaaacaaaatgaagtatatccattttgaaacctgtgtatttctttttcggggtttctgcatgcagtggcagtcttaagtgccaaaattcattataaccccaaaataaccccttgatgaaggcttgctgtcttttactgtgttacacagcatccttactggatatcttagttgcttgtttgggcagcacactaatattacttaaaacactgtgatatactggagttttagttagcggaagtcagttcagggcattttagggctgtcttgctatactgaattgtagctaacaatcctaattatatctagtaccatactgagttattggtatgaccctgtggaaacacacattattttatgtaaatataggctaaagacttaatgtcctttagcttgtgtatataattgtgttgtatagtctcagagtacattctaaccctacatttctaatcattgttattggtaatcttttctgtgaatattaggtttcctccagaaatagtccgttatttgggaaagttaactgtgtgcacttttagatattaactacatttacaggcaaatcactgtaatgagaatggtactggaaaaatactgaatagacttgctaaatggcacatgcactacaagaggaaccttttgggttatttaatatgtacagaaaacattagaaaaaatttattacagaattctaattccagtatgaatagtggaaacccatctgtaaattagatggatgttggatggaaaatgacattgctaaatttgagaatttctttttacctactaatgtagattgctttgtataataaaacacagggtttggaaggttttgttacagggagcatggtctgttgaagatttttaaaatgtatttttctagattaacttctgtacatgaaatgtctaataaaactataagaggtttagagatttttccattggaaatgtgcattttggtttctaatttttttgttttttcatttactggcatactgttatacctcatttttaaaaatcaactgaatccaatatttcctgtggcaaataacactttcctcatttcataccttttctcctctcttccatgccaacatttctccacccacaacgtacactttttatttctccatcaatatttgaaagcgagtgatttgtgaccaggatttttttttcttagggttgcatttataatttacagattgccttccttgggaacaagtatttttttgtatgatctgtctaaaaacctctcacctgaattttgtggtagaaagtctgtatttgttgttgtgagcgtgttaaattgataacaaaccaaactacttgatagctaaagcagattgtttcgggtggggagaaaaagccctaaatcagaatgtttatatttgcctaaagatgtccttaataatacaatatgctttagatcttgcttatttagtgattgtataccaggaaaacaattagactcaaatcagtgatgttcttgttcttggtgttcatgaacatatatcaaagattaaaattgtcctgtgtttcttgtttcaaggtacgtgtgtgtgtgtgtgtgtgtgtgtgtgtgtgtgtgtgaagtcttaaatgttttattagtctacagctaatcagtttattgtaatattgtatgtacagtgagattaatgtcttgcgttttcatcctttgtgaattaaaaattctcacttgttttgtaataacaaagctagtaatattttcctgtcttgacagcttggttttatagtagaaaatatattaaaagctgaaataaattatcagtggaattttatttgttagtaagtcttccttcataatgtcattg

SEQ ID NO: 175663 - DNA, 586 bp, Homo sapiens
  Payload ID: 14503
  Gene Symbol: ARHGAP12
  Gene Name: Rho GTPase activating protein 12
  ENST ID: ENST00000454919
  CDS Start-End: 1-586
cagcacttcttacagccagtcagatagtcagtgtggttctcctccaaggggttggtcagaagagttggatgaacgtgggcataccttatataccagtgactatactaatgaaaagtggctcaagcatgttgatgatcaaggtagacaatattactacagtgcagacggatctcggtcagaatgggaattgccaaagtataatgcttcatcccagcagcaaagagaaataattaaaagtaggagcctggacaggcggctgcaagaaccaatagtattaacaaagtggagacatagcaccattgtattggacactaatgataaggaatctccaactgcctcaaaaccctgctttcctgaaaatgagtcttctccctcctcaccaaagcaccaagatacagatcaagagaaatatggattattaaatgtaacaaaaattgctgaaaatgggaaaaaggttcgaaagaactggttgtcttcttgggcggtgttgcagggttcatctttactttttaccaaaactcaaggaagtagcacaagttggtttggcagtaatcagtccaaaccagagttcacagtggacctcaag

SEQ ID NO: 175664 - DNA, 1775 bp, Homo sapiens
  Payload ID: 14504
  Gene Symbol: ARHGAP15
  Gene Name: Rho GTPase activating protein 15
  Uniprot ID: Q53QZ3
  ENST ID: ENST00000295095
  CDS Start-End: 168-1595
gcctttttcttcccccagtactgaaattaagcagcatccaacacaggcctactcttacgacatgtgactttactgttttccgtttttgttgaaagagtcattaacagttaggagttgatggcagtttcaataacaggtcattgccgagaaaaggatagcactataatatgcagaaatctacaaattctgatacttccgtggaaacactgaattctacccgccaaggcacaggagctgtgcaaatgagaatcaaaaatgccaacagccaccatgacaggctcagccaaagtaaatccatgatcctcaccgatgtcgggaaggtcactgaacctatatccagacacagaaggaatcattcacagcatatcttgaaagatgtcattcctccattggaacaactgatggttgaaaaagaaggttatctgcaaaaagctaaaattgcagatggaggaaagaaactaaggaaaaactggtctacttcctggattgttctttctagtcgaagaattgaattttacaaagaatccaagcaacaggctctgtccaatatgaaaactgggcacaaaccagaaagtgtggatttgtgtggagcacacattgaatgggccaaggaaaaatcgagcagaaagaatgtctttcagatcacaacagtatcaggaaatgagttccttctacagtcagatattgacttcatcatattggattggttccacgctatcaaaaatgcaattgacagattgccaaaggattcaagttgtccatcaagaaacctggaattattcaaaatccaaagatcctctagcactgaattgctaagtcactacgacagtgatataaaagaacagaaaccagagcacagaaaatctttaatgttcagactgcatcacagtgcttccgatacaagcgacaaaaatcgagttaaaagcagattaaagaagtttattacccgaagaccttccctgaaaactctgcaagaaaaaggacttattaaagatcaaatttttggctctcatctgcacaaagtgtgtgaacgtgaaaattccacagttccgtggtttgtaaagcaatgcattgaagctgttgagaaaagaggtctagatgttgatggaatatatcgagttagtggcaatctggcaacaatacagaagttaagatttattgtcaaccaagaagagaagctgaatttggacgacagccagtgggaggacatccacgttgtcaccggagcactgaagatgtttttccgggagctgcctgagccgctcttcccttacagtttctttgagcagtttgtggaagcgatcaaaaagcaagacaacaacacaagaattgaagctgtaaaatctcttgtacaaaaactccctccgccaaatcgtgacaccatgaaagtcctctttggacatctaactaagatagtggccaaagcctccaagaacctcatgtccacgcaaagcttggggattgtatttggacctacccttctgcgagctgaaaatgaaacaggaaacatggcgatccacatggtctaccagaaccagatagctgagctcatgctgagtgagtacagtaagatcttcggctcagaggaagactgacagacaagacaagctactgaatacgttcacatctgtcttgatgcctaatatttttacatttctgtaaacatatttctgaaatattttttgcctttcaagcgacagatgcctcattttgtgaaaacttaatgatgattttgtgtttaagttccaaacatttgaataaaataattgacaata

SEQ ID NO: 175665 - DNA, 2968 bp, Homo sapiens
  Payload ID: 14504
  Gene Symbol: ARHGAP15
  Gene Name: Rho GTPase activating protein 15
  ENST ID: ENST00000409869
  CDS Start-End: 178-594
attgaacaaagtattttgaggtgcatttgtgtgtgcttgatacttgctccttttgattcaggtcagaatattaaatataagctcagtttctacaactggtttggcagaaatcaaatccgagtttgtctacagtgattcagaggggaccaggcctttcgcgatggatagcactataatatgcagaaatctacaaattctgatacttccgtggaaacactgaattctacccgccaaggcacaggagctgtgcaaatgagaatcaaaaatgccaacagccaccatgacaggctcagccaaagtaaatccatgatcctcaccgatgtcgggaaggtcactgaacctatatccagacacagaaggaatcattcacagcatatcttgaaagatgtcattcctccattggaacaactgatggttgaaaaagaaggttatctgcaaaaagctaaaattgcagatggaggaaagaaactaaggaaaaactggtctacttcctggattgttctttctagtcgaagaattgaattttacaaagaatccaagcaacaggctctgtccaatatgagcttctgcttgatgtgttcaggaggcacctgaccatgttcatgggatttggcaaatctccatttttggttaaacaaaacccatttgatggattgcatcatagagaagaagctctgcaatttagaacatccattcatttattctctcaacagttaacaactcctaccaggtgtcatataatttttttctttttgttttgttttgtttttacattaggggcaacagaaatattcaaatgaatagtatatgatccctgctcttaaagtactcacaatatggtaaaagagacataattttgtataggtttattataataaaaccatgactaaagtgttaaaaaatattagacaacatgccatggaaccatagatttagctataggtagtctttttccagagaaactattgttgcaagtcatgttcagcttaggtatctctccttttgttcaaatattactgtttgatattattatatcaaatattattgagcatctcttatgtttaagtcactacgataggtgttctgaaagataaaaaatgaaccagactgaaacaaatagaaagtatggccttagattgagtatagtgaagaaatggatgttggtagttgtcctaaaatggcatgaacagagacatggcgtcgttttatgataactcaagagaagagtgtgattgcttccatttggacaggatttgaaatatattcatggaggaagtgacatttgagcacatttctgaaggatgtataggattttgatgtaaaagggggcaaaagatattttatgtactaataagagagtaattaatagtgaactatggaaaattctttttttgttgtttattttacagatgtatattgatctcttgccttcttccatgcactgtgtactagtcactgttcttgaaatgtttgaatgggggttccctgaggcctggagtgaatatttcctagtccagagtattttgtgtttcttctctaagttgcctgggagtgaggaacagctttagactaagttgcggaacagcattgtggaacagcaaacagtgtaatttggttagaaagtcagtgtggaaccggtttaggaaagactttgaacaggattgggagaagagatcatttcattctgtaggtaatgtggggtttttgtaaccaatatgaaatattctcaaattaagagagactcagagttttcagagacatgtttagggaactgatatatatatcagttgtctataaaattaagtctctcttaattttgtgtatatataacttaaaaacacatgcaggacttggtaaattatccgagagacatgttctaaaaatttatgcaaatagatgtgagcaataaggcctgagctcttacgacagagaaaattgtaaaacggctgtgtgtcatcattttggctcaatgcatttagtaaatcacaggacatcttttcactgacaaaatattttgatattctcatatgtctctgacctccaacagtatggccatttctaaagacgttctagtgcaaagagaacaagcagagctatccatctaaggagagcgaaaaacatgctgtcccaagaactaggtgtgtcaccatctcagtgagcacccgttgcaaacctactggtgcttccatctgactccagaacatctgtttagtgtcacaccctacttaaacaaatgcattgtgtgaagtctttccaccaacaatcagacgctgtggaactcattgtcaccaattgggtggatgagagccaccgtttctattatattcatcacacactgctcagaaaatttagtgtcacttttgatataaattcaaaaacattgtaaacattttagggaatattttccccctaaaatggtgtggttctaaagccagtatattcagtagaaagcctatatgttggttgtgtaagggacttttttgttactcttatgttttttattttacattgtactaatatgtatttttaatcagagccaacaactggcaatttttactttttaaaaattatatttttgggttttacatttaagtctttaatccatcttgagttaatttttgtatatggtgtaaggaaggggtccagtttcaattttctgcatatggttacccagttccccacatttattaaataaactataaaaactctagaatgaaatctaggcaataccattcaggacataggcacagacaaagattttatgatgaaaatgccaaaagcaattgtaataaaagcaaatggtgacaaatggggtctaattaaactaaagagcttccgcacagcaaaagtaactatcatcagagtgaacagacaactttcagaatgggagacaatttttgcaatctattcagctgacaaaattctaatatccagagtctataaggaacttaaacaaatgtacaagaaa

SEQ ID NO: 175666 - DNA, 345 bp, Homo sapiens
  Payload ID: 14504
  Gene Symbol: ARHGAP15
  Gene Name: Rho GTPase activating protein 15
  ENST ID: ENST00000419455
  CDS Start-End: 1-170
gtctagatgttgatggaatatatcgagttagtggcaatctggcaacaatacagaagttaagatttattgtcaaccaagtcgtttctggaataccagcccttctatcagaactggatggagacctgtggacacccctagtaagctgcagatttttcacagtggtcatttgacctccagagcaagccaataatttgtcacttcattaaactgaagagaagctgaatttggacgacagccagtgggaggacatccacgttgtcaccggagcactgaagatgtttttccgggagctgcctgagccgctcttcccttacagtttctttgagcagtttgtggaagcgatca

SEQ ID NO: 175667 - DNA, 3461 bp, Homo sapiens
  Payload ID: 14505
  Gene Symbol: ARHGAP17
  Gene Name: Rho GTPase activating protein 17
  Uniprot ID: Q68EM7
  ENST ID: ENST00000289968
  CDS Start-End: 71-2716
gtagtagctgccaggctgtcccccgccctgcccggcccgagccccgcgggccgccgccgccaccgccgccatgaagaagcagttcaaccgcatgaagcagctggctaaccagaccgtgggcagagctgagaaaacagaagtccttagtgaagatctattacagattgagagacgcctggacacggtgcggtcaatatgccaccattcccataagcgcttggtggcatgtttccagggccagcatggcaccgatgccgagaggagacacaaaaaactgcctctgacagctcttgctcaaaatatgcaagaagcatcgactcagctggaagactctctcctggggaagatgctggagacgtgtggagatgctgagaatcagctggctctcgagctctcccagcacgaagtctttgttgagaaggagatcgtggaccctctgtacggcatagctgaggtggagattcccaacatccagaagcagaggaagcagcttgcaagattggtgttagactgggattcagtcagagccaggtggaaccaagctcacaaatcctcaggaaccaactttcaggggcttccatcaaaaatagatactctaaaggaagagatggatgaagctggaaataaagtagaacagtgcaaggatcaacttgcagcagacatgtacaactttatggccaaagaaggggagtatggcaaattctttgttacgttattagaagcccaagcagattaccatagaaaagcattagcagtcttagaaaagaccctccccgaaatgcgagcccatcaagataagtgggcggaaaaaccagcctttgggactcccctagaagaacacctgaagaggagcgggcgcgagattgcgctgcccattgaagcctgtgtcatgctgcttctggagacaggcatgaaggaggagggccttttccgaattggggctggggcctccaagttaaagaagctgaaagctgctttggactgttctacttctcacctggatgagttctattcagacccccatgctgtagcaggtgctttaaaatcctatttacgggaattgcctgaacctttgatgacttttaatctgtatgaagaatggacacaagttgcaagtgtgcaggatcaagacaaaaaacttcaagacttgtggagaacatgtcagaagttgccaccacaaaattttgttaactttagatatttgatcaagttccttgcaaagcttgctcagaccagcgatgtgaataaaatgactcccagcaacattgcgattgtgttaggccctaacttgttatgggccagaaatgaaggaacacttgctgaaatggcagcagccacatccgtccatgtggttgcagtgattgaacccatcattcagcatgccgactggttcttccctgaagaggtggaatttaatgtatcagaagcatttgtacctctcaccaccccgagttctaatcactcattccacactggaaacgactctgactcggggaccctggagaggaagcggcctgctagcatggcggtgatggaaggagacttggtgaagaaggaaagctttggtgtgaagcttatggacttccaggcccaccggcggggtggcactctaaatagaaagcacatatcccccgctttccagccgccacttccgcccacagatggcagcaccgtggtgcccgctggcccagagccccctccccagagctctagggctgaaagcagctctgggggtgggactgtcccctcttccgcgggcatactggagcaggggccgagcccaggcgacggcagtcctcccaaaccgaaggaccctgtatctgcagctgtgccagcaccagggagaaacaacagtcagatagcatctggccaaaatcagccccaggcagctgctggctcccaccagctctccatgggccaacctcacaatgctgcagggcccagcccgcatacactgcgccgagctgttaaaaaacccgctccagcacccccgaaaccgggcaacccacctcctggccaccccgggggccagagttcttcaggaacatctcagcatccacccagtctgtcaccaaagccacccacccgaagcccctctcctcccacccagcacacgggccagcctccaggccagccctccgccccctcccagctctcagcaccccggaggtactccagcagcttgtctccaatccaagctcccaatcacccaccgccgcagccccctacgcaggccacgccactgatgcacaccaaacccaatagccagggccctcccaaccccatggcattgcccagtgagcatggacttgagcagccatctcacacccctccccagactccaacgccccccagtactccgcccctaggaaaacagaaccccagtctgccagctcctcagaccctggcagggggtaaccctgaaactgcacagccacatgctggaaccttaccgagaccgagaccagtaccaaagccaaggaaccggcccagcgtgcccccacccccccaacctcctggtgtccactcagctggggacagcagcctcaccaacacagcaccaacagcttccaagatagtaacagactccaattccagggtttcagaaccgcatcgcagcatctttcctgaaatgcactcagactcagccagcaaagacgtgcctggccgcatcctgctggatatagacaatgataccgagagcactgccctgtgaagaaagccctttcccagccctccaccacttccaccctggcgagtggagcaggggcaggcgaacctctttctttgcagaccgaacagtgaaaagctttcagtggaggacaaaggagggcctcactgtgcgggacctggccttctgcacggcccaaggagaacctggaggccaccactaaagctgaatgacctgtgtcttgaagaagttggctttctttacatgggaaggaaatcatgccaaaaaaatccaaaacaaagaagtacctggagtggagagagtattcctgctgaaacgcgcataggaagcttttgtccctgctgttaatgcgggcagcacctacagcaacttggaatgagtaagaagcagtgcgttaactatctatttaataaaatgcgctcattatgcaagtcgcctactctctgctacctggacgttcattcttatgtattaggagggaggctgcgctccttcagacttgctgcagaatcattttgtatcatgtatggtctgtgtctccccagtcccctcagaaccatgcccatggatggtgactgctggctctgtcacctcatcaaactggatgtgacccatgccgcctcgttggattgtcggaatgtagacagaaatgtactgttcttttttttttttttaaacaatgtaattgctacttgataaggaccgaacattattctagtttcatgtttaatttgaattaaatatattctgtggtttatatgaaaacttc

SEQ ID NO: 175668 - DNA, 3219 bp, Homo sapiens
  Payload ID: 14505
  Gene Symbol: ARHGAP17
  Gene Name: Rho GTPase activating protein 17
  Uniprot ID: Q68EM7
  ENST ID: ENST00000303665
  CDS Start-End: 71-2482
gtagtagctgccaggctgtcccccgccctgcccggcccgagccccgcgggccgccgccgccaccgccgccatgaagaagcagttcaaccgcatgaagcagctggctaaccagaccgtgggcagagctgagaaaacagaagtccttagtgaagatctattacagattgagagacgcctggacacggtgcggtcaatatgccaccattcccataagcgcttggtggcatgtttccagggccagcatggcaccgatgccgagaggagacacaaaaaactgcctctgacagctcttgctcaaaatatgcaagaagcatcgactcagctggaagactctctcctggggaagatgctggagacgtgtggagatgctgagaatcagctggctctcgagctctcccagcacgaagtctttgttgagaaggagatcgtggaccctctgtacggcatagctgaggtggagattcccaacatccagaagcagaggaagcagcttgcaagattggtgttagactgggattcagtcagagccaggtggaaccaagctcacaaatcctcaggaaccaactttcaggggcttccatcaaaaatagatactctaaaggaagagatggatgaagctggaaataaagtagaacagtgcaaggatcaacttgcagcagacatgtacaactttatggccaaagaaggggagtatggcaaattctttgttacgttattagaagcccaagcagattaccatagaaaagcattagcagtcttagaaaagaccctccccgaaatgcgagcccatcaagataagtgggcggaaaaaccagcctttgggactcccctagaagaacacctgaagaggagcgggcgcgagattgcgctgcccattgaagcctgtgtcatgctgcttctggagacaggcatgaaggaggagggccttttccgaattggggctggggcctccaagttaaagaagctgaaagctgctttggactgttctacttctcacctggatgagttctattcagacccccatgctgtagcaggtgctttaaaatcctatttacgggaattgcctgaacctttgatgacttttaatctgtatgaagaatggacacaagttgcaagtgtgcaggatcaagacaaaaaacttcaagacttgtggagaacatgtcagaagttgccaccacaaaattttgttaactttagatatttgatcaagttccttgcaaagcttgctcagaccagcgatgtgaataaaatgactcccagcaacattgcgattgtgttaggccctaacttgttatgggccagaaatgaaggaacacttgctgaaatggcagcagccacatccgtccatgtggttgcagtgattgaacccatcattcagcatgccgactggttcttccctgaagaggtggaatttaatgtatcagaagcatttgtacctctcaccaccccgagttctaatcactcattccacactggaaacgactctgactcggggaccctggagaggaagcggcctgctagcatggcggtgatggaaggagacttggtgaagaaggaaagtcctcccaaaccgaaggaccctgtatctgcagctgtgccagcaccagggagaaacaacagtcagatagcatctggccaaaatcagccccaggcagctgctggctcccaccagctctccatgggccaacctcacaatgctgcagggcccagcccgcatacactgcgccgagctgttaaaaaacccgctccagcacccccgaaaccgggcaacccacctcctggccaccccgggggccagagttcttcaggaacatctcagcatccacccagtctgtcaccaaagccacccacccgaagcccctctcctcccacccagcacacgggccagcctccaggccagccctccgccccctcccagctctcagcaccccggaggtactccagcagcttgtctccaatccaagctcccaatcacccaccgccgcagccccctacgcaggccacgccactgatgcacaccaaacccaatagccagggccctcccaaccccatggcattgcccagtgagcatggacttgagcagccatctcacacccctccccagactccaacgccccccagtactccgcccctaggaaaacagaaccccagtctgccagctcctcagaccctggcagggggtaaccctgaaactgcacagccacatgctggaaccttaccgagaccgagaccagtaccaaagccaaggaaccggcccagcgtgcccccacccccccaacctcctggtgtccactcagctggggacagcagcctcaccaacacagcaccaacagcttccaagatagtaacagactccaattccagggtttcagaaccgcatcgcagcatctttcctgaaatgcactcagactcagccagcaaagacgtgcctggccgcatcctgctggatatagacaatgataccgagagcactgccctgtgaagaaagccctttcccagccctccaccacttccaccctggcgagtggagcaggggcaggcgaacctctttctttgcagaccgaacagtgaaaagctttcagtggaggacaaaggagggcctcactgtgcgggacctggccttctgcacggcccaaggagaacctggaggccaccactaaagctgaatgacctgtgtcttgaagaagttggctttctttacatgggaaggaaatcatgccaaaaaaatccaaaacaaagaagtacctggagtggagagagtattcctgctgaaacgcgcataggaagcttttgtccctgctgttaatgcgggcagcacctacagcaacttggaatgagtaagaagcagtgcgttaactatctatttaataaaatgcgctcattatgcaagtcgcctactctctgctacctggacgttcattcttatgtattaggagggaggctgcgctccttcagacttgctgcagaatcattttgtatcatgtatggtctgtgtctccccagtcccctcagaaccatgcccatggatggtgactgctggctctgtcacctcatcaaactggatgtgacccatgccgcctcgttggattgtcggaatgtagacagaaatgtactgttcttttttttttttttaaacaatgtaattgctacttgataaggaccgaacattattctagtttcatgtttaatttgaattaaatatattctgtggtttatatg

SEQ ID NO: 175669 - DNA, 810 bp, Homo sapiens
  Payload ID: 14505
  Gene Symbol: ARHGAP17
  Gene Name: Rho GTPase activating protein 17
  ENST ID: ENST00000455311
  CDS Start-End: 178-810
gggaagcgatgtagtagctgccaggctgtcccccgccctgcccggcccgagccccgcgggccgccgccgccaccgccgccatgaagaagcagttcaaccgcatgaagcagctggctaaccagaccgtgggcaggaaaattaaagaaataatgctgagaggaaggtagacgtgtggtaatggcggctgatgtttcaaggaacagtttacaagcacatgataatttcttagctgagaaaacagaagtccttagtgaagatctattacagattgagagacgcctggacacggtgcggtcaatatgccaccattcccataagcgcttggtggcatgtttccagggccagcatggcaccgatgccgagaggagacacaaaaaactgcctctgacagctcttgctcaaaatatgcaagaagcatcgactcagctggaagactctctcctggggaagatgctggagacgtgtggagatgctgagaatcagctggctctcgagctctcccagcacgaagtctttgttgagaaggagatcgtggaccctctgtacggcatagctgaggtggagattcccaacatccagaagcagaggaagcagcttgcaagattggtgttagactgggattcagtcagagccaggtggaaccaagctcacaaatcctcaggaaccaactttcaggggcttccatcaaaaatagatactctaaaggaagagatggatgaagctggaaataaagtagaacagtgcaaggatcaacttgcagcagacatgtacaactttatggccaaagaaggggagtatggcaaattcttt

SEQ ID NO: 175670 - DNA, 645 bp, Homo sapiens
  Payload ID: 14505
  Gene Symbol: ARHGAP17
  Gene Name: Rho GTPase activating protein 17
  ENST ID: ENST00000571480
  CDS Start-End: 77-451
agcgatgtagtagctgccaggctgtcccccgccctgcccggcccgagccccgcgggccgccgccgccaccgccgccatgaagaagcagttcaaccgcatgaagcagctggctaaccagaccgtgggcagagctgagaaaacagaagtccttagtgaagatctattacagattgagagacgcctggacacggtgcggtcaatatgccaccattcccataagcgcttggtggcatgtttccagggccagcatggcaccgatgccgagaggagacacaaaaaactgcctctgacagctcttgctcaaaatatgcaagaagcatcgactcagctggaagactctctcctgggatgctggagacgtgtggagatgctgagaatcagctggctctcgagctctcccagcacgaagtctttgttgagaaggagatcgtggaccctctgtacggcatagctgaggtggagattcccaacatccagaagcagaggaagcagcttgcaagattggtgttagactgggattcagtcagagccaggtggaaccaagctcacaaatcctcaggaaccaactttcaggggcttccatcaaaaatagatactctaaaggaagagatggatgaagctggaaataaagtagaacagtgcaag

SEQ ID NO: 175671 - DNA, 1135 bp, Homo sapiens
  Payload ID: 14505
  Gene Symbol: ARHGAP17
  Gene Name: Rho GTPase activating protein 17
  ENST ID: ENST00000571406
  CDS Start-End: 1-287
cgccccccagtactccgcccctaggaaaacagaaccccagtctgccagctcctcagaccctggcagggggtaaccctgaaactgcacagccacatgctggaaccttaccgagaccgagaccagtaccaaagccaaggaaccggcccagcgtgcccccacccccccaacctcctggtgtccactcagctggggacagcagcctcaccaacacagcaccaacagcttccaagatagtaacagatgcccttcctagtgccctcacaggtggggaaggtttccaggactaagactccaattccagggtttcagaaccgcatcgcagcatctttcctgaaatgcactcagactcagccagcaaagacgtgcctggccgcatcctgctggatatagacaatgataccgagagcactgccctgtgaagaaagccctttcccagccctccaccacttccaccctggcgagtggagcaggggcaggcgaacctctttctttgcagaccgaacagtgaaaagctttcagtggaggacaaaggagggcctcactgtgcgggacctggccttctgcacggcccaaggagaacctggaggccaccactaaagctgaatgacctgtgtcttgaagaagttggctttctttacatgggaaggaaatcatgccaaaaaaatccaaaacaaagaagtacctggagtggagagagtattcctgctgaaacgcgcataggaagcttttgtccctgctgttaatgcgggcagcacctacagcaacttggaatgagtaagaagcagtgcgttaactatctatttaataaaatgcgctcattatgcaagtcgcctactctctgctacctggacgttcattcttatgtattaggagggaggctgcgctccttcagacttgctgcagaatcattttgtatcatgtatggtctgtgtctccccagtcccctcagaaccatgcccatggatggtgactgctggctctgtcacctcatcaaactggatgtgacccatgccgcctcgttggattgtcggaatgtagacagaaatgtactgttcttttttttttttttaaacaatgtaattgctacttgataaggaccgaacattattctagtttcatgtttaatttgaattaa

SEQ ID NO: 175672 - DNA, 1467 bp, Homo sapiens
  Payload ID: 14505
  Gene Symbol: ARHGAP17
  Gene Name: Rho GTPase activating protein 17
  ENST ID: ENST00000573765
  CDS Start-End: 1-706
taaaaaacccgctccagcacccccgaaaccgggcaacccacctcctggccaccccgggggccagagttcttcaggaacatctcagcatccacccagtctgtcaccaaagccacccacccgaagcccctctcctcccacccagcacacgggccagcctccaggccagccctccgccccctcccagctctcagcaccccggaggtactccagcagcttgtctccaatccaagctcccaatcacccaccgccgcagccccctacgcaggccacgccactgatgcacaccaaacccaatagccagggccctcccaaccccatggcattgcccagtgagcatggacttgagcagccatctcacacccctccccagactccaacgccccccagtactccgcccctaggaaaacagaaccccagtctgccagctcctcagaccctggcagggggtaaccctgaaactgcacagccacatgctggaaccttaccgagaccgagaccagtaccaaagccaaggaaccggcccagcgtgcccccacccccccaacctcctggtgtccactcagctggggacagcagcctcaccaacacagcaccaacagcttccaagatagtaacagggtttcagaaccgcatcgcagcatctttcctgaaatgcactcagactcagccagcaaagacgtgcctggccgcatcctgctggatatagacaatgataccgagagcactgccctgtgaagaaagccctttcccagccctccaccacttccaccctggcgagtggagcaggggcaggcgaacctctttctttgcagaccgaacagtgaaaagctttcagtggaggacaaaggagggcctcactgtgcgggacctggccttctgcacggcccaaggagaacctggaggccaccactaaagctgaatgacctgtgtcttgaagaagttggctttctttacatgggaaggaaatcatgccaaaaaaatccaaaacaaagaagtacctggagtggagagagtattcctgctgaaacgcgcataggaagcttttgtccctgctgttaatgcgggcagcacctacagcaacttggaatgagtaagaagcagtgcgttaactatctatttaataaaatgcgctcattatgcaagtcgcctactctctgctacctggacgttcattcttatgtattaggagggaggctgcgctccttcagacttgctgcagaatcattttgtatcatgtatggtctgtgtctccccagtcccctcagaaccatgcccatggatggtgactgctggctctgtcacctcatcaaactggatgtgacccatgccgcctcgttggattgtcggaatgtagacagaaatgtactgttcttttttttttttttaaacaatgtaattgctacttgataaggaccgaacattattctagtttcatgtttaatttgaattaaatatattctgtggttt

SEQ ID NO: 175673 - DNA, 602 bp, Homo sapiens
  Payload ID: 14505
  Gene Symbol: ARHGAP17
  Gene Name: Rho GTPase activating protein 17
  ENST ID: ENST00000573625
  CDS Start-End: 40-255
ccggcccgagccccgcgggccgccgccgccaccgccgccatgaagaagcagttcaaccgcatgaagcagctggctaaccagaccgtgggcagagctgagaaaacagaagtccttagtgaagatctattacagattgagagacgcctggacacggtgcggtcaatatgccaccattcccataagcgcttggtggcatgtttccagggccagcatggcaccgatgccgagaggagacacgtatttaacctcctttagaaaggcagcataaccaaaagaaaaaactgcctctgacagctcttgctcaaaatatgcaagaagcatcgactcagctggaagactctctcctggggaagatgctggagacgtgtggagatgctgagaatcagctggctctcgagctctcccagcacgaagtctttgttgagaaggagatcgtggaccctctgtacggcatagctgaggtggagattcccaacatccagaagcagaggaagcagcttgcaagattggtgttagactgggattcagtcagagccaggtggaaccaagctcacaaatcctcaggaaccaactttcaggggcttccatcaaaaatagatact

SEQ ID NO: 175674 - DNA, 574 bp, Homo sapiens
  Payload ID: 14505
  Gene Symbol: ARHGAP17
  Gene Name: Rho GTPase activating protein 17
  ENST ID: ENST00000573449
  CDS Start-End: 345-574
aagtgctgagattacaacgttgaaccactgcgccctgctagaaacagcttttcatacgttgaaataaacgagagggtgaccgggcagcgttggggtcggggaggccaggcggaggaggcctagtggtcttctcgcccggggccttctagctcttcgcccgtgtcagagctgagaaaacagaagtccttagtgaagatctattacagattgagagacgcctggacacggtgcggtcaatatgccaccattcccataagcgcttggtggcatgtttccagggccagcatggcaccgatgccgagaggagacacaaaaaactgcctctgacagctcttgctcaaaatatgcaagaagcatcgactcagctggaagactctctcctggggaagatgctggagacgtgtggagatgctgagaatcagctggctctcgagctctcccagcacgaagtctttgttgagaaggagatcgtggaccctctgtacggcatagctgaggtggagattcccaacatccagaagcagaggaagcagcttgcaagattggtgttagactgggattcagtcagagccag

SEQ ID NO: 175675 - DNA, 1292 bp, Homo sapiens
  Payload ID: 14505
  Gene Symbol: ARHGAP17
  Gene Name: Rho GTPase activating protein 17
  ENST ID: ENST00000571843
  CDS Start-End: 1-385
cccaccgccgcagccccctacgcaggccacgccactgatgcacaccaaacccaatagccagggccctcccaaccccatggcattgcccagtgagcatggacttgagcagccatctcacacccctccccagactccaacgccccccagtactccgcccctaggaaaacagaaccccagtctgccagctcctcagaccctggcagggggtaaccctgaaactgcacagccacatgctggaaccttaccgagaccgagaccagtaccaaagccaaggaaccggcccagcgtgcccccacccccccaacctcctggtgtccactcagctggggacagcagcctcaccaacacagcaccaacagcttccaagatagtaacagatgtatgacctgccatattcagtaagaactgagattggaatatttaatgactccaattccagggtttcagaaccgcatcgcagcatctttcctgaaatgcactcagactcagccagcaaagacgtgcctggccgcatcctgctggatatagacaatgataccgagagcactgccctgtgaagaaagccctttcccagccctccaccacttccaccctggcgagtggagcaggggcaggcgaacctctttctttgcagaccgaacagtgaaaagctttcagtggaggacaaaggagggcctcactgtgcgggacctggccttctgcacggcccaaggagaacctggaggccaccactaaagctgaatgacctgtgtcttgaagaagttggctttctttacatgggaaggaaatcatgccaaaaaaatccaaaacaaagaagtacctggagtggagagagtattcctgctgaaacgcgcataggaagcttttgtccctgctgttaatgcgggcagcacctacagcaacttggaatgagtaagaagcagtgcgttaactatctatttaataaaatgcgctcattatgcaagtcgcctactctctgctacctggacgttcattcttatgtattaggagggaggctgcgctccttcagacttgctgcagaatcattttgtatcatgtatggtctgtgtctccccagtcccctcagaaccatgcccatggatggtgactgctggctctgtcacctcatcaaactggatgtgacccatgccgcctcgttggattgtcggaatgtagacagaaatgtactgttcttttttttttttttaaacaatgtaattgctacttgataaggaccgaacattattctagtttcatgtttaatttgaattaaatatattctgtggtttata

SEQ ID NO: 175676 - DNA, 4462 bp, Homo sapiens
  Payload ID: 14506
  Gene Symbol: ARHGAP18
  Gene Name: Rho GTPase activating protein 18
  Uniprot ID: Q8N392
  ENST ID: ENST00000368149
  CDS Start-End: 90-2081
aatgctaatgagcgagttgccaggcgagacaggaacttctttccccttctctgtgtcaggatcgcagaaagtatgtcccttctctcaccatgagctggctctccagttcccagggagtggtactaacagcctaccaccccagcggcaaggaccagaccgtcgggaacagccatgcaaaggcaggggaggaagccacctcgagtcgcagatatggccagtacactatgaaccaggaaagcaccaccatcaaagttatggagaagcctccatttgatcgatcaatttcccaggattctttggatgaactatctatggaagactattggatagaactagaaaacatcaagaaatctagtgaaaacagccaagaagatcaagaggtggttgttgtcaaagagcctgatgagggagaattggaagaagagtggcttaaagaggccggtttatccaatctcttcggagagtctgctggagatccacaggaaagcattgtgtttttatcaacattgacgcggacccaggcagcagcagttcagaagcgagtagagacggtctcccagaccttgaggaaaaaaaacaaacagtaccagattcctgacgtcagagacatatttgctcaacagagagaatcaaaagaaacagctccaggtggcactgaatcgcagtcacttagaacaaatgaaaacaaataccaaggaagagatgacgaggcatctaaccttgttggtgaagagaagctgatcccacctgaggagacgcctgcccctgaaacagacatcaacctggaggtatcatttgccgagcaagcactcaatcagaaagagagctccaaggagaaaatccagaagagcaaaggcgatgatgccacattacctagtttcagattgccaaaagacaaaacgggtaccacaaggattggtgacctcgcaccccaggacatgaagaaagtttgccatttagccctaattgagctgactgccctctatgatgtattgggtattgagctgaaacaacaaaaagctgtgaaaatcaaaacaaaagattctggtcttttttgcgttccattgacagcgctattagaacaagatcagaggaaagtaccaggaatgcgaatacccttgatctttcaaaaactgatttctcgaattgaagagagaggtttggaaacagaaggcctcttacggatccctggagctgccattagaatcaagaatctttgccaagaactagaagcaaagttttatgaagggacttttaattgggaaagtgtcaaacagcatgatgccgccagcctgctgaagctcttcattcgggagttgccccagccactgctcagtgtggagtatctcaaagcctttcaggctgtccagaatcttccaaccaagaagcagcaactacaggctttgaaccttcttgtcatcctcctacctgatgcaaacagggacacactgaaggcccttcttgaatttctccaaagagtaatagataataaagaaaaaaataaaatgacagtcatgaatgtagcaatggtcatggccccgaatctctttatgtgtcatgcattgggattgaagtccagtgaacagcgagaatttgtaatggcagctgggacagcaaataccatgcacttattgattaagtaccaaaaacttctgtggacaattcccaagtttattgtaaaccaagtgaggaagcaaaacacggaaaatcataaaaaggataaaagagccatgaagaaattgctgaagaaaatggcttatgaccgagaaaaatatgaaaagcaagataagagtacaaatgatgctgacgttcctcagggagtgattcgagtgcaagctccccatctttcgaaagtttccatggcaatacagctaactgaagaactaaaagccagtgatgtacttgccaggtttctcagccaagaaagtggggttgcccagactctcaagaaaggagaagtttttttgtatgaaattggaggaaatattggggaacgctgccttgatgatgacacttacatgaaggatttatatcagcttaacccaaatgctgagtgggttataaagtcaaagccattgtagaagacttaacaagctgcagataaccatgtggacttctgtcataattcttgctgagtcaagagtgtaaataaaagaaatggcaggactcatattattcagttgtacccaagtatttaaaaatgactctcttaagccttaaaaagtcatagatttgtgctgctgccagaattatattaattattattaatgttattattagaaaaaaaatttctggagtgagagtaaagaggcttaattagtttgtgggcagttttcatatgctctgtgaaatgtgtccagatgtgacatagtttttttttttaatatgtggaaatgtcttctcttcccattcttttctcctaaaatcatatatactgtaatatatgctctctcacctctattacctcctcacatctaccctttcccagttaggtttgctttttgaccaaaaagataacaaataccaggtatggcaagttgtgaagacagcacattaaaacatacctaatttcacagtattcctgtcacgacagaatgttagtattcatctctttgaatcatttgctcaaataataacattccaccttttcctgctgtatcacaggaagtgatttgcattttttttcagttcatctgacttatgttcacagaaccgtatcagcgaccaagaaaataggactgtcagaagctgccagttattactgaaccattaaatacttatatactaagaataaataaaatatacccatgtgaaataataattggattatggataacaagagagtgaaagccaaagcactttctgtctactgtactcttctaaatggaattttaaaagtcatagctggctttacgtgttgtcattattagcattataaatatgcatgatagtataatccagtaatggttgaagaatgtattttacttaaagagggatttttttttttaagtcctgaataagtctactggaagaattattcttctgggtgaaaaagcttttgtttgtgttcttattttaaataatcggagtcaatttattaaaatgttcttgaaagtactattcccagggattttaatgcacaaaccatattgtgacaagagatgagcctctgtactgtaaataagaaatgaagtagagaaatgttaaatattttatgagtttagaatatagtaaataaaaggtgatgtaaatgaatgctgcacaaacggtgttcatgatacttttagtagtactttaggaaaaactacacattctcagaagctcttgatgtctctaatgaagggggggaatgctgttaatgagaacagtcataaatttttagcatataattacaagaacagcctgtggatatgatcacttaaatgattttgtggtgattcgtgccattgcttttttatttaaaagaaaattttgtaattaaatgcctttttctaaattatcttctcttggaatcattacttttaatcctatgtgtttatgagtatttttgctttttttttattaatattgagaaatggacttttttgttattaaaagtcacctctattttctattttctttgtaatttttaaagtaggaagatgtcagagatgtaaatatgttttcgtctttagtttttttccttttacaaatttttattcttcaggattttcaaaatacagtttagtctgtttctttgacaatatgtattaatttcccaattagcaaaatggtacttattagtgggttgaaaacaattaataatataaaagaaaaattaagtgcttaaaacattttaggagtatacaacttcaaaaaaaaagatagcagtgaggataatgatttaagtaaaaggttgtctgaagcatatgccaactaaatttcgcaacgtttgctacctacctgaaaaggagggtcaggagggagacacaacatatttttgatcatgaaaaagtatcttaattttaaaaaagtgaaaatgccattttattttgaatcccttttagaactcacgacccaagttcatcaatgttgaataatatcacgtttaaataacaaaaaaatatggactttaaaaaatctcaaattttttagagacagggtcttgctctgttttccagattggagtacagcagtgcattcgcggctaactgcagcctcaagcactggggctcaagcaaacctcctgcctcagcctcgtgagtagctaggaccacaggtgcatgccaccatgcctggctctaaagagaaaaaaaacttgataccatagagccttgaatataaatatcctgatgttaacctactgcttttgctgtgattttttttccttagtgagttttaaatctcaggctagatttttatttgtttttctgtgtgtgtatgagacaaaataaaaataaatatatttgccttgagtttaaaa

SEQ ID NO: 175677 - DNA, 5390 bp, Homo sapiens
  Payload ID: 14507
  Gene Symbol: ARHGAP19
  Gene Name: Rho GTPase activating protein 19
  Uniprot ID: Q14CB8
  ENST ID: ENST00000358308
  CDS Start-End: 47-1444
ggggcgggacgtaaggtggggcggtgaaagaagtttgctgacgaagatggcgactgaggcacagagtgaaggggaggtgccagcccgcgaatccggccggagtgatgccatctgcagttttgtgatctgcaatgattcttcccttcgaggtcagcccattatctttaatcctgacttttttgtggagaaactccgacatgagaaacctgagattttcactgagttggtggtcagcaatatcacaaggctcatcgatttacctggaactgagttggctcagctgatgggggaagtggaccttaagttgcctggcggggctggcccagcatcaggattcttccggtctctcatgtctctcaagcgaaaggaaaaaggagtgatatttgggtccccactgacggaggaaggcattgcccagatataccaactgattgagtatctacacaaaaacttgcgagtagagggtttgtttagagtaccgggtaatagtgtccgacagcagattttaagggatgctctcaataatggaactgacattgacttggaatcaggggaatttcactcaaatgatgttgccactttgctgaagatgtttctaggagagttgccggagcctctgctgacacataaacacttcaatgcacacctcaaaatcgctgatttgatgcagtttgatgataaaggaaacaagaccaatataccagacaaggaccggcaaattgaggctctccagttgctcttcctcattctccctcctcctaatcgtaatttgctgaagttattgcttgatctcctataccagacagcaaagaaacaagacaagaacaagatgtcagcctataaccttgcccttatgtttgcaccccatgtcctgtggccaaaaaatgctcctgcttacattcgggagtgtgcgagattgcactatttgggatccagaactcaggcatcaaaggatgaccttgacctcatagcttcatgtcatactaagtcctttcagctggcaaagtctcagaaacggaaccgggtagattcctgccctcaccaggaggagacccagcaccatacggaagaggcactgagagagctgtttcaacacgttcatgatatgccagagtcagcaaagaagaaacaacttattagacagtttaataagcaatcattgacccagacaccagggcgagaaccttctacttcccaggtacaaaagagggctcgttcgcgctccttcagtgggcttattaagcggaaggtcctgggaaatcagatgatgtcagaaaagaaaaagaagaaccctactccagaatctgtggccattggtgaattgaagggaaccagcaaagaaaataggaacttattattttctggctctccagctgtcacgatgacaccaacaagattgaagtggtctgaagggaagaaagaggggaaaaaaggatttctctgaaggatccagagttgtctcctatggtccatgcagaattttctgtttagtgggcaggtgttattcctgcccacagcaaagcttggacttgcagcttgcttgctgcattttgaattgtcaaagccaactaataccgtgacccgactgatacctctaaccccactcactggatgatgtttgcaagctgtgccttctgagagagtgcttaggccctgtctctcttttttaatattatggggaaaccactaactatccaaccagcttatacagcacactaaggtgggcttcagtgctcactcaatgtgtttaggcagattccacttttgaaaaaaaatatgaaatgtgtgctcaactgccagtaattttttaaaaagcactgtcccagtggattgatgttgtttttaatggatattttgggtttttctctgttttgatagtattgggtatttggttgtttttgtttgtttatttctttgttttaaaagccatgtttttggttgggctctaagctagatatctttccctctttttcactttgagctttgggaaaactctttatcttatgaggctgtattcctcaatacctaatttgtgtccaaagaatttatagcttttctggacattttttattatttcttgggtgtgacatcagagtatttgacctgcagtattgaaaaaggagaattcagaatgatacagtattttaacaaatcttaattattaaactcttttccttccttccatttctccctcccttgtccatctctctctctctttccctttcctcagtgatgtgaaaataattgtgttttgctgaacttgttatcttcattcaatttcctcttgactaaaacatctctggtgccaacgtaatacttctgaaccaaatcactgtgactcaaggaaagtcactgacagcataagagaagtttgctaaaatatttgtatgtgggggaagctctggagtgtgcctaggagggggctggctgcctttatgtcccaggatgactctttatgggtgggattacattgcaccctctgagggtgcaggctagaccgtctcctgagaggaagttaggatcagaaagaagaagcaagcagcaacctctgcagggctgacaggatttaaaggagagaatgttcttatttggaagcagctgtggcttgtcaccaatgttcaaggagtgttactgttccgccctctctttgtcagaagggacacaggtggtaatttggagatggggccagagcttctggcttttggatttggtgtgttcacttgtgttggatagagcagtggcatggctttgacctagtatgaactggtgtctgcccagagagcagcatgtagcaggggggaatgctcaggtttgtgcctggctctgtggagctgtacaacccttctcaccctgtgggttggagccgagtcaggccactatggggaagcagttgccccacaaaatgtggtttgctgacctatttctaaactgttgaatatgctgcaccattgctgaaatgaaagatgactctgggggagcagagcttggccttgtgcccagctggcagccccctctgccagcctttctgctgcttttgctgctgtaacagcaatagtggagaaaaatgtaaaatttggtcttccagcttaatgcagtgtgaacaatagatggttaggaaaacaaaactgcttagaagcccctttctctagagcagttttatgtcatttgtaaaaacacatattagcaaattcgtttgcgtaggtttctattaaatatttgactttttttttcttattaagaaaatgaaatcccttacaccagatatcagttaattcaaacagaaaaccctttgggtatcaccaaattgaaatggtattcttccttaactcttccttctttcctttatttgtttagacgtgcttcatcccgaagtggtgctatggtctgttaaacagggctggcatcaggtagagggagcagagtggtgacctgatagctcctgtcatcgtgttagtttttgattctatttaagggaagtagctgagatttagacggatgtagatgctctttgggtgaatggaatcataagcaaaggttgtgttctggggtgaggatcatgagagagatatttatcacatgcacatgcctttatatagctggtctccttgggtggtttatgtgtgttttgtttatttattgaatatgttttcccttgctttaggggttttataggtcatttttcttaatagaagctgtgatcgacttagaatccaaatttgaggagtaagcagcataaccttctaccttgtaatatgtaactattctaatccagtggaatcttacggaaaacacagagaaaaccccttttatcatttgccacagaaggctgctgtctcccttctgatttggtgggcaggtattgtttttgagccagtatttaacagagttttttaatctataagattttttttgaatctatttcattgtgtttgtttttcatgttggaacaatctctctggaagtgcctcttcttgtggcttttacaacttcatttctttctggggtcacctgtgatgggctttgatgtggtgtcaatttggggccttgtgtttgtgccagagggatacacatattaaactgcaggccaccttcctggtccagactgtactgtgtgaaccccactgactaaattagtgagaaccataggcgttggaatttctcaccttttacaatgatagacttttgcattgggaccaatgaatctggtgtgaaaaaccctgctgtagtagtgaaagagcatcaggagatactgactgtacctgagggccaaaacaggagcaggtaacgaaccgtaaaaaaaggagcaggtaatgaatcgtaaccaaaactacagttgatcctccgcaaaggaaagctctttacccagaatgtccttccagagtcattcaggaaggacaagggaacacccttgggaaatgggctagtggagggctgttgactgcagtgacacctgggtgctccggaggtatctgttctgttgacctgtaaggaagcagtcgatcctagagtgtcagaacagagccattctctcctcctgagtaggaacgtttctgttcagtttccctcacagcagcctgtgttagcatgcagttgaaaatactgccgtctaggagaacctgtggtcactgggaacgtgccccacagtgactggccatgcaaccaggtgatttttaggaatagatgtctctagactctgtctcctttcctacaaggcctcacacagatgcttgaggctaatggcccccattctgaggtcatttttgtgtagaactcctttccccaggagagagccttatctctgccctcctttaccctgaaggcttcaaacggaagacaggacctagatctaaacctagatactagcattttgtgggattgtctagaatttggggaagatttgggttcctaagatgcacaagcgttttacaccagtggtgattaactcaactaaaacccactgtaggaagttagcttccccagacagctaatgccgagatcttctaccagcgtagagttgacagaagcaggccagcgaggaggtgtgggacataatagcctgagtgcttgggttaccatggagactggagtgtgtgaggccacagcctgtgctaaagagccatggagccctcccctggccatgtctggggacagatagaacctgttgggggaaatattccctcaccccagggttctttctgcagagcaagggttgcctttgtcctatccctgagcttgctcaacaagagaaacaaggtttcttaagtgttttggttaaagttttcattcttatttgactatgtatatgtaattgtaaagaaacgatcctatgcattgtctttcttttatattcttgtaatattctgaaattaaaattgttttgtttcatatcc

SEQ ID NO: 175678 - DNA, 5463 bp, Homo sapiens
  Payload ID: 14507
  Gene Symbol: ARHGAP19
  Gene Name: Rho GTPase activating protein 19
  Uniprot ID: Q14CB8
  ENST ID: ENST00000358531
  CDS Start-End: 30-1514
ggggcggtgaaagaagtttgctgacgaagatggcgactgaggcacagagtgaaggggaggtgccagcccgcgaatccggccggagtgatgccatctgcagttttgtgatctgcaatgattcttcccttcgaggtcagcccattatctttaatcctgacttttttgtggagaaactccgacatgagaaacctgagattttcactgagttggtggtcagcaatatcacaaggctcatcgatttacctggaactgagttggctcagctgatgggggaagtggaccttaagttgcctggcggggctggcccagcatcaggattcttccggtctctcatgtctctcaagcgaaaggaaaaaggagtgatatttgggtccccactgacggaggaaggcattgcccagatataccaactgattgagtatctacacaaaaacttgcgagtagagggtttgtttagagtaccgggtaatagtgtccgacagcagattttaagggatgctctcaataatggaactgacattgacttggaatcaggggaatttcactcaaatgatgttgccactttgctgaagatgtttctaggagagttgccggagcctctgctgacacataaacacttcaatgcacacctcaaaatcgctgatttgatgcagtttgatgataaaggaaacaagaccaatataccagacaaggaccggcaaattgaggctctccagttgctcttcctcattctccctcctcctaatcgtaatttgctgaagttattgcttgatctcctataccagacagcaaagaaacaagacaagaacaagatgtcagcctataaccttgcccttatgtttgcaccccatgtcctgtggccaaaaaatgtcactgcaaatgaccttcaggagaatatcacaaagttaaacagtgggatggcttttatgattaaacactcccagaaactttttaaggctcctgcttacattcgggagtgtgcgagattgcactatttgggatccagaactcaggcatcaaaggatgaccttgacctcatagcttcatgtcatactaagtcctttcagctggcaaagtctcagaaacggaaccgggtagattcctgccctcaccaggaggagacccagcaccatacggaagaggcactgagagagctgtttcaacacgttcatgatatgccagagtcagcaaagaagaaacaacttattagacagtttaataagcaatcattgacccagacaccagggcgagaaccttctacttcccaggtacaaaagagggctcgttcgcgctccttcagtgggcttattaagcggaaggtcctgggaaatcagatgatgtcagaaaagaaaaagaagaaccctactccagaatctgtggccattggtgaattgaagggaaccagcaaagaaaataggaacttattattttctggctctccagctgtcacgatgacaccaacaagattgaagtggtctgaagggaagaaagaggggaaaaaaggatttctctgaaggatccagagttgtctcctatggtccatgcagaattttctgtttagtgggcaggtgttattcctgcccacagcaaagcttggacttgcagcttgcttgctgcattttgaattgtcaaagccaactaataccgtgacccgactgatacctctaaccccactcactggatgatgtttgcaagctgtgccttctgagagagtgcttaggccctgtctctcttttttaatattatggggaaaccactaactatccaaccagcttatacagcacactaaggtgggcttcagtgctcactcaatgtgtttaggcagattccacttttgaaaaaaaatatgaaatgtgtgctcaactgccagtaattttttaaaaagcactgtcccagtggattgatgttgtttttaatggatattttgggtttttctctgttttgatagtattgggtatttggttgtttttgtttgtttatttctttgttttaaaagccatgtttttggttgggctctaagctagatatctttccctctttttcactttgagctttgggaaaactctttatcttatgaggctgtattcctcaatacctaatttgtgtccaaagaatttatagcttttctggacattttttattatttcttgggtgtgacatcagagtatttgacctgcagtattgaaaaaggagaattcagaatgatacagtattttaacaaatcttaattattaaactcttttccttccttccatttctccctcccttgtccatctctctctctctttccctttcctcagtgatgtgaaaataattgtgttttgctgaacttgttatcttcattcaatttcctcttgactaaaacatctctggtgccaacgtaatacttctgaaccaaatcactgtgactcaaggaaagtcactgacagcataagagaagtttgctaaaatatttgtatgtgggggaagctctggagtgtgcctaggagggggctggctgcctttatgtcccaggatgactctttatgggtgggattacattgcaccctctgagggtgcaggctagaccgtctcctgagaggaagttaggatcagaaagaagaagcaagcagcaacctctgcagggctgacaggatttaaaggagagaatgttcttatttggaagcagctgtggcttgtcaccaatgttcaaggagtgttactgttccgccctctctttgtcagaagggacacaggtggtaatttggagatggggccagagcttctggcttttggatttggtgtgttcacttgtgttggatagagcagtggcatggctttgacctagtatgaactggtgtctgcccagagagcagcatgtagcaggggggaatgctcaggtttgtgcctggctctgtggagctgtacaacccttctcaccctgtgggttggagccgagtcaggccactatggggaagcagttgccccacaaaatgtggtttgctgacctatttctaaactgttgaatatgctgcaccattgctgaaatgaaagatgactctgggggagcagagcttggccttgtgcccagctggcagccccctctgccagcctttctgctgcttttgctgctgtaacagcaatagtggagaaaaatgtaaaatttggtcttccagcttaatgcagtgtgaacaatagatggttaggaaaacaaaactgcttagaagcccctttctctagagcagttttatgtcatttgtaaaaacacatattagcaaattcgtttgcgtaggtttctattaaatatttgactttttttttcttattaagaaaatgaaatcccttacaccagatatcagttaattcaaacagaaaaccctttgggtatcaccaaattgaaatggtattcttccttaactcttccttctttcctttatttgtttagacgtgcttcatcccgaagtggtgctatggtctgttaaacagggctggcatcaggtagagggagcagagtggtgacctgatagctcctgtcatcgtgttagtttttgattctatttaagggaagtagctgagatttagacggatgtagatgctctttgggtgaatggaatcataagcaaaggttgtgttctggggtgaggatcatgagagagatatttatcacatgcacatgcctttatatagctggtctccttgggtggtttatgtgtgttttgtttatttattgaatatgttttcccttgctttaggggttttataggtcatttttcttaatagaagctgtgatcgacttagaatccaaatttgaggagtaagcagcataaccttctaccttgtaatatgtaactattctaatccagtggaatcttacggaaaacacagagaaaaccccttttatcatttgccacagaaggctgctgtctcccttctgatttggtgggcaggtattgtttttgagccagtatttaacagagttttttaatctataagattttttttgaatctatttcattgtgtttgtttttcatgttggaacaatctctctggaagtgcctcttcttgtggcttttacaacttcatttctttctggggtcacctgtgatgggctttgatgtggtgtcaatttggggccttgtgtttgtgccagagggatacacatattaaactgcaggccaccttcctggtccagactgtactgtgtgaaccccactgactaaattagtgagaaccataggcgttggaatttctcaccttttacaatgatagacttttgcattgggaccaatgaatctggtgtgaaaaaccctgctgtagtagtgaaagagcatcaggagatactgactgtacctgagggccaaaacaggagcaggtaacgaaccgtaaaaaaaggagcaggtaatgaatcgtaaccaaaactacagttgatcctccgcaaaggaaagctctttacccagaatgtccttccagagtcattcaggaaggacaagggaacacccttgggaaatgggctagtggagggctgttgactgcagtgacacctgggtgctccggaggtatctgttctgttgacctgtaaggaagcagtcgatcctagagtgtcagaacagagccattctctcctcctgagtaggaacgtttctgttcagtttccctcacagcagcctgtgttagcatgcagttgaaaatactgccgtctaggagaacctgtggtcactgggaacgtgccccacagtgactggccatgcaaccaggtgatttttaggaatagatgtctctagactctgtctcctttcctacaaggcctcacacagatgcttgaggctaatggcccccattctgaggtcatttttgtgtagaactcctttccccaggagagagccttatctctgccctcctttaccctgaaggcttcaaacggaagacaggacctagatctaaacctagatactagcattttgtgggattgtctagaatttggggaagatttgggttcctaagatgcacaagcgttttacaccagtggtgattaactcaactaaaacccactgtaggaagttagcttccccagacagctaatgccgagatcttctaccagcgtagagttgacagaagcaggccagcgaggaggtgtgggacataatagcctgagtgcttgggttaccatggagactggagtgtgtgaggccacagcctgtgctaaagagccatggagccctcccctggccatgtctggggacagatagaacctgttgggggaaatattccctcaccccagggttctttctgcagagcaagggttgcctttgtcctatccctgagcttgctcaacaagagaaacaaggtttcttaagtgttttggttaaagttttcattcttatttgactatgtatatgtaattgtaaagaaacgatcctatgcattgtctttcttttatattcttgtaatattctgaaattaaaattgttttgtttcatatccaga

SEQ ID NO: 175679 - DNA, 2301 bp, Homo sapiens
  Payload ID: 14507
  Gene Symbol: ARHGAP19
  Gene Name: Rho GTPase activating protein 19
  Uniprot ID: Q14CB8
  ENST ID: ENST00000371027
  CDS Start-End: 31-1488
aagctttcttcctgtctcttcgatttaccaatgcctcatcagaaactttcagcacttattgatgccatctgcagttttgtgatctgcaatgattcttcccttcgaggtcagcccattatctttaatcctgacttttttgtggagaaactccgacatgagaaacctgagattttcactgagttggtggtcagcaatatcacaaggctcatcgatttacctggaactgagttggctcagctgatgggggaagtggaccttaagttgcctggcggggctggcccagcatcaggattcttccggtctctcatgtctctcaagcgaaaggaaaaaggagtgatatttgggtccccactgacggaggaaggcattgcccagatataccaactgattgagtatctacacaaaaacttgcgagtagagggtttgtttagagtaccgggtaatagtgtccgacagcagattttaagggatgctctcaataatggaactgacattgacttggaatcaggggaatttcactcaaatgatgttgccactttgctgaagatgtttctaggagagttgccggagcctctgctgacacataaacacttcaatgcacacctcaaaatcgctgatttgatgcagtttgatgataaaggaaacaagaccaatataccagacaaggaccggcaaattgaggctctccagttgctcttcctcattctccctcctcctaatcgtaatttgctgaagttattgcttgatctcctataccagacagcaaagaaacaagacaagaacaagatgtcagcctataaccttgcccttatgtttgcaccccatgtcctgtggccaaaaaatgtcactgcaaatgaccttcaggagaatatcacaaagttaaacagtgggatggcttttatgattaaacactcccagaaactttttaaggctcctgcttacattcgggagtgtgcgagattgcactatttgggatccagaactcaggcatcaaaggatgaccttgacctcatagcttcatgtcatactaagtcctttcagctggcaaagtctcagaaacggaaccgggtagattcctgccctcaccaggaggagacccagcaccatacggaagaggcactgagagagctgtttcaacacgttcatgatatgccagagtcagcaaagaagaaacaacttattagacagtttaataagcaatcattgacccagacaccagggcgagaaccttctacttcccaggtacaaaagagggctcgttcgcgctccttcagtgggcttattaagcggaaggtcctgggaaatcagatgatgtcagaaaagaaaaagaagaaccctactccagaatctgtggccattggtgaattgaagggaaccagcaaagaaaataggaacttattattttctggctctccagctgtcacgatgacaccaacaagattgaagtggtctgaagggaagaaagaggggaaaaaaggatttctctgaaggatccagagttgtctcctatggtccatgcagaattttctgtttagtgggcaggtgttattcctgcccacagcaaagcttggacttgcagcttgcttgctgcattttgaattgtcaaagccaactaataccgtgacccgactgatacctctaaccccactcactggatgatgtttgcaagctgtgccttctgagagagtgcttaggccctgtctctcttttttaatattatggggaaaccactaactatccaaccagcttatacagcacactaaggtgggcttcagtgctcactcaatgtgtttaggcagattccacttttgaaaaaaaatatgaaatgtgtgctcaactgccagtaattttttaaaaagcactgtcccagtggattgatgttgtttttaatggatattttgggtttttctctgttttgatagtattgggtatttggttgtttttgtttgtttatttctttgttttaaaagccatgtttttggttgggctctaagctagatatctttccctctttttcactttgagctttgggaaaactctttatcttatgaggctgtattcctcaatacctaatttgtgtccaaagaatttatagcttttctggacattttttattatttcttgggtgtgacatcagagtatttgacctgcagtattgaaaaaggagaattcagaatgatacagtattttaacaaatcttaattattaaactcttttccttccttccatttctccctcccttgtccatctctctctctctttccctttcctcagtgatgtgaaaataattgtgttttgctg

SEQ ID NO: 175680 - DNA, 5525 bp, Homo sapiens
  Payload ID: 14507
  Gene Symbol: ARHGAP19
  Gene Name: Rho GTPase activating protein 19
  ENST ID: ENST00000492211
  CDS Start-End: 1-902
cgactgaggcacagagtgaaggggaggtgccagcccgcgaatccggccggagtgatgccatctgcagttttgtgatctgcaatgattcttcccttcgaggtcagcccattatctttaatcctgacttttttgtggagaaactccgacatgagaaacctgagattttcactgagttggtggtcagcaatatcacaaggctcatcgatttacctggaactgagttggctcagctgatgggggaagtggaccttaagttgcctggcggggctggcccagcatcaggattcttccggtctctcatgtctctcaagcgaaaggaaaaaggagtgatatttgggtccccactgacggaggaaggcattgcccagatataccaactgattgagtatctacacaaaaacttgcgagtagagggtttgtttagagtaccgggtaatagtgtccgacagcagattttaagggatgctctcaataatggaactgacattgacttggaatcaggggaatttcactcaaatgatgttgccactttgctgaagatgtttctaggagagttgccggagcctctgctgacacataaacacttcaatgcacacctcaaaatcgctgatttgatgcagtttgatgataaaggaaacaagaccaatataccagacaaggaccggcaaattgaggctctccagttgctcttcctcattctccctcctcctaatcgtaatttgctgaagttattgcttgatctcctataccagacagcaaagaaacaagacaagaacaagatgtcagcctataaccttgcccttatgtttgcaccccatgtcctgtggccaaaaaatggtctcgttttgttgcccacgctggaggagagtaacacaatcactactcactgtagcctcatctaaagtcttttaaacaacttgttgacctggaggtcactgcaaatgaccttcaggagaatatcacaaagttaaacagtgggatggcttttatgattaaacactcccagaaactttttaaggctcctgcttacattcgggagtgtgcgagattgcactatttgggatccagaactcaggcatcaaaggatgaccttgacctcatagcttcatgtcatactaagtcctttcagctggcaaagtctcagaaacggaaccgggtagattcctgccctcaccaggaggagacccagcaccatacggaagaggcactgagagagctgtttcaacacgttcatgatatgccagagtcagcaaagaagaaacaacttattagacagtttaataagcaatcattgacccagacaccagggcgagaaccttctacttcccaggtacaaaagagggctcgttcgcgctccttcagtgggcttattaagcggaaggtcctgggaaatcagatgatgtcagaaaagaaaaagaagaaccctactccagaatctgtggccattggtgaattgaagggaaccagcaaagaaaataggaacttattattttctggctctccagctgtcacgatgacaccaacaagattgaagtggtctgaagggaagaaagaggggaaaaaaggatttctctgaaggatccagagttgtctcctatggtccatgcagaattttctgtttagtgggcaggtgttattcctgcccacagcaaagcttggacttgcagcttgcttgctgcattttgaattgtcaaagccaactaataccgtgacccgactgatacctctaaccccactcactggatgatgtttgcaagctgtgccttctgagagagtgcttaggccctgtctctcttttttaatattatggggaaaccactaactatccaaccagcttatacagcacactaaggtgggcttcagtgctcactcaatgtgtttaggcagattccacttttgaaaaaaaatatgaaatgtgtgctcaactgccagtaattttttaaaaagcactgtcccagtggattgatgttgtttttaatggatattttgggtttttctctgttttgatagtattgggtatttggttgtttttgtttgtttatttctttgttttaaaagccatgtttttggttgggctctaagctagatatctttccctctttttcactttgagctttgggaaaactctttatcttatgaggctgtattcctcaatacctaatttgtgtccaaagaatttatagcttttctggacattttttattatttcttgggtgtgacatcagagtatttgacctgcagtattgaaaaaggagaattcagaatgatacagtattttaacaaatcttaattattaaactcttttccttccttccatttctccctcccttgtccatctctctctctctttccctttcctcagtgatgtgaaaataattgtgttttgctgaacttgttatcttcattcaatttcctcttgactaaaacatctctggtgccaacgtaatacttctgaaccaaatcactgtgactcaaggaaagtcactgacagcataagagaagtttgctaaaatatttgtatgtgggggaagctctggagtgtgcctaggagggggctggctgcctttatgtcccaggatgactctttatgggtgggattacattgcaccctctgagggtgcaggctagaccgtctcctgagaggaagttaggatcagaaagaagaagcaagcagcaacctctgcagggctgacaggatttaaaggagagaatgttcttatttggaagcagctgtggcttgtcaccaatgttcaaggagtgttactgttccgccctctctttgtcagaagggacacaggtggtaatttggagatggggccagagcttctggcttttggatttggtgtgttcacttgtgttggatagagcagtggcatggctttgacctagtatgaactggtgtctgcccagagagcagcatgtagcaggggggaatgctcaggtttgtgcctggctctgtggagctgtacaacccttctcaccctgtgggttggagccgagtcaggccactatggggaagcagttgccccacaaaatgtggtttgctgacctatttctaaactgttgaatatgctgcaccattgctgaaatgaaagatgactctgggggagcagagcttggccttgtgcccagctggcagccccctctgccagcctttctgctgcttttgctgctgtaacagcaatagtggagaaaaatgtaaaatttggtcttccagcttaatgcagtgtgaacaatagatggttaggaaaacaaaactgcttagaagcccctttctctagagcagttttatgtcatttgtaaaaacacatattagcaaattcgtttgcgtaggtttctattaaatatttgactttttttttcttattaagaaaatgaaatcccttacaccagatatcagttaattcaaacagaaaaccctttgggtatcaccaaattgaaatggtattcttccttaactcttccttctttcctttatttgtttagacgtgcttcatcccgaagtggtgctatggtctgttaaacagggctggcatcaggtagagggagcagagtggtgacctgatagctcctgtcatcgtgttagtttttgattctatttaagggaagtagctgagatttagacggatgtagatgctctttgggtgaatggaatcataagcaaaggttgtgttctggggtgaggatcatgagagagatatttatcacatgcacatgcctttatatagctggtctccttgggtggtttatgtgtgttttgtttatttattgaatatgttttcccttgctttaggggttttataggtcatttttcttaatagaagctgtgatcgacttagaatccaaatttgaggagtaagcagcataaccttctaccttgtaatatgtaactattctaatccagtggaatcttacggaaaacacagagaaaaccccttttatcatttgccacagaaggctgctgtctcccttctgatttggtgggcaggtattgtttttgagccagtatttaacagagttttttaatctataagattttttttgaatctatttcattgtgtttgtttttcatgttggaacaatctctctggaagtgcctcttcttgtggcttttacaacttcatttctttctggggtcacctgtgatgggctttgatgtggtgtcaatttggggccttgtgtttgtgccagagggatacacatattaaactgcaggccaccttcctggtccagactgtactgtgtgaaccccactgactaaattagtgagaaccataggcgttggaatttctcaccttttacaatgatagacttttgcattgggaccaatgaatctggtgtgaaaaaccctgctgtagtagtgaaagagcatcaggagatactgactgtacctgagggccaaaacaggagcaggtaacgaaccgtaaaaaaaggagcaggtaatgaatcgtaaccaaaactacagttgatcctccgcaaaggaaagctctttacccagaatgtccttccagagtcattcaggaaggacaagggaacacccttgggaaatgggctagtggagggctgttgactgcagtgacacctgggtgctccggaggtatctgttctgttgacctgtaaggaagcagtcgatcctagagtgtcagaacagagccattctctcctcctgagtaggaacgtttctgttcagtttccctcacagcagcctgtgttagcatgcagttgaaaatactgccgtctaggagaacctgtggtcactgggaacgtgccccacagtgactggccatgcaaccaggtgatttttaggaatagatgtctctagactctgtctcctttcctacaaggcctcacacagatgcttgaggctaatggcccccattctgaggtcatttttgtgtagaactcctttccccaggagagagccttatctctgccctcctttaccctgaaggcttcaaacggaagacaggacctagatctaaacctagatactagcattttgtgggattgtctagaatttggggaagatttgggttcctaagatgcacaagcgttttacaccagtggtgattaactcaactaaaacccactgtaggaagttagcttccccagacagctaatgccgagatcttctaccagcgtagagttgacagaagcaggccagcgaggaggtgtgggacataatagcctgagtgcttgggttaccatggagactggagtgtgtgaggccacagcctgtgctaaagagccatggagccctcccctggccatgtctggggacagatagaacctgttgggggaaatattccctcaccccagggttctttctgcagagcaagggttgcctttgtcctatccctgagcttgctcaacaagagaaacaaggtttcttaagtgttttggttaaagttttcattcttatttgactatgtatatgtaattgtaaagaaacgatcctatgcattgtctttcttttatattcttgtaatattctgaaattaaaattgttttgtttcatatccaga

SEQ ID NO: 175681 - DNA, 601 bp, Homo sapiens
  Payload ID: 14507
  Gene Symbol: ARHGAP19
  Gene Name: Rho GTPase activating protein 19
  ENST ID: ENST00000466484
  CDS Start-End: 9-601
tgacgaagatggcgactgaggcacagagtgaaggggaggtgccagcccgcgaatccggccggagtgatgccatctgcagttttgtgatctgcaatgattcttcccttcgagaaaaaggagtgatatttgggtccccactgacggaggaaggcattgcccagatataccaactgattgagtatctacacaaaaacttgcgagtagagggtttgtttagagtaccgggtaatagtgtccgacagcagattttaagggatgctctcaataatggaactgacattgacttggaatcaggggaatttcactcaaatgatgttgccactttgctgaagatgtttctaggagagttgccggagcctctgctgacacataaacacttcaatgcacacctcaaaatcgctgatttgatgcagtttgatgataaaggaaacaagaccaatataccagacaaggaccggcaaattgaggctctccagttgctcttcctcattctccctcctcctaatcgtaatttgctgaagttattgcttgatctcctataccagacagcaaagaaacaagacaagaacaagatgtcagcctataaccttgcccttatgtt

SEQ ID NO: 175682 - DNA, 6189 bp, Homo sapiens
  Payload ID: 14508
  Gene Symbol: ARHGAP20
  Gene Name: Rho GTPase activating protein 20
  Uniprot ID: Q9P2F6
  ENST ID: ENST00000260283
  CDS Start-End: 286-3861
gaggcgcgtgtccgtgcactagaggcccccgtgcgtgacacaggccgatgagctcctgcgggctgcacccacgcggagtcacagaccgaaaagcccgcggtgtcgagcgcaggcggaggtacatggccccgacgggaggcgcgcggcgagcacccggagctcggctccctgcctgagcacggcagccgcgcctccgcccgcgcgtcctcgcccctccggccggcagcccgcggacatgatcgtgtagcctcctcctgggctgggatttgtttgaagattttcttcatggaagcgatgtccccccagcaggagactctagggggacagccggggcgctcctcttccctgacaggagtgtctcggctcgcgggaggcagctgcaccaagaagaaaatgaaaacactagcagaaaggaggaggagcgctccatctcttatcctggataaagccctacaaaaacggcctactaccagggacagtccttctgctagtgttgacacatgcacatttctgtcatcattagtgtgctccaataggactctgctgattgatggccgggcagaactcaaaagaggcctccagaggcaggagcggcatcttttcctattcaatgatctgtttgttgtggccaaaatcaaatataacaataactttaagataaaaaataaaattaaattaactgatatgtggacagcaagctgtgtggatgaagtgggagaaggcaacaccaatgccatgaaatcctttgttttgggctggcccacagtgaactttgtggccactttcagttctccagaacaaaaggacaaatggctctctctccttcagagatacatcaatctagagaaagaaaaggactacccgaagagcattcccctcaaaatcttcgccaaggacattgggaattgtgcctactctaaaactataacagtaatgaattcagatacagcgaatgaagttatcaacatgtcattaccaatgctagggataactggctctgagagagattaccagttgtgggtcaattctggcaaagaagaggctccatacccactcattgggcatgaatatccatatggaattaaaatgagccatcttcgagactctgcactcctgacaccgggatcaaaggactctaccacccctttcaacctccaggagcccttccttatggaacagctcccccgagagatgcagtgccagttcatcctgaagcccagccgcctggctgcagcccagcaactgagtgattcaggtcataagacatttaaaaggagaagatctatcataaactgggccttctggcgaggttctagcactcacctggacaacttgccctcatcgccaacatcacctatgccaggacagctctttggaatttctctgccaaatatttgtgagaatgacaatctgcccaaacctgtcttggatatgcttttctttcttaatcaaaaaggacctctcaccaaaggtatcttcaggcaatcagccaatgtgaaatcctgcagagaactaaaagagaaattgaattctggagtcgaagtacacctagactgtgaatctatttttgtgatagcatctgtcttaaaggattttctgcgaaatattccaggaagtattttttcatcagatctctatgatcactgggtctctgtaatggatcaaggaaatgatgaagagaaaataaatactgttcaaaggctattagaccagcttccgagagccaatgttgttctcctaaggtatctttttggggtgttacacaacattgagcaacattcctcatccaatcagatgactgcatttaatttagctgtgtgtgtcgctccaagtattctttggcctcctgcttcctccagcccagaactagaaaacgaatttacaaaaaaggtttccctgcttatacaatttctgattgagaattgccttaggatatttggagaagaaatcacttccctcttcagagaggtttcagtgagatgtgacactagagagaatgcctcagatatttcttgctttcaactgaatgactcctcctatgacagcttggaaaatgagctaaatgaggatgttgatgcaccatgcagtgacttggtaaagaaacttggccaggggagcagaagcatggactctgtcttaaccctcagtgactatgatcttgaccagcccgaggtggaaggccttttaaccctaagcgactttgacttggcccattctaaagatgaagatgttcaaatgaaacggcctcttgaatccaagccggtgaacattttagtgtacacaaagatcccactgcgggatcatgccagggccccatctgccatgtgcacacccagctacctgtccacagctgcagcaaatgctgcaaaaagcctgaggcgacaccggcgttgctcagagcccagcatcgactatctggattcaaagctttcctacctcagggagttttatcagaaaaagctacgcaagtccagctgtgatgcaattctttctcaaaaagatgaagactatctgaagcagaatcaacccctccaggaggaaggaaagacatgttttaaacagagtttagtcacaggcactgatgtcagcaagaaaaatgccactactcaaaacactaagaagaaaagcttgtctggtagtgaaggaaatcacgtgaaacttttccctaagtctaagccagtggccatttctgtggcatcttatagtcctatgtcctcacaggatcattccaagaaccagccctttgatgtgaatacatctggatactccccaccacacacagcagatgccctcaagggtccaaggacacatcggcgctgctcagagcccaacatagaagaccagaaccgcaagctgacctatctcaggggaatttattcaaagaaacaacataaaaccagctgtgaagctggtctcttgcatggagaggaggattatctcaaacggcataagtctttgcaaatggaggggcagaagctcattaatcagagtttagtcatggggattgaggtgggcaagagtagtgccacaaaccaaaacactgagaaggttttacccccaagattaaacctttgcccaaggaccagctattccagcttatcctccccaggcacttccccatccggctcatcagtaagctcccaagacagtgctttttctcagatttctgaacactctgtgtttacacccactgagacttcctctccaatagattgcacttttcaggctcagagaaaacgggaagacctttctcctgactttagcaatgccagccatgtttccggaatgcccggtccctcatcagggcaggcttgcagccgcccagcctatacaaagaaggacaccatggagtggcattcacaaatgcattctgtaactcttcatcccagcacatggttgagaaatggtgtggccagtttgaaaaactggtccctcaaaaagaaagcaaaggcagccagaccagaggaagagaaaatagcttctccaaaaggacccttagagccacccccacatgcttctggtgttccagaagccaactcactgcaagaggaacaaaaagacttgcccttaagggcagctgaaggactgtcccctgtgcagtcagcccaaaggtgtagttcttctcccttccaggactcagagagacactgtagctctccattcagcctggtggagagcagacttaagctgtgcatgaagtcacatgaggaaatagagcctggtagtcagagctcttctggttctctgccttgggaaagagcctcagccagctcttggactctagaggatgcgaccagcccagactcagggcctacagtggtctgcgacattgaggacaggtatttaaccaaagacatttaagcatagtaagaatctgatgtccacaagaacaggaactgggttaataataatagacaataattattatgacccctttgtataagatacctgggagaggtagcataaggattatcattgctaatacttaggacaacgaaataattctctttattgagactacttgacaaatactttatgctaaaaattttgtcacctaagtgtttgggaggctttttcttattaaaggttgggattggtcctgtcatgtggttttagagatactaacagagggctagagaaagcatcttctgcagaggaagcacttatgggaacagtctgtgagattgatgtcctgagaagaccaagatatcaggaatgaggaataggggcctgaggagagaggggaagggtacagagaaaccatctacattccatggaatgtttttaataagtaggcaagaaaaatgccactaatcaaagcattaagtgtgtccagtaatgaagaacatcatataaaatctttccctaaatctaagccagtggccatttttgtgggatcttactaatcacgtgtccttacagaatcattccaagaaccagcccattgctacagctagagtggagaaaaacagagtgactcaaaagccatgggtaccatgatatcagttttgttggttgtatttgtcggtttgttttttcattcatgttgaagtgctttgcaaggcttcaggaaacagagttgtgaggagaaagaagaaaatggctgcccatttcagtaccctttcaaaggtatctctgcctaggaacattcttcagaaatgcaacttcttctatttagaaggtgacctcctgacagcgttcactctcaatatggaggaaaagaccacaacaactgtcctttctcaattacacaaatgctgttaaaatgtgatcaaaccatggcatcactttgctgaaatgtttctgcacagtcctgcctcttagattacagtcagccagaaaaacatacttataaatcatcccttttctgatttttgtagtttggcaattgagagagcaatattgaggttggccggttataaggagtcccacaatagaatacccaacaaagtggctgccaggccttctcagacagccatttgctttgggttttgcttccagacgttgttccatatttttgccccaaatgtttcatggcttataccccattggtttattttatatccatggacctttctttctctgctttcttgacttaaaggttgcagcagtacatctcgtcacctaggaatagattatcaggccttgccaactagtatgcagggatggcactaaaaatggatgtgcatcttctttcacattaactactaacctataagaagttgctctgagcccatttatttaaactctttagttcaccatcagatggacctttctctcacaagctagcttattccaaattatttgtcttattaatcaccagaaaatggtcatatcaaatgttctttcttttttgttctaaaggttgcattttcagttataggggaaaaaatattttctctaagatagaagaagttatttcagtattagctataggtgctacctacctcttggggacatggccctgtttgcgctaaccattacaatgatcttttagaactctgtatccaaagagctacttcgtgacactggccatctgagtcacagatgtgaagtcgatttcactttataactaaccagtcctacatattaagacttctaagtgtccatatgcatcttttttggtataatatataaagtcagcagggactcccctttcccttagggcatactactgtcagtcagaactgcaagatgtgaatgaagctcttaacggcttggagtgtctttctggaagaaattgccttttttttttttttcatgttagcaggtaaaaaatcattcacccaatttgaagcatagaagaaaatagttgctgaggttttttaataaccattcctactatctgtgttcccttagatactcctgtaattcttaatgtgaatagtttgttaatattgctgtaaagtattatattgtatgatttgaagacagactatatgtcattttattatactccatcaatctataatatattagactgatgctttatctaaaatgctttgagtttgtataatatatcttgacaaattttactaccatatgttatgtaataaatgtgtatttttgtacttgcagaaactgctgctaacttttaaagttgtttggttttcaaggcactgataatggatatgtatgaagtccatgctgtctgttaaataaaatgccattctgcagaattaaccatcc

SEQ ID NO: 175683 - DNA, 5998 bp, Homo sapiens
  Payload ID: 14508
  Gene Symbol: ARHGAP20
  Gene Name: Rho GTPase activating protein 20
  Uniprot ID: Q9P2F6
  ENST ID: ENST00000527598
  CDS Start-End: 215-3682
gtagccttctcaatagcttagccaaatttcggcgtcctcgctctgtctgcattttccttcattgctctttcacgtttggaatgcccccgtctctgcagcctgcagacagcggaaaccgcgggtgcaaatgtgcaggggccgctgacatgaccggctgcagaagcccactcagggttacccgaacaggctagcgttcgggattgcacaagagaaaatgaaaacactagcagaaaggaggaggagcgctccatctcttatcctggataaagccctacaaaaacggcctactaccagggacagtccttctgctagtgttgacacatgcacatttctgtcatcattagtgtgctccaataggactctgctgattgatggccgggcagaactcaaaagaggcctccagaggcaggagcggcatcttttcctattcaatgatctgtttgttgtggccaaaatcaaatataacaataactttaagataaaaaataaaattaaattaactgatatgtggacagcaagctgtgtggatgaagtgggagaaggcaacaccaatgccatgaaatcctttgttttgggctggcccacagtgaactttgtggccactttcagttctccagaacaaaaggacaaatggctctctctccttcagagatacatcaatctagagaaagaaaaggactacccgaagagcattcccctcaaaatcttcgccaaggacattgggaattgtgcctactctaaaactataacagtaatgaattcagatacagcgaatgaagttatcaacatgtcattaccaatgctagggataactggctctgagagagattaccagttgtgggtcaattctggcaaagaagaggctccatacccactcattgggcatgaatatccatatggaattaaaatgagccatcttcgagactctgcactcctgacaccgggatcaaaggactctaccacccctttcaacctccaggagcccttccttatggaacagctcccccgagagatgcagtgccagttcatcctgaagcccagccgcctggctgcagcccagcaactgagtgattcaggtcataagacatttaaaaggagaagatctatcataaactgggccttctggcgaggttctagcactcacctggacaacttgccctcatcgccaacatcacctatgccaggacagctctttggaatttctctgccaaatatttgtgagaatgacaatctgcccaaacctgtcttggatatgcttttctttcttaatcaaaaaggacctctcaccaaaggtatcttcaggcaatcagccaatgtgaaatcctgcagagaactaaaagagaaattgaattctggagtcgaagtacacctagactgtgaatctatttttgtgatagcatctgtcttaaaggattttctgcgaaatattccaggaagtattttttcatcagatctctatgatcactgggtctctgtaatggatcaaggaaatgatgaagagaaaataaatactgttcaaaggctattagaccagcttccgagagccaatgttgttctcctaaggtatctttttggggtgttacacaacattgagcaacattcctcatccaatcagatgactgcatttaatttagctgtgtgtgtcgctccaagtattctttggcctcctgcttcctccagcccagaactagaaaacgaatttacaaaaaaggtttccctgcttatacaatttctgattgagaattgccttaggatatttggagaagaaatcacttccctcttcagagaggtttcagtgagatgtgacactagagagaatgcctcagatatttcttgctttcaactgaatgactcctcctatgacagcttggaaaatgagctaaatgaggatgttgatgcaccatgcagtgacttggtaaagaaacttggccaggggagcagaagcatggactctgtcttaaccctcagtgactatgatcttgaccagcccgaggtggaaggccttttaaccctaagcgactttgacttggcccattctaaagatgaagatgttcaaatgaaacggcctcttgaatccaagccggtgaacattttagtgtacacaaagatcccactgcgggatcatgccagggccccatctgccatgtgcacacccagctacctgtccacagctgcagcaaatgctgcaaaaagcctgaggcgacaccggcgttgctcagagcccagcatcgactatctggattcaaagctttcctacctcagggagttttatcagaaaaagctacgcaagtccagctgtgatgcaattctttctcaaaaagatgaagactatctgaagcagaatcaacccctccaggaggaaggaaagacatgttttaaacagagtttagtcacaggcactgatgtcagcaagaaaaatgccactactcaaaacactaagaagaaaagcttgtctggtagtgaaggaaatcacgtgaaacttttccctaagtctaagccagtggccatttctgtggcatcttatagtcctatgtcctcacaggatcattccaagaaccagccctttgatgtgaatacatctggatactccccaccacacacagcagatgccctcaagggtccaaggacacatcggcgctgctcagagcccaacatagaagaccagaaccgcaagctgacctatctcaggggaatttattcaaagaaacaacataaaaccagctgtgaagctggtctcttgcatggagaggaggattatctcaaacggcataagtctttgcaaatggaggggcagaagctcattaatcagagtttagtcatggggattgaggtgggcaagagtagtgccacaaaccaaaacactgagaaggttttacccccaagattaaacctttgcccaaggaccagctattccagcttatcctccccaggcacttccccatccggctcatcagtaagctcccaagacagtgctttttctcagatttctgaacactctgtgtttacacccactgagacttcctctccaatagattgcacttttcaggctcagagaaaacgggaagacctttctcctgactttagcaatgccagccatgtttccggaatgcccggtccctcatcagggcaggcttgcagccgcccagcctatacaaagaaggacaccatggagtggcattcacaaatgcattctgtaactcttcatcccagcacatggttgagaaatggtgtggccagtttgaaaaactggtccctcaaaaagaaagcaaaggcagccagaccagaggaagagaaaatagcttctccaaaaggacccttagagccacccccacatgcttctggtgttccagaagccaactcactgcaagaggaacaaaaagacttgcccttaagggcagctgaaggactgtcccctgtgcagtcagcccaaaggtgtagttcttctcccttccaggactcagagagacactgtagctctccattcagcctggtggagagcagacttaagctgtgcatgaagtcacatgaggaaatagagcctggtagtcagagctcttctggttctctgccttgggaaagagcctcagccagctcttggactctagaggatgcgaccagcccagactcagggcctacagtggtctgcgacattgaggacaggtatttaaccaaagacatttaagcatagtaagaatctgatgtccacaagaacaggaactgggttaataataatagacaataattattatgacccctttgtataagatacctgggagaggtagcataaggattatcattgctaatacttaggacaacgaaataattctctttattgagactacttgacaaatactttatgctaaaaattttgtcacctaagtgtttgggaggctttttcttattaaaggttgggattggtcctgtcatgtggttttagagatactaacagagggctagagaaagcatcttctgcagaggaagcacttatgggaacagtctgtgagattgatgtcctgagaagaccaagatatcaggaatgaggaataggggcctgaggagagaggggaagggtacagagaaaccatctacattccatggaatgtttttaataagtaggcaagaaaaatgccactaatcaaagcattaagtgtgtccagtaatgaagaacatcatataaaatctttccctaaatctaagccagtggccatttttgtgggatcttactaatcacgtgtccttacagaatcattccaagaaccagcccattgctacagctagagtggagaaaaacagagtgactcaaaagccatgggtaccatgatatcagttttgttggttgtatttgtcggtttgttttttcattcatgttgaagtgctttgcaaggcttcaggaaacagagttgtgaggagaaagaagaaaatggctgcccatttcagtaccctttcaaaggtatctctgcctaggaacattcttcagaaatgcaacttcttctatttagaaggtgacctcctgacagcgttcactctcaatatggaggaaaagaccacaacaactgtcctttctcaattacacaaatgctgttaaaatgtgatcaaaccatggcatcactttgctgaaatgtttctgcacagtcctgcctcttagattacagtcagccagaaaaacatacttataaatcatcccttttctgatttttgtagtttggcaattgagagagcaatattgaggttggccggttataaggagtcccacaatagaatacccaacaaagtggctgccaggccttctcagacagccatttgctttgggttttgcttccagacgttgttccatatttttgccccaaatgtttcatggcttataccccattggtttattttatatccatggacctttctttctctgctttcttgacttaaaggttgcagcagtacatctcgtcacctaggaatagattatcaggccttgccaactagtatgcagggatggcactaaaaatggatgtgcatcttctttcacattaactactaacctataagaagttgctctgagcccatttatttaaactctttagttcaccatcagatggacctttctctcacaagctagcttattccaaattatttgtcttattaatcaccagaaaatggtcatatcaaatgttctttcttttttgttctaaaggttgcattttcagttataggggaaaaaatattttctctaagatagaagaagttatttcagtattagctataggtgctacctacctcttggggacatggccctgtttgcgctaaccattacaatgatcttttagaactctgtatccaaagagctacttcgtgacactggccatctgagtcacagatgtgaagtcgatttcactttataactaaccagtcctacatattaagacttctaagtgtccatatgcatcttttttggtataatatataaagtcagcagggactcccctttcccttagggcatactactgtcagtcagaactgcaagatgtgaatgaagctcttaacggcttggagtgtctttctggaagaaattgccttttttttttttttcatgttagcaggtaaaaaatcattcacccaatttgaagcatagaagaaaatagttgctgaggttttttaataaccattcctactatctgtgttcccttagatactcctgtaattcttaatgtgaatagtttgttaatattgctgtaaagtattatattgtatgatttgaagacagactatatgtcattttattatactccatcaatctataatatattagactgatgctttatctaaaatgctttgagtttgtataatatatcttgacaaattttactaccatatgttatgtaataaatgtgtatttttgtacttgcagaaactgctgctaacttttaaagttgtttggttttcaaggcactgataatggatatgtatgaagtccatgctgtctgttaaataaaatgccattctgcag

SEQ ID NO: 175684 - DNA, 6180 bp, Homo sapiens
  Payload ID: 14508
  Gene Symbol: ARHGAP20
  Gene Name: Rho GTPase activating protein 20
  Uniprot ID: Q9P2F6
  ENST ID: ENST00000524756
  CDS Start-End: 358-3864
acagcagcgcgctaggcggacgccgcgggaatttgacgctcgaggctcgcggcccctaatgagagtcccagaacacttcccgcccttgacggccagcggcagcgccgccgcctcccgcagagcgcccgcttctccgtttctagagccttagtctctcctcgagcgacctcgcagcctccctcccgtctccatccgccgccggttctgcagcccggctcctccctcagtctaggcgcgcgggctgtagtgggcgatcgcctttccccgacccctcgccgtgcccctgggcctcccgaagtggcctgggcgagcactgactgccctttggcggtgtcagccccaaagtcagggccggcgatgtctgcccgggagcggcagccggcgctgaagaagaaaatgaaaacactagcagaaaggaggaggagcgctccatctcttatcctggataaagccctacaaaaacggcctactaccagggacagtccttctgctagtgttgacacatgcacatttctgtcatcattagtgtgctccaataggactctgctgattgatggccgggcagaactcaaaagaggcctccagaggcaggagcggcatcttttcctattcaatgatctgtttgttgtggccaaaatcaaatataacaataactttaagataaaaaataaaattaaattaactgatatgtggacagcaagctgtgtggatgaagtgggagaaggcaacaccaatgccatgaaatcctttgttttgggctggcccacagtgaactttgtggccactttcagttctccagaacaaaaggacaaatggctctctctccttcagagatacatcaatctagagaaagaaaaggactacccgaagagcattcccctcaaaatcttcgccaaggacattgggaattgtgcctactctaaaactataacagtaatgaattcagatacagcgaatgaagttatcaacatgtcattaccaatgctagggataactggctctgagagagattaccagttgtgggtcaattctggcaaagaagaggctccatacccactcattgggcatgaatatccatatggaattaaaatgagccatcttcgagactctgcactcctgacaccgggatcaaaggactctaccacccctttcaacctccaggagcccttccttatggaacagctcccccgagagatgcagtgccagttcatcctgaagcccagccgcctggctgcagcccagcaactgagtgattcaggtcataagacatttaaaaggagaagatctatcataaactgggccttctggcgaggttctagcactcacctggacaacttgccctcatcgccaacatcacctatgccaggacagctctttggaatttctctgccaaatatttgtgagaatgacaatctgcccaaacctgtcttggatatgcttttctttcttaatcaaaaaggacctctcaccaaaggtatcttcaggcaatcagccaatgtgaaatcctgcagagaactaaaagagaaattgaattctggagtcgaagtacacctagactgtgaatctatttttgtgatagcatctgtcttaaaggattttctgcgaaatattccaggaagtattttttcatcagatctctatgatcactgggtctctgtaatggatcaaggaaatgatgaagagaaaataaatactgttcaaaggctattagaccagcttccgagagccaatgttgttctcctaaggtatctttttggggtgttacacaacattgagcaacattcctcatccaatcagatgactgcatttaatttagctgtgtgtgtcgctccaagtattctttggcctcctgcttcctccagcccagaactagaaaacgaatttacaaaaaaggtttccctgcttatacaatttctgattgagaattgccttaggatatttggagaagaaatcacttccctcttcagagaggtttcagtgagatgtgacactagagagaatgcctcagatatttcttgctttcaactgaatgactcctcctatgacagcttggaaaatgagctaaatgaggatgttgatgcaccatgcagtgacttggtaaagaaacttggccaggggagcagaagcatggactctgtcttaaccctcagtgactatgatcttgaccagcccgaggtggaaggccttttaaccctaagcgactttgacttggcccattctaaagatgaagatgttcaaatgaaacggcctcttgaatccaagccggtgaacattttagtgtacacaaagatcccactgcgggatcatgccagggccccatctgccatgtgcacacccagctacctgtccacagctgcagcaaatgctgcaaaaagcctgaggcgacaccggcgttgctcagagcccagcatcgactatctggattcaaagctttcctacctcagggagttttatcagaaaaagctacgcaagtccagctgtgatgcaattctttctcaaaaagatgaagactatctgaagcagaatcaacccctccaggaggaaggaaagacatgttttaaacagagtttagtcacaggcactgatgtcagcaagaaaaatgccactactcaaaacactaagaagaaaagcttgtctggtagtgaaggaaatcacgtgaaacttttccctaagtctaagccagtggccatttctgtggcatcttatagtcctatgtcctcacaggatcattccaagaaccagccctttgatgtgaatacatctggatactccccaccacacacagcagatgccctcaagggtccaaggacacatcggcgctgctcagagcccaacatagaagaccagaaccgcaagctgacctatctcaggggaatttattcaaagaaacaacataaaaccagctgtgaagctggtctcttgcatggagaggaggattatctcaaacggcataagtctttgcaaatggaggggcagaagctcattaatcagagtttagtcatggggattgaggtgggcaagagtagtgccacaaaccaaaacactgagaaggttttacccccaagattaaacctttgcccaaggaccagctattccagcttatcctccccaggcacttccccatccggctcatcagtaagctcccaagacagtgctttttctcagatttctgaacactctgtgtttacacccactgagacttcctctccaatagattgcacttttcaggctcagagaaaacgggaagacctttctcctgactttagcaatgccagccatgtttccggaatgcccggtccctcatcagggcaggcttgcagccgcccagcctatacaaagaaggacaccatggagtggcattcacaaatgcattctgtaactcttcatcccagcacatggttgagaaatggtgtggccagtttgaaaaactggtccctcaaaaagaaagcaaaggcagccagaccagaggaagagaaaatagcttctccaaaaggacccttagagccacccccacatgcttctggtgttccagaagccaactcactgcaagaggaacaaaaagacttgcccttaagggcagctgaaggactgtcccctgtgcagtcagcccaaaggtgtagttcttctcccttccaggactcagagagacactgtagctctccattcagcctggtggagagcagacttaagctgtgcatgaagtcacatgaggaaatagagcctggtagtcagagctcttctggttctctgccttgggaaagagcctcagccagctcttggactctagaggatgcgaccagcccagactcagggcctacagtggtctgcgacattgaggacaggtatttaaccaaagacatttaagcatagtaagaatctgatgtccacaagaacaggaactgggttaataataatagacaataattattatgacccctttgtataagatacctgggagaggtagcataaggattatcattgctaatacttaggacaacgaaataattctctttattgagactacttgacaaatactttatgctaaaaattttgtcacctaagtgtttgggaggctttttcttattaaaggttgggattggtcctgtcatgtggttttagagatactaacagagggctagagaaagcatcttctgcagaggaagcacttatgggaacagtctgtgagattgatgtcctgagaagaccaagatatcaggaatgaggaataggggcctgaggagagaggggaagggtacagagaaaccatctacattccatggaatgtttttaataagtaggcaagaaaaatgccactaatcaaagcattaagtgtgtccagtaatgaagaacatcatataaaatctttccctaaatctaagccagtggccatttttgtgggatcttactaatcacgtgtccttacagaatcattccaagaaccagcccattgctacagctagagtggagaaaaacagagtgactcaaaagccatgggtaccatgatatcagttttgttggttgtatttgtcggtttgttttttcattcatgttgaagtgctttgcaaggcttcaggaaacagagttgtgaggagaaagaagaaaatggctgcccatttcagtaccctttcaaaggtatctctgcctaggaacattcttcagaaatgcaacttcttctatttagaaggtgacctcctgacagcgttcactctcaatatggaggaaaagaccacaacaactgtcctttctcaattacacaaatgctgttaaaatgtgatcaaaccatggcatcactttgctgaaatgtttctgcacagtcctgcctcttagattacagtcagccagaaaaacatacttataaatcatcccttttctgatttttgtagtttggcaattgagagagcaatattgaggttggccggttataaggagtcccacaatagaatacccaacaaagtggctgccaggccttctcagacagccatttgctttgggttttgcttccagacgttgttccatatttttgccccaaatgtttcatggcttataccccattggtttattttatatccatggacctttctttctctgctttcttgacttaaaggttgcagcagtacatctcgtcacctaggaatagattatcaggccttgccaactagtatgcagggatggcactaaaaatggatgtgcatcttctttcacattaactactaacctataagaagttgctctgagcccatttatttaaactctttagttcaccatcagatggacctttctctcacaagctagcttattccaaattatttgtcttattaatcaccagaaaatggtcatatcaaatgttctttcttttttgttctaaaggttgcattttcagttataggggaaaaaatattttctctaagatagaagaagttatttcagtattagctataggtgctacctacctcttggggacatggccctgtttgcgctaaccattacaatgatcttttagaactctgtatccaaagagctacttcgtgacactggccatctgagtcacagatgtgaagtcgatttcactttataactaaccagtcctacatattaagacttctaagtgtccatatgcatcttttttggtataatatataaagtcagcagggactcccctttcccttagggcatactactgtcagtcagaactgcaagatgtgaatgaagctcttaacggcttggagtgtctttctggaagaaattgccttttttttttttttcatgttagcaggtaaaaaatcattcacccaatttgaagcatagaagaaaatagttgctgaggttttttaataaccattcctactatctgtgttcccttagatactcctgtaattcttaatgtgaatagtttgttaatattgctgtaaagtattatattgtatgatttgaagacagactatatgtcattttattatactccatcaatctataatatattagactgatgctttatctaaaatgctttgagtttgtataatatatcttgacaaattttactaccatatgttatgtaataaatgtgtatttttgtacttgcagaaactgctgctaacttttaaagttgtttggttttcaaggcactgataatggatatgtatgaagtccatgctgtctgttaaataaaatgccattctgcag

SEQ ID NO: 175685 - DNA, 5880 bp, Homo sapiens
  Payload ID: 14508
  Gene Symbol: ARHGAP20
  Gene Name: Rho GTPase activating protein 20
  Uniprot ID: Q9P2F6
  ENST ID: ENST00000528829
  CDS Start-End: 97-3564
gaggcgcgtgtccgtgcactagaggcccccgtgcgtgacacaggccgatgagctcctgcgggctgcacccacgcggagtcacagaccgaaaagaaaatgaaaacactagcagaaaggaggaggagcgctccatctcttatcctggataaagccctacaaaaacggcctactaccagggacagtccttctgctagtgttgacacatgcacatttctgtcatcattagtgtgctccaataggactctgctgattgatggccgggcagaactcaaaagaggcctccagaggcaggagcggcatcttttcctattcaatgatctgtttgttgtggccaaaatcaaatataacaataactttaagataaaaaataaaattaaattaactgatatgtggacagcaagctgtgtggatgaagtgggagaaggcaacaccaatgccatgaaatcctttgttttgggctggcccacagtgaactttgtggccactttcagttctccagaacaaaaggacaaatggctctctctccttcagagatacatcaatctagagaaagaaaaggactacccgaagagcattcccctcaaaatcttcgccaaggacattgggaattgtgcctactctaaaactataacagtaatgaattcagatacagcgaatgaagttatcaacatgtcattaccaatgctagggataactggctctgagagagattaccagttgtgggtcaattctggcaaagaagaggctccatacccactcattgggcatgaatatccatatggaattaaaatgagccatcttcgagactctgcactcctgacaccgggatcaaaggactctaccacccctttcaacctccaggagcccttccttatggaacagctcccccgagagatgcagtgccagttcatcctgaagcccagccgcctggctgcagcccagcaactgagtgattcaggtcataagacatttaaaaggagaagatctatcataaactgggccttctggcgaggttctagcactcacctggacaacttgccctcatcgccaacatcacctatgccaggacagctctttggaatttctctgccaaatatttgtgagaatgacaatctgcccaaacctgtcttggatatgcttttctttcttaatcaaaaaggacctctcaccaaaggtatcttcaggcaatcagccaatgtgaaatcctgcagagaactaaaagagaaattgaattctggagtcgaagtacacctagactgtgaatctatttttgtgatagcatctgtcttaaaggattttctgcgaaatattccaggaagtattttttcatcagatctctatgatcactgggtctctgtaatggatcaaggaaatgatgaagagaaaataaatactgttcaaaggctattagaccagcttccgagagccaatgttgttctcctaaggtatctttttggggtgttacacaacattgagcaacattcctcatccaatcagatgactgcatttaatttagctgtgtgtgtcgctccaagtattctttggcctcctgcttcctccagcccagaactagaaaacgaatttacaaaaaaggtttccctgcttatacaatttctgattgagaattgccttaggatatttggagaagaaatcacttccctcttcagagaggtttcagtgagatgtgacactagagagaatgcctcagatatttcttgctttcaactgaatgactcctcctatgacagcttggaaaatgagctaaatgaggatgttgatgcaccatgcagtgacttggtaaagaaacttggccaggggagcagaagcatggactctgtcttaaccctcagtgactatgatcttgaccagcccgaggtggaaggccttttaaccctaagcgactttgacttggcccattctaaagatgaagatgttcaaatgaaacggcctcttgaatccaagccggtgaacattttagtgtacacaaagatcccactgcgggatcatgccagggccccatctgccatgtgcacacccagctacctgtccacagctgcagcaaatgctgcaaaaagcctgaggcgacaccggcgttgctcagagcccagcatcgactatctggattcaaagctttcctacctcagggagttttatcagaaaaagctacgcaagtccagctgtgatgcaattctttctcaaaaagatgaagactatctgaagcagaatcaacccctccaggaggaaggaaagacatgttttaaacagagtttagtcacaggcactgatgtcagcaagaaaaatgccactactcaaaacactaagaagaaaagcttgtctggtagtgaaggaaatcacgtgaaacttttccctaagtctaagccagtggccatttctgtggcatcttatagtcctatgtcctcacaggatcattccaagaaccagccctttgatgtgaatacatctggatactccccaccacacacagcagatgccctcaagggtccaaggacacatcggcgctgctcagagcccaacatagaagaccagaaccgcaagctgacctatctcaggggaatttattcaaagaaacaacataaaaccagctgtgaagctggtctcttgcatggagaggaggattatctcaaacggcataagtctttgcaaatggaggggcagaagctcattaatcagagtttagtcatggggattgaggtgggcaagagtagtgccacaaaccaaaacactgagaaggttttacccccaagattaaacctttgcccaaggaccagctattccagcttatcctccccaggcacttccccatccggctcatcagtaagctcccaagacagtgctttttctcagatttctgaacactctgtgtttacacccactgagacttcctctccaatagattgcacttttcaggctcagagaaaacgggaagacctttctcctgactttagcaatgccagccatgtttccggaatgcccggtccctcatcagggcaggcttgcagccgcccagcctatacaaagaaggacaccatggagtggcattcacaaatgcattctgtaactcttcatcccagcacatggttgagaaatggtgtggccagtttgaaaaactggtccctcaaaaagaaagcaaaggcagccagaccagaggaagagaaaatagcttctccaaaaggacccttagagccacccccacatgcttctggtgttccagaagccaactcactgcaagaggaacaaaaagacttgcccttaagggcagctgaaggactgtcccctgtgcagtcagcccaaaggtgtagttcttctcccttccaggactcagagagacactgtagctctccattcagcctggtggagagcagacttaagctgtgcatgaagtcacatgaggaaatagagcctggtagtcagagctcttctggttctctgccttgggaaagagcctcagccagctcttggactctagaggatgcgaccagcccagactcagggcctacagtggtctgcgacattgaggacaggtatttaaccaaagacatttaagcatagtaagaatctgatgtccacaagaacaggaactgggttaataataatagacaataattattatgacccctttgtataagatacctgggagaggtagcataaggattatcattgctaatacttaggacaacgaaataattctctttattgagactacttgacaaatactttatgctaaaaattttgtcacctaagtgtttgggaggctttttcttattaaaggttgggattggtcctgtcatgtggttttagagatactaacagagggctagagaaagcatcttctgcagaggaagcacttatgggaacagtctgtgagattgatgtcctgagaagaccaagatatcaggaatgaggaataggggcctgaggagagaggggaagggtacagagaaaccatctacattccatggaatgtttttaataagtaggcaagaaaaatgccactaatcaaagcattaagtgtgtccagtaatgaagaacatcatataaaatctttccctaaatctaagccagtggccatttttgtgggatcttactaatcacgtgtccttacagaatcattccaagaaccagcccattgctacagctagagtggagaaaaacagagtgactcaaaagccatgggtaccatgatatcagttttgttggttgtatttgtcggtttgttttttcattcatgttgaagtgctttgcaaggcttcaggaaacagagttgtgaggagaaagaagaaaatggctgcccatttcagtaccctttcaaaggtatctctgcctaggaacattcttcagaaatgcaacttcttctatttagaaggtgacctcctgacagcgttcactctcaatatggaggaaaagaccacaacaactgtcctttctcaattacacaaatgctgttaaaatgtgatcaaaccatggcatcactttgctgaaatgtttctgcacagtcctgcctcttagattacagtcagccagaaaaacatacttataaatcatcccttttctgatttttgtagtttggcaattgagagagcaatattgaggttggccggttataaggagtcccacaatagaatacccaacaaagtggctgccaggccttctcagacagccatttgctttgggttttgcttccagacgttgttccatatttttgccccaaatgtttcatggcttataccccattggtttattttatatccatggacctttctttctctgctttcttgacttaaaggttgcagcagtacatctcgtcacctaggaatagattatcaggccttgccaactagtatgcagggatggcactaaaaatggatgtgcatcttctttcacattaactactaacctataagaagttgctctgagcccatttatttaaactctttagttcaccatcagatggacctttctctcacaagctagcttattccaaattatttgtcttattaatcaccagaaaatggtcatatcaaatgttctttcttttttgttctaaaggttgcattttcagttataggggaaaaaatattttctctaagatagaagaagttatttcagtattagctataggtgctacctacctcttggggacatggccctgtttgcgctaaccattacaatgatcttttagaactctgtatccaaagagctacttcgtgacactggccatctgagtcacagatgtgaagtcgatttcactttataactaaccagtcctacatattaagacttctaagtgtccatatgcatcttttttggtataatatataaagtcagcagggactcccctttcccttagggcatactactgtcagtcagaactgcaagatgtgaatgaagctcttaacggcttggagtgtctttctggaagaaattgccttttttttttttttcatgttagcaggtaaaaaatcattcacccaatttgaagcatagaagaaaatagttgctgaggttttttaataaccattcctactatctgtgttcccttagatactcctgtaattcttaatgtgaatagtttgttaatattgctgtaaagtattatattgtatgatttgaagacagactatatgtcattttattatactccatcaatctataatatattagactgatgctttatctaaaatgctttgagtttgtataatatatcttgacaaattttactaccatatgttatgtaataaatgtgtatttttgtacttgcagaaactgctgctaacttttaaagttgtttggttttcaaggcactgataatggatatgtatgaagtccatgctgtctgttaaataaaatgccattctgcag

SEQ ID NO: 175686 - DNA, 6066 bp, Homo sapiens
  Payload ID: 14508
  Gene Symbol: ARHGAP20
  Gene Name: Rho GTPase activating protein 20
  Uniprot ID: Q9P2F6
  ENST ID: ENST00000533353
  CDS Start-End: 253-3750
gtagccttctcaatagcttagccaaatttcggcgtcctcgctctgtctgcattttccttcattgctctttcacgtttggaatgcccccgtctctgcagcctgcagacagcggaaaccgcgggtgcaaatgtgcaggggccgctgacatgaccggctgcagaagcccactcagggttacccgaacaggctagcgttcgggattgcacaagagccaaatttgcctgtgaaataaagatagtagtatctacccggatgacattttggattataataaataagaaaatgaaaacactagcagaaaggaggaggagcgctccatctcttatcctggataaagccctacaaaaacggcctactaccagggacagtccttctgctagtgttgacacatgcacatttctgtcatcattagtgtgctccaataggactctgctgattgatggccgggcagaactcaaaagaggcctccagaggcaggagcggcatcttttcctattcaatgatctgtttgttgtggccaaaatcaaatataacaataactttaagataaaaaataaaattaaattaactgatatgtggacagcaagctgtgtggatgaagtgggagaaggcaacaccaatgccatgaaatcctttgttttgggctggcccacagtgaactttgtggccactttcagttctccagaacaaaaggacaaatggctctctctccttcagagatacatcaatctagagaaagaaaaggactacccgaagagcattcccctcaaaatcttcgccaaggacattgggaattgtgcctactctaaaactataacagtaatgaattcagatacagcgaatgaagttatcaacatgtcattaccaatgctagggataactggctctgagagagattaccagttgtgggtcaattctggcaaagaagaggctccatacccactcattgggcatgaatatccatatggaattaaaatgagccatcttcgagactctgcactcctgacaccgggatcaaaggactctaccacccctttcaacctccaggagcccttccttatggaacagctcccccgagagatgcagtgccagttcatcctgaagcccagccgcctggctgcagcccagcaactgagtgattcaggtcataagacatttaaaaggagaagatctatcataaactgggccttctggcgaggttctagcactcacctggacaacttgccctcatcgccaacatcacctatgccaggacagctctttggaatttctctgccaaatatttgtgagaatgacaatctgcccaaacctgtcttggatatgcttttctttcttaatcaaaaaggacctctcaccaaaggtatcttcaggcaatcagccaatgtgaaatcctgcagagaactaaaagagaaattgaattctggagtcgaagtacacctagactgtgaatctatttttgtgatagcatctgtcttaaaggattttctgcgaaatattccaggaagtattttttcatcagatctctatgatcactgggtctctgtaatggatcaaggaaatgatgaagagaaaataaatactgttcaaaggctattagaccagcttccgagagccaatgttgttctcctaaggtatctttttggggtgttacacaacattgagcaacattcctcatccaatcagatgactgcatttaatttagctgtgtgtgtcgctccaagtattctttggcctcctgcttcctccagcccagaactagaaaacgaatttacaaaaaaggtttccctgcttatacaatttctgattgagaattgccttaggatatttggagaagaaatcacttccctcttcagagaggtttcagtgagatgtgacactagagagaatgcctcagatatttcttgctttcaactgaatgactcctcctatgacagcttggaaaatgagctaaatgaggatgttgatgcaccatgcagtgacttggtaaagaaacttggccaggggagcagaagcatggactctgtcttaaccctcagtgactatgatcttgaccagcccgaggtggaaggccttttaaccctaagcgactttgacttggcccattctaaagatgaagatgttcaaatgaaacggcctcttgaatccaagccggtgaacattttagtgtacacaaagatcccactgcgggatcatgccagggccccatctgccatgtgcacacccagctacctgtccacagctgcagcaaatgctgcaaaaagcctgaggcgacaccggcgttgctcagagcccagcatcgactatctggattcaaagctttcctacctcagggagttttatcagaaaaagctacgcaagtccagctgtgatgcaattctttctcaaaaagatgaagactatctgaagcagaatcaacccctccaggaggaaggaaagacatgttttaaacagagtttagtcacaggcactgatgtcagcaagaaaaatgccactactcaaaacactaagaagaaaagcttgtctggtagtgaaggaaatcacgtgaaacttttccctaagtctaagccagtggccatttctgtggcatcttatagtcctatgtcctcacaggatcattccaagaaccagccctttgatgtgaatacatctggatactccccaccacacacagcagatgccctcaagggtccaaggacacatcggcgctgctcagagcccaacatagaagaccagaaccgcaagctgacctatctcaggggaatttattcaaagaaacaacataaaaccagctgtgaagctggtctcttgcatggagaggaggattatctcaaacggcataagtctttgcaaatggaggggcagaagctcattaatcagagtttagtcatggggattgaggtgggcaagagtagtgccacaaaccaaaacactgagaaggttttacccccaagattaaacctttgcccaaggaccagctattccagcttatcctccccaggcacttccccatccggctcatcagtaagctcccaagacagtgctttttctcagatttctgaacactctgtgtttacacccactgagacttcctctccaatagattgcacttttcaggctcagagaaaacgggaagacctttctcctgactttagcaatgccagccatgtttccggaatgcccggtccctcatcagggcaggcttgcagccgcccagcctatacaaagaaggacaccatggagtggcattcacaaatgcattctgtaactcttcatcccagcacatggttgagaaatggtgtggccagtttgaaaaactggtccctcaaaaagaaagcaaaggcagccagaccagaggaagagaaaatagcttctccaaaaggacccttagagccacccccacatgcttctggtgttccagaagccaactcactgcaagaggaacaaaaagacttgcccttaagggcagctgaaggactgtcccctgtgcagtcagcccaaaggtgtagttcttctcccttccaggactcagagagacactgtagctctccattcagcctggtggagagcagacttaagctgtgcatgaagtcacatgaggaaatagagcctggtagtcagagctcttctggttctctgccttgggaaagagcctcagccagctcttggactctagaggatgcgaccagcccagactcagggcctacagtggtctgcgacattgaggacaggtatttaaccaaagacatttaagcatagtaagaatctgatgtccacaagaacaggaactgggttaataataatagacaataattattatgacccctttgtataagatacctgggagaggtagcataaggattatcattgctaatacttaggacaacgaaataattctctttattgagactacttgacaaatactttatgctaaaaattttgtcacctaagtgtttgggaggctttttcttattaaaggttgggattggtcctgtcatgtggttttagagatactaacagagggctagagaaagcatcttctgcagaggaagcacttatgggaacagtctgtgagattgatgtcctgagaagaccaagatatcaggaatgaggaataggggcctgaggagagaggggaagggtacagagaaaccatctacattccatggaatgtttttaataagtaggcaagaaaaatgccactaatcaaagcattaagtgtgtccagtaatgaagaacatcatataaaatctttccctaaatctaagccagtggccatttttgtgggatcttactaatcacgtgtccttacagaatcattccaagaaccagcccattgctacagctagagtggagaaaaacagagtgactcaaaagccatgggtaccatgatatcagttttgttggttgtatttgtcggtttgttttttcattcatgttgaagtgctttgcaaggcttcaggaaacagagttgtgaggagaaagaagaaaatggctgcccatttcagtaccctttcaaaggtatctctgcctaggaacattcttcagaaatgcaacttcttctatttagaaggtgacctcctgacagcgttcactctcaatatggaggaaaagaccacaacaactgtcctttctcaattacacaaatgctgttaaaatgtgatcaaaccatggcatcactttgctgaaatgtttctgcacagtcctgcctcttagattacagtcagccagaaaaacatacttataaatcatcccttttctgatttttgtagtttggcaattgagagagcaatattgaggttggccggttataaggagtcccacaatagaatacccaacaaagtggctgccaggccttctcagacagccatttgctttgggttttgcttccagacgttgttccatatttttgccccaaatgtttcatggcttataccccattggtttattttatatccatggacctttctttctctgctttcttgacttaaaggttgcagcagtacatctcgtcacctaggaatagattatcaggccttgccaactagtatgcagggatggcactaaaaatggatgtgcatcttctttcacattaactactaacctataagaagttgctctgagcccatttatttaaactctttagttcaccatcagatggacctttctctcacaagctagcttattccaaattatttgtcttattaatcaccagaaaatggtcatatcaaatgttctttcttttttgttctaaaggttgcattttcagttataggggaaaaaatattttctctaagatagaagaagttatttcagtattagctataggtgctacctacctcttggggacatggccctgtttgcgctaaccattacaatgatcttttagaactctgtatccaaagagctacttcgtgacactggccatctgagtcacagatgtgaagtcgatttcactttataactaaccagtcctacatattaagacttctaagtgtccatatgcatcttttttggtataatatataaagtcagcagggactcccctttcccttagggcatactactgtcagtcagaactgcaagatgtgaatgaagctcttaacggcttggagtgtctttctggaagaaattgccttttttttttttttcatgttagcaggtaaaaaatcattcacccaatttgaagcatagaagaaaatagttgctgaggttttttaataaccattcctactatctgtgttcccttagatactcctgtaattcttaatgtgaatagtttgttaatattgctgtaaagtattatattgtatgatttgaagacagactatatgtcattttattatactccatcaatctataatatattagactgatgctttatctaaaatgctttgagtttgtataatatatcttgacaaattttactaccatatgttatgtaataaatgtgtatttttgtacttgcagaaactgctgctaacttttaaagttgtttggttttcaaggcactgataatggatatgtatgaagtccatgctgtctgttaaataaaatgccattctgcag

SEQ ID NO: 175687 - DNA, 2623 bp, Homo sapiens
  Payload ID: 14508
  Gene Symbol: ARHGAP20
  Gene Name: Rho GTPase activating protein 20
  ENST ID: ENST00000529591
  CDS Start-End: 331-2526
gttttctgcccccacattcttggaaatgctctacatttttggaaacacctacagtcaaaatgagctttaagcagagcttttgaccttagcagtatcttctgcagacctgtgtcaggctctcacctcccaaaggattggaatgcaccagagctaggggtcgagacaaggccccagcctgtatctcaggctgaaacgtgaaaaccaagttaaggaaaatatggtgaagaagattcttgcatacccctactccagctgagtgcccaggattttctgcgaaatattccaggaagtattttttcatcagatctctatgatcactgggtctctgtaatggatcaaggaaatgatgaagagaaaataaatactgttcaaaggctattagaccagcttccgagagccaatgttgttctcctaaggtatctttttggggtgttacacaacattgagcaacattcctcatccaatcagatgactgcatttaatttagctgtgtgtgtcgctccaagtattctttggcctcctgcttcctccagcccagaactagaaaacgaatttacaaaaaaggtttccctgcttatacaatttctgattgagaattgccttaggatatttggagaagaaatcacttccctcttcagagaggtttcagtgagatgtgacactagagagaatgcctcagatatttcttgctttcaactgaatgactcctcctatgacagcttggaaaatgagctaaatgaggatgttgatgcaccatgcagtgacttggtaaagaaacttggccaggggagcagaagcatggactctgtcttaaccctcagtgactatgatcttgaccagcccgaggtggaaggccttttaaccctaagcgactttgacttggcccattctaaagatgaagatgttcaaatgaaacggcctcttgaatccaagccggtgaacattttagtgtacacaaagatcccactgcgggatcatgccagggccccatctgccatgtgcacacccagctacctgtccacagctgcagcaaatgctgcaaaaagcctgaggcgacaccggcgttgctcagagcccagcatcgactatctggattcaaagctttcctacctcagggagttttatcagaaaaagctacgcaagtccagctgtgatgcaattctttctcaaaaagatgaagactatctgaagcagaatcaacccctccaggaggaaggaaagacatgttttaaacagagtttagtcacaggcactgatgtcagcaagaaaaatgccactactcaaaacactaagaagaaaagcttgtctggtagtgaaggaaatcacgtgaaacttttccctaagtctaagccagtggccatttctgtggcatcttatagtcctatgtcctcacaggatcattccaagaaccagccctttgatgtgaatacatctggatactccccaccacacacagcagatgccctcaagggtccaaggacacatcggcgctgctcagagcccaacatagaagaccagaaccgcaagctgacctatctcaggggaatttattcaaagaaacaacataaaaccagctgtgaagctggtctcttgcatggagaggaggattatctcaaacggcataagtctttgcaaatggaggggcagaagctcattaatcagagtttagtcatggggattgaggtgggcaagagtagtgccacaaaccaaaacactgagaaggttttacccccaagattaaacctttgcccaaggaccagctattccagcttatcctccccaggcacttccccatccggctcatcagtaagctcccaagacagtgctttttctcagatttctgaacactctgtgtttacacccactgagacttcctctccaatagattgcacttttcaggctcagagaaaacgggaagacctttctcctgactttagcaatgccagccatgtttccggaatgcccggtccctcatcagggcaggcttgcagccgcccagcctatacaaagaaggacaccatggagtggcattcacaaatgcattctgtaactcttcatcccagcacatggttgagaaatggtgtggccagtttgaaaaactggtccctcaaaaagaaagcaaaggcagccagaccagaggaagagaaaatagcttctccaaaaggacccttagagccacccccacatgcttctggtgttccagaagccaactcactgcaagaggaacaaaaagacttgcccttaagggcagctgaaggactgtcccctgtgcagtcagcccaaaggtgtagttcttctcccttccaggactcagagagacactgtagctctccattcagcctggtggagagcagacttaagctgtgcatgaagtcacatgaggaaatagagcctggtagtcagagctcttctggttctctgccttgggaaagagcctcagccagctcttggactctagaggatgcgaccagcccagactcagggcctacagtggtctgcgacattgaggacagaaactgctgctaacttttaaagttgtttggttttcaaggcactgataatggatatgtatgaagtccatgctgtctgttaaataaaatgccattctgcagaattaaccatc

SEQ ID NO: 175688 - DNA, 3526 bp, Homo sapiens
  Payload ID: 14509
  Gene Symbol: ARHGAP21
  Gene Name: Rho GTPase activating protein 21
  ENST ID: ENST00000376410
  CDS Start-End: 29-3526
ttgtcccttctttgtcatttgaaatgaaatgatggccacgcgtcggactggtctgtctgagggagatggtgacaagctcaaggcctgcgaggtctcaaaaaataaagatggaaaagaacaaagtgaaactgtatcactgtctgaagatgaaacattctcctggccaggtcccaaaacagttacgttgaaaagaacatctcaaggctttggttttacattaagacattttattgtttatcccccagagtctgcaattcaattttcatataaggatgaagaaaatggaaacagaggaggaaaacaaagaaaccgcttggaaccaatggataccatatttgttaagcaagttaaagaaggaggacctgcttttgaagctggattatgtacaggtgaccgaattataaaagtcaatggagaaagtgttattggcaaaacctattcccaagtaattgctttaattcaaaacagtgatacaacattggaacttagtgttatgccaaaagatgaagacattctccaagtggcatattctcaagatgcctacctgaaaggcaacgaagcttatagcggcaatgcccgcaatatacctgaacctccaccaatctgctatccctggctgccatctgccccatcagccatggcacagccagttgaaatatctcctcctgactcatcattgagcaaacagcaaaccagtacaccagtactgacacaacctggtagggcctatagaatggaaatacaagtgcctccatcaccaacagatgttgcaaaatcaaacacagcagtgtgtgtttgcaatgaaagtgtaaggactgtcattgtgccttctgagaaggttgtagatttgttatccaatagaaacaaccatacaggtccttcacatagaactgaagaagtgaggtatggcgtgagtgagcagacctctttaaaaacagtgtcaagaaccacatcaccaccattatcaattcccaccactcatctaattcatcagcctgcaggctccagatcactggaaccttctggaattttacttaagtctggaaattacagtggacattctgatggaatctcaagcagcagatctcaagctgtggaggctccctctgtatctgttaatcactattcgccaaattcccatcagcacatagactggaaaaactataaaacttacaaagagtatattgataacagacgattgcacataggttgtcggacaatacaagaaagattagatagtttaagagcagcatctcaaagcacgacagattataaccaggtcgtccccaaccgcactactttgcagggacgacgtcgaagcacctctcatgatcgagtgccccagtctgtccagatacggcaacgcagtgtgtcccaagaaagactggaagattctgtgctaatgaagtattgtccaagaagtgcatctcaaggagcactgacgtctccatctgttagttttagtaatcatagaactcgttcatgggattatattgagggacaggatgaaaccttagaaaatgtcaattctggaactccaatacctgattccaatggagagaaaaaacagacttacaagtggagtgggtttactgaacaggatgatagacgaggtatttgtgaaagacctaggcagcaagaaattcataaatcttttcgaggttccaattttactgtggctccaagcgttgttaattctgataacaggcgaatgagtggtagaggagtgggatctgtgtcgcagtttaaaaaaattccaccagatctaaaaacattgcagtcaaacagaaattttcagactacttgtggaatgtcactgcctcggggtatttcacaagacaggtcacctcttgtgaaagtccgaagtaattctctgaaagctccttccacgcatgtcacaaaaccatcatttagccagaaatcatttgtttctatcaaagaccaaagaccagtaaatcacttgcatcagaacagtctgttgaatcagcagacatgggtaaggactgacagtgcccccgatcagcaagtggagactgggaaatccccctctttatctggagcctctgccaagcctgcccctcagtcgagtgaaaacgctggtacttcagatttagaactacctgtcagtcaaaggaatcaagatttaagtttacaagaggctgaaactgagcaatcagatactttagataataaagaagctgtcatcctaagggaaaaacctccatctggacgccagacaccgcagcctttaaggcatcagtcttacatcttggcagtaaatgaccaggagaccgggtcagacactacctgctggctgcccaatgatgcacgtcgagaggtccacataaaaagaatggaggaaagaaaagcctcgagtaccagtccgcctggcgattctttggcttccatcccatttatagatgaaccaactagccctagcattgatcatgatattgcacatatccctgcctctgctgttatatcagcctctacctctcaggtcccctccatagcaacagttcctccttgcctcacaacttcagctccattaattcgccgtcagctctcacatgaccacgaatctgttggccctcctagcctggatgctcagcccaactcaaagacagaaagatcaaaatcatatgatgagggtctggatgattacagagaagatgcaaaattgtcctttaagcacgtatctagtctgaagggaatcaagatcgcagacagccaaaagtcatcagaagactctgggtccagaaaagattcttcctcagaggtcttcagtgatgctgccaaggaagggtggcttcatttccgaccccttgtcaccgataagggcaagcgagttggtggaagtattcggccatggaaacagatgtatgttgtccttcggggtcattcactttacctgtacaaagataaaagagagcagacgactccgtctgaggaagagcagcccatcagtgttaatgcttgcttgatagacatctcttacagtgagaccaagaggaaaaatgtgtttcgactcaccacgtccgactgtgaatgcctgtttcaggctgaagacagagatgatatgctagcttggatcaagacgatccaggagagcagcaacctaaacgaagaggacactggagtcactaacagggatctaattagtcgaagaataaaagaatacaacaatctgatgagcaaagcagaacagttgccaaaaacacctcgccagagtctcagcatcaggcaaactttgcttggtgctaaatcagagccaaagactcaaagcccacactctccgaaggaagagtcggaaaggaaacttctcagtaaagatgataccagtcccccaaaagacaaaggcacatggagaaaaggcattccaagtatcatgagaaagacatttgagaaaaagccaactgctacaggaactttcggcgtccgactagatgactgcccaccagctcatactaatcgggtaggagacaccagcccaccggatttcctcaagtcattaattcagttttga

SEQ ID NO: 175689 - DNA, 4343 bp, Homo sapiens
  Payload ID: 14509
  Gene Symbol: ARHGAP21
  Gene Name: Rho GTPase activating protein 21
  Uniprot ID: Q5T5U3
  ENST ID: ENST00000320481
  CDS Start-End: 95-4318
aattcttccccttcgggtgtgtggtggcattccccgccacgtccaatgtggactccaaaggatttgtcccttctttgtcatttgaaatgaaatgatggccacgcgtcggactggtctgtctgagggagatggtgacaagctcaaggcctgcgaggtctcaaaaaataaagatggaaaagaacaaagtgaaactgtatcactgtctgaagatgaaacattctcctggccaggtcccaaaacagttacgttgaaaagaacatctcaaggctttggttttacattaagacattttattgtttatcccccagagtctgcaattcaattttcatataaggatgaagaaaatggaaacagaggaggaaaacaaagaaaccgcttggaaccaatggataccatatttgttaagcaagttaaagaaggaggacctgcttttgaagctggattatgtacaggtgaccgaattataaaagtcaatggagaaagtgttattggcaaaacctattcccaagtaattgctttaattcaaaacagtgatacaacattggaacttagtgttatgccaaaagatgaagacattctccaagtggcatattctcaagatgcctacctgaaaggcaacgaagcttatagcggcaatgcccgcaatatacctgaacctccaccaatctgctatccctggctgccatctgccccatcagccatggcacagccagttgaaatatctcctcctgactcatcattgagcaaacagcaaaccagtacaccagtactgacacaacctggtagggcctatagaatggaaatacaagtgcctccatcaccaacagatgttgcaaaatcaaacacagcagtgtgtgtttgcaatgaaagtgtaaggactgtcattgtgccttctgagaaggttgtagatttgttatccaatagaaacaaccatacaggtccttcacatagaactgaagaagtgaggtatggcgtgagtgagcagacctctttaaaaacagtgtcaagaaccacatcaccaccattatcaattcccaccactcatctaattcatcagcctgcaggctccagatcactggaaccttctggaattttacttaagtctggaaattacagtggacattctgatggaatctcaagcagcagatctcaagctgtggaggctccctctgtatctgttaatcactattcgccaaattcccatcagcacatagactggaaaaactataaaacttacaaagagtatattgataacagacgattgcacataggttgtcggacaatacaagaaagattagatagtttaagagcagcatctcaaagcacgacagattataaccaggtcgtccccaaccgcactactttgcagggacgacgtcgaagcacctctcatgatcgagtgccccagtctgtccagatacggcaacgcagtgtgtcccaagaaagactggaagattctgtgctaatgaagtattgtccaagaagtgcatctcaaggagcactgacgtctccatctgttagttttagtaatcatagaactcgttcatgggattatattgagggacaggatgaaaccttagaaaatgtcaattctggaactccaatacctgattccaatggagagaaaaaacagacttacaagtggagtgggtttactgaacaggatgatagacgaggtatttgtgaaagacctaggcagcaagaaattcataaatcttttcgaggttccaattttactgtggctccaagcgttgttaattctgataacaggcgaatgagtggtagaggagtgggatctgtgtcgcactggagaaaaggcattccaagtatcatgagaaagacatttgagaaaaagccaactgctacaggaactttcggcgtccgactagatgactgcccaccagctcatactaatcggtatattccattaatagttgacatatgttgcaaattagttgaagaaagaggtcttgaatatacaggtatttatagagttcctggaaataatgcagccatctcaagtatgcaagaagaactcaacaagggaatggctgatattgatatacaagatgataaatggcgagatttgaatgtgataagcagtttactaaaatccttcttcagaaaactccctgagcctctcttcacaaatgataaatatgctgattttattgaagccaatcgtaaagaagatcctctagatcgtctgaaaacattaaaaagactaattcacgatttgcctgaacatcattatgaaacacttaagttcctttcagctcatctgaagacagtggcagaaaattcagaaaaaaataagatggaaccaagaaacctagcaatagtgtttggtcccacccttgttcgaacatcagaagacaacatgacccacatggtcacccacatgcctgaccagtacaagattgtagaaacgctcatccagcaccatgactggtttttcacagaagaaggtgctgaagagcctcttacaacagtgcaggaggaaagcacagtagactcccagccagtgccaaacatagatcatttactcaccaacattggaaggacaggagtctccccaggagatgtatcagattcagctactagtgactcaacaaaatctaagggttcttggggatctggaaaggatcagtatagcagggaactgcttgtgtcctccatctttgcagctgctagtcgcaagaggaagaagccgaaagaaaaagcacagcctagcagctcagaagatgaactggacaatgtattttttaagaaagaaaatgtggaacagtgtcacaatgatactaaagaggagtccaaaaaagaaagtgagacactgggcagaaaacagaagatcatcattgccaaagaaaacagcactaggaaagaccccagcacgacaaaagatgaaaagatatcactaggaaaagagagcacgccttctgaagaaccctcaccaccacacaactcaaaacacaacaagtcaccaactctcagctgtcgctttgccatcctgaaagagagccccaggtcacttctggcacagaagtcctcccaccttgaagagacaggctctgactctggcactttgctcagcacgtcttcccaggcctccctggcaaggttttccatgaagaaatcaaccagtccagaaacgaaacatagcgagtttttggccaacgtcagcaccatcacctcagattattccaccacatcgtctgctacatacttgactagcctggactccagtcgactgagccctgaggtgcaatccgtggcagagagcaagggggacgaggcagatgacgagagaagcgaactcatcagtgaagggcggcctgtggaaaccgacagcgagagcgagtttcccgtgttccccacagccttgacttcagagaggcttttccgaggaaaactgcaagaagtgactaagagcagccggagaaattctgaaggaagtgaattaagttgcaccgagggaagtttaacatcaagtttagatagccggagacagctcttcagttcccataaactcatcgaatgtgatactctttccaggaaaaaatcagctagattcaagtcagatagtggaagtctaggagatgccaagaatgagaaagaagcaccttcgttaactaaagtgtttgatgttatgaaaaaaggaaagtcaactgggagtttactgacacccaccagaggcgaatccgaaaaacaggaacccacatggaaaacgaaaatagcagatcggttaaaactgagacccagagcccctgcggatgacatgtttggagtagggaatcacaaagtgaatgccgagactgctaaaaggaaaagcatccggcgcagacatacactaggagggcacagagatgctaccgaaatcagcgttttgaatttttggaaagtgcatgagcagagcggggagagagaatctgaactttcagctgtaaaccggttaaaaccaaaatgctcagcccaggacctttccatctcagactggctggccagggaacgcctacgcaccagtacctctgaccttagcagaggagaaatcggagatccccagacagagaacccaagcacacgagaaatagccacgaccgacacacctttgtctcttcattgcaacacaggcagttcttccagcaccttggcttcaacaaacaggccccttctttccataccaccacagtcacctgaccaaataaacggagaaagcttccagaacgtgagcaaaaatgctagttctgcagcgaatgcccaacctcataaactgtctgaaaccccaggcagtaaagcagagtttcatccctgtctttaaactgggggtatgtccactctagcaa

SEQ ID NO: 175690 - DNA, 7167 bp, Homo sapiens
  Payload ID: 14509
  Gene Symbol: ARHGAP21
  Gene Name: Rho GTPase activating protein 21
  Uniprot ID: Q5T5U3
  ENST ID: ENST00000396432
  CDS Start-End: 488-6364
gcgggatcgtccggctgcggggtccggctcacgccgggcgggcgggcggggcgcgctgtcccggagccggccagccccgtgcggatccactcgtcccgcttcctctggatctctctaggagctgacactcgaaccttcacgacccattcggatttttccaggactcaggagtggcactgggaagaaggggaccgctttctgcaattggcctcgacactggctgccaagaagacctgtcgcctttgtttttaagtctccagaaatggaagaagaaggcgaagtcagttgaagtcacgagaaatcagcgaggcatttgaaggcgcttcctgaaaacctttattccctggcacgttgtctgtttcaacagccctgcccctcctcggagcctgcttgtggaattcttccccttcgggtgtgtggtggcattccccgccacgtccaatgtggactccaaaggatttgtcccttctttgtcatttgaaatgaaatgatggccacgcgtcggactggtctgtctgagggagatggtgacaagctcaaggcctgcgaggtctcaaaaaataaagatggaaaagaacaaagtgaaactgtatcactgtctgaagatgaaacattctcctggccaggtcccaaaacagttacgttgaaaagaacatctcaaggctttggttttacattaagacattttattgtttatcccccagagtctgcaattcaattttcatataaggatgaagaaaatggaaacagaggaggaaaacaaagaaaccgcttggaaccaatggataccatatttgttaagcaagttaaagaaggaggacctgcttttgaagctggattatgtacaggtgaccgaattataaaagtcaatggagaaagtgttattggcaaaacctattcccaagtaattgctttaattcaaaacagtgatacaacattggaacttagtgttatgccaaaagatgaagacattctccaagtgctacagtttacaaaggatgtcacagcactggcatattctcaagatgcctacctgaaaggcaacgaagcttatagcggcaatgcccgcaatatacctgaacctccaccaatctgctatccctggctgccatctgccccatcagccatggcacagccagttgaaatatctcctcctgactcatcattgagcaaacagcaaaccagtacaccagtactgacacaacctggtagggcctatagaatggaaatacaagtgcctccatcaccaacagatgttgcaaaatcaaacacagcagtgtgtgtttgcaatgaaagtgtaaggactgtcattgtgccttctgagaaggttgtagatttgttatccaatagaaacaaccatacaggtccttcacatagaactgaagaagtgaggtatggcgtgagtgagcagacctctttaaaaacagtgtcaagaaccacatcaccaccattatcaattcccaccactcatctaattcatcagcctgcaggctccagatcactggaaccttctggaattttacttaagtctggaaattacagtggacattctgatggaatctcaagcagcagatctcaagctgtggaggctccctctgtatctgttaatcactattcgccaaattcccatcagcacatagactggaaaaactataaaacttacaaagagtatattgataacagacgattgcacataggttgtcggacaatacaagaaagattagatagtttaagagcagcatctcaaagcacgacagattataaccaggtcgtccccaaccgcactactttgcagggacgacgtcgaagcacctctcatgatcgagtgccccagtctgtccagatacggcaacgcagtgtgtcccaagaaagactggaagattctgtgctaatgaagtattgtccaagaagtgcatctcaaggagcactgacgtctccatctgttagttttagtaatcatagaactcgttcatgggattatattgagggacaggatgaaaccttagaaaatgtcaattctggaactccaatacctgattccaatggagagaaaaaacagacttacaagtggagtgggtttactgaacaggatgatagacgaggtatttgtgaaagacctaggcagcaagaaattcataaatcttttcgaggttccaattttactgtggctccaagcgttgttaattctgataacaggcgaatgagtggtagaggagtgggatctgtgtcgcagtttaaaaaaattccaccagatctaaaaacattgcagtcaaacagaaattttcagactacttgtggaatgtcactgcctcggggtatttcacaagacaggtcacctcttgtgaaagtccgaagtaattctctgaaagctccttccacgcatgtcacaaaaccatcatttagccagaaatcatttgtttctatcaaagaccaaagaccagtaaatcacttgcatcagaacagtctgttgaatcagcagacatgggtaaggactgacagtgcccccgatcagcaagtggagactgggaaatccccctctttatctggagcctctgccaagcctgcccctcagtcgagtgaaaacgctggtacttcagatttagaactacctgtcagtcaaaggaatcaagatttaagtttacaagaggctgaaactgagcaatcagatactttagataataaagaagctgtcatcctaagggaaaaacctccatctggacgccagacaccgcagcctttaaggcatcagtcttacatcttggcagtaaatgaccaggagaccgggtcagacactacctgctggctgcccaatgatgcacgtcgagaggtccacataaaaagaatggaggaaagaaaagcctcgagtaccagtccgcctggcgattctttggcttccatcccatttatagatgaaccaactagccctagcattgatcatgatattgcacatatccctgcctctgctgttatatcagcctctacctctcaggtcccctccatagcaacagttcctccttgcctcacaacttcagctccattaattcgccgtcagctctcacatgaccacgaatctgttggccctcctagcctggatgctcagcccaactcaaagacagaaagatcaaaatcatatgatgagggtctggatgattacagagaagatgcaaaattgtcctttaagcacgtatctagtctgaagggaatcaagatcgcagacagccaaaagtcatcagaagactctgggtccagaaaagattcttcctcagaggtcttcagtgatgctgccaaggaagggtggcttcatttccgaccccttgtcaccgataagggcaagcgagttggtggaagtattcggccatggaaacagatgtatgttgtccttcggggtcattcactttacctgtacaaagataaaagagagcagacgactccgtctgaggaagagcagcccatcagtgttaatgcttgcttgatagacatctcttacagtgagaccaagaggaaaaatgtgtttcgactcaccacgtccgactgtgaatgcctgtttcaggctgaagacagagatgatatgctagcttggatcaagacgatccaggagagcagcaacctaaacgaagaggacactggagtcactaacagggatctaattagtcgaagaataaaagaatacaacaatctgatgagcaaagcagaacagttgccaaaaacacctcgccagagtctcagcatcaggcaaactttgcttggtgctaaatcagagccaaagactcaaagcccacactctccgaaggaagagtcggaaaggaaacttctcagtaaagatgataccagtcccccaaaagacaaaggcacatggagaaaaggcattccaagtatcatgagaaagacatttgagaaaaagccaactgctacaggaactttcggcgtccgactagatgactgcccaccagctcatactaatcggtatattccattaatagttgacatatgttgcaaattagttgaagaaagaggtcttgaatatacaggtatttatagagttcctggaaataatgcagccatctcaagtatgcaagaagaactcaacaagggaatggctgatattgatatacaagatgataaatggcgagatttgaatgtgataagcagtttactaaaatccttcttcagaaaactccctgagcctctcttcacaaatgataaatatgctgattttattgaagccaatcgtaaagaagatcctctagatcgtctgaaaacattaaaaagactaattcacgatttgcctgaacatcattatgaaacacttaagttcctttcagctcatctgaagacagtggcagaaaattcagaaaaaaataagatggaaccaagaaacctagcaatagtgtttggtcccacccttgttcgaacatcagaagacaacatgacccacatggtcacccacatgcctgaccagtacaagattgtagaaacgctcatccagcaccatgactggtttttcacagaagaaggtgctgaagagcctcttacaacagtgcaggaggaaagcacagtagactcccagccagtgccaaacatagatcatttactcaccaacattggaaggacaggagtctccccaggagatgtatcagattcagctactagtgactcaacaaaatctaagggttcttggggatctggaaaggatcagtatagcagggaactgcttgtgtcctccatctttgcagctgctagtcgcaagaggaagaagccgaaagaaaaagcacagcctagcagctcagaagatgaactggacaatgtattttttaagaaagaaaatgtggaacagtgtcacaatgatactaaagaggagtccaaaaaagaaagtgagacactgggcagaaaacagaagatcatcattgccaaagaaaacagcactaggaaagaccccagcacgacaaaagatgaaaagatatcactaggaaaagagagcacgccttctgaagaaccctcaccaccacacaactcaaaacacaacaagtcaccaactctcagctgtcgctttgccatcctgaaagagagccccaggtcacttctggcacagaagtcctcccaccttgaagagacaggctctgactctggcactttgctcagcacgtcttcccaggcctccctggcaaggttttccatgaagaaatcaaccagtccagaaacgaaacatagcgagtttttggccaacgtcagcaccatcacctcagattattccaccacatcgtctgctacatacttgactagcctggactccagtcgactgagccctgaggtgcaatccgtggcagagagcaagggggacgaggcagatgacgagagaagcgaactcatcagtgaagggcggcctgtggaaaccgacagcgagagcgagtttcccgtgttccccacagccttgacttcagagaggcttttccgaggaaaactgcaagaagtgactaagagcagccggagaaattctgaaggaagtgaattaagttgcaccgagggaagtttaacatcaagtttagatagccggagacagctcttcagttcccataaactcatcgaatgtgatactctttccaggaaaaaatcagctagattcaagtcagatagtggaagtctaggagatgccaagaatgagaaagaagcaccttcgttaactaaagtgtttgatgttatgaaaaaaggaaagtcaactgggagtttactgacacccaccagaggcgaatccgaaaaacaggaacccacatggaaaacgaaaatagcagatcggttaaaactgagacccagagcccctgcggatgacatgtttggagtagggaatcacaaagtgaatgccgagactgctaaaaggaaaagcatccggcgcagacatacactaggagggcacagagatgctaccgaaatcagcgttttgaatttttggaaagtgcatgagcagagcggggagagagaatctgaactttcagctgtaaaccggttaaaaccaaaatgctcagcccaggacctttccatctcagactggctggccagggaacgcctacgcaccagtacctctgaccttagcagaggagaaatcggagatccccagacagagaacccaagcacacgagaaatagccacgaccgacacacctttgtctcttcattgcaacacaggcagttcttccagcaccttggcttcaacaaacaggccccttctttccataccaccacagtcacctgaccaaataaacggagaaagcttccagaacgtgagcaaaaatgctagttctgcagcgaatgcccaacctcataaactgtctgaaaccccaggcagtaaagcagagtttcatccctgtctttaaactgggggtatgtccactctagcaagtaaaaaaactactgttacacgttccagtaactctgtcaatattttcttgtatcagaattgttattatgcagccttcatttgggctggtttcatcattttgcactgtgaaatagctttacagtgcattactacagccagaagaacatatatatatatatatatatttaaaaatatatcggatagttgtatacaaatgagcaaggtatttgttgcaacttactacatagcatatacccaaaatcactgaagaaaatcgctggcatcagtgtgcagcaaatttgttcttttggtttcatcactaacaaaagtgcctcatcataaaaatacagttggtttttagggtgccatattgttaaaattagataacttacttacattgaataaacgaatgcgttttattggtaacagatatcattacatttaccagttttaacacaggtggatacagaacttccattctttagtcattccaggtggatctgagttttatattcaaacttttaatacagtttttgagttttgtgtgacttgaatttttaatctttctgtaaaatacgtaacttaaatgaacatattaaatgtgtatcttttcttcagataccagatttgatataatgttgtaacataggtgtgtagatagtggatcctggatggaactggcttctttatcgagaagaatataattctgcatgaggacttaatgaatccaaacctgtgtcatgcctgtgtgcatacccaattaaacactggaaataaaaattgttttggtgaattttg

SEQ ID NO: 175691 - DNA, 590 bp, Homo sapiens
  Payload ID: 14509
  Gene Symbol: ARHGAP21
  Gene Name: Rho GTPase activating protein 21
  ENST ID: ENST00000418033
  CDS Start-End: 1-590
aaataatgcagccatctcaagtatgcaagaagaactcaacaagggaatggctgatattgatatacaagatgataaatggcgagatttgaatgtgataagcagtttactaaaatccttcttcagaaaactccctgagcctctcttcacaaatgataaatatgctgattttattgaagccaatcgtaaagaagatcctctagatcgtctgaaaacattaaaaagactaattcacgatttgcctgaacatcattatgaaacacttaagttcctttcagctcatctgaagacagtggcagaaaattcagaaaaaaataagatggaaccaagaaacctagcaatagtgtttggtcccacccttgttcgaacatcagaagacaacatgacccacatggtcacccacatgcctgaccagtacaagattgtagaaacgctcatccagcaccatgactggtttttcacagaagaaggtgctgaagagcctcttattcagctactagtgactcaacaaaatctaagggttcttggggatctggaaaggatcagtatagcagggaactgcttgtgtcctccatctttgcagctgctagtcg

SEQ ID NO: 175692 - DNA, 801 bp, Homo sapiens
  Payload ID: 14509
  Gene Symbol: ARHGAP21
  Gene Name: Rho GTPase activating protein 21
  ENST ID: ENST00000416305
  CDS Start-End: 1-540
ggagatggtgacaagctcaaggcctgcgaggtctcaaaaaataaagatggaaaagaacaaagtgaaactgtatcactgtctgaagatgaaacattctcctggccaggtcccaaaacagttacgttgaaaagaacatctcaaggctttggttttacattaagacattttattgtttatcccccagagtctgcaattcaattttcatataaggatgaagaaaatggaaacagaggaggaaaacaaagaaaccgcttggaaccaatggataccatatttgttaagcaagttaaagaaggaggacctgcttttgaagctggattatgtacaggtgaccgaattataaaagtcaatggagaaagtgttattggcaaaacctattcccaagtaattgctttaattcaaaacagtgatacaacattggaacttagtgttatgccaaaagatgaagacattctccaagtgaatctggaattctctacattttacaaaaataccattgccaagtttttgcaattaagtgacatggaaatgttatgttgattctacagtgaactcttaatgctctcatttagaatgagattcctaaagagtttgtcctagtgttgccttctagttcatccttggaccaaaggaagagtttagagtgcaagtgcatatccccaggaattagaatctttttttttttccttctcactatgtacagagaaaaaaaaaaaatagaatcttatttttgtaatacgaggacaaactttatgattgccattttctaattttccaataaatattacgtttgtaaattca

SEQ ID NO: 175693 - DNA, 340 bp, Homo sapiens
  Payload ID: 14509
  Gene Symbol: ARHGAP21
  Gene Name: Rho GTPase activating protein 21
  ENST ID: ENST00000418325
  CDS Start-End: 1-340
tatattccattaatagttgacatatgttgcaaattagttgaagaaagaggtcttgaatatacaggtatttatagagttcctggaaataatgcagccatctcaagtatgcaagaagaactcaacaagggaatggctgatattgatatacaagatgataaatggcgagatttgaatgtgataagcagtttactaaaatccttcttcagaaaactccctgagcctctcttcacaaatgataaatatgctgattttattgaagccaatcgtaaagaagatcctctagatcgtctgaaaacattaaaaagactattcctttcagctcatctgaagacagtggcag

SEQ ID NO: 175694 - DNA, 3859 bp, Homo sapiens
  Payload ID: 14509
  Gene Symbol: ARHGAP21
  Gene Name: Rho GTPase activating protein 21
  ENST ID: ENST00000446003
  CDS Start-End: 465-3859
cccggccgggcccggcgcccggccagcgtctccgcttcagctcgccgccgcgcttcggccgccgggcccgagcgggcgggaagggatctctctaggagctgacactcgaaccttcacgacccattcggatttttccaggactcaggagtggcactgggaagaaggggaccgctttctgcaattggcctcgacactggctgccaagaagacctgtcgcctttgtttttaagtctccagaaatggaagaagaaggcgaagtcagttgaagtcacgagaaatcagcgaggcatttgaaggcgcttcctgaaaacctttattccctggcacgttgtctgtttcaacagccctgcccctcctcggagcctgcttgtggaattcttccccttcgggtgtgtggtggcattccccgccacgtccaatgtggactccaaaggatttgtcccttctttgtcatttgaaatgaaatgatggccacgcgtcggactggtctgtctgagggagatggtgacaagctcaaggcctgcgaggtctcaaaaaataaagatggaaaagaacaaagtgaaactgtatcactgtctgaagatgaaacattctcctggccaggtcccaaaacagttacgttgaaaagaacatctcaaggctttggttttacattaagacattttattgtttatcccccagagtctgcaattcaattttcatataaggatgaagaaaatggaaacagaggaggaaaacaaagaaaccgcttggaaccaatggataccatatttgttaagcaagttaaagaaggaggacctgcttttgaagctggattatgtacaggtgaccgaattataaaagtcaatggagaaagtgttattggcaaaacctattcccaagtaattgctttaattcaaaacagtgatacaacattggaacttagtgttatgccaaaagatgaagacattctccaagtgctacagtttacaaaggatgtcacagcactggcatattctcaagatgcctacctgaaaggcaacgaagcttatagcggcaatgcccgcaatatacctgaacctccaccaatctgctatccctggctgccatctgccccatcagccatggcacagccagttgaaatatctcctcctgactcatcattgagcaaacagcaaaccagtacaccagtactgacacaacctggtagggcctatagaatggaaatacaagtgcctccatcaccaacagatgttgcaaaatcaaacacagcagtgtgtgtttgcaatgaaagtgtaaggactgtcattgtgccttctgagaaggttgtagatttgttatccaatagaaacaaccatacaggtccttcacatagaactgaagaagtgaggtatggcgtgagtgagcagacctctttaaaaacagtgtcaagaaccacatcaccaccattatcaattcccaccactcatctaattcatcagcctgcaggctccagatcactggaaccttctggaattttacttaagtctggaaattacagtggacattctgatggaatctcaagcagcagatctcaagctgtggaggctccctctgtatctgttaatcactattcgccaaattcccatcagcacatagactggaaaaactataaaacttacaaagagtatattgataacagacgattgcacataggttgtcggacaatacaagaaagattagatagtttaagagcagcatctcaaagcacgacagattataaccaggtcgtccccaaccgcactactttgcagggacgacgtcgaagcacctctcatgatcgagtgccccagtctgtccagatacggcaacgcagtgtgtcccaagaaagactggaagattctgtgctaatgaagtattgtccaagaagtgcatctcaaggagcactgacgtctccatctgttagttttagtaatcatagaactcgttcatgggattatattgagggacaggatgaaaccttagaaaatgtcaattctggaactccaatacctgattccaatggagagaaaaaacagacttacaagtggagtgggtttactgaacaggatgatagacgaggtatttgtgaaagacctaggcagcaagaaattcataaatcttttcgaggttccaattttactgtggctccaagcgttgttaattctgataacaggcgaatgagtggtagaggagtgggatctgtgtcgcagtttaaaaaaattccaccagatctaaaaacattgcagtcaaacagaaattttcagactacttgtggaatgtcactgcctcggggtatttcacaagacaggtcacctcttgtgaaagtccgaagtaattctctgaaagctccttccacgcatgtcacaaaaccatcatttagccagaaatcatttgtttctatcaaagaccaaagaccagtaaatcacttgcatcagaacagtctgttgaatcagcagacatgggtaaggactgacagtgcccccgatcagcaagtggagactgggaaatccccctctttatctggagcctctgccaagcctgcccctcagtcgagtgaaaacgctggtacttcagatttagaactacctgtcagtcaaaggaatcaagatttaagtttacaagaggctgaaactgagcaatcagatactttagataataaagaagctgtcatcctaagggaaaaacctccatctggacgccagacaccgcagcctttaaggcatcagtcttacatcttggcagtaaatgaccaggagaccgggtcagacactacctgctggctgcccaatgatgcacgtcgagaggtccacataaaaagaatggaggaaagaaaagcctcgagtaccagtccgcctggcgattctttggcttccatcccatttatagatgaaccaactagccctagcattgatcatgatattgcacatatccctgcctctgctgttatatcagcctctacctctcaggtcccctccatagcaacagttcctccttgcctcacaacttcagctccattaattcgccgtcagctctcacatgaccacgaatctgttggccctcctagcctggatgctcagcccaactcaaagacagaaagatcaaaatcatatgatgagggtctggatgattacagagaagatgcaaaattgtcctttaagcacgtatctagtctgaagggaatcaagatcgcagacagccaaaagtcatcagaagactctgggtccagaaaagattcttcctcagaggtcttcagtgatgctgccaaggaagggtggcttcatttccgaccccttgtcaccgataagggcaagcgagttggtggaagtattcggccatggaaacagatgtatgttgtccttcggggtcattcactttacctgtacaaagataaaagagagcagacgactccgtctgaggaagagcagcccatcagtgttaatgcttgcttgatagacatctcttacagtgagaccaagaggaaaaatgtgtttcgactcaccacgtccgactgtgaatgcctgtttcaggctgaagacagagatgatatgctagcttggatcaagacgatccaggagagcagcaacctaaacgaagaggacactggagtcactaacagggatctaattagtcgaagaataaaagaatacaacaatctgatgagcaaagcagaacagttgccaaaaacacctcgccagagtctcagcatcaggcaaactttgcttggtgctaaatcagagccaaagactcaaagcccacactctccgaaggaagagtcggaaaggaaacttctcagtaaagatgataccagtcccccaaaagacaaaggcacatggagaaaaggcattccaagtatcatgag

SEQ ID NO: 175695 - DNA, 5514 bp, Homo sapiens
  Payload ID: 14509
  Gene Symbol: ARHGAP21
  Gene Name: Rho GTPase activating protein 21
  ENST ID: ENST00000612832
  CDS Start-End: 491-4711
gcgggatcgtccggctgcggggtccggctcacgccgggcgggcgggcggggcgcgctgtcccggagccggccagccccgtgcggatccactcgtcccgcttcctctggatctctctaggagctgacactcgaaccttcacgacccattcggatttttccaggactcaggagtggcactgggaagaaggggaccgctttctgcaattggcctcgacactggctgccaagaagacctgtcgcctttgtttttaagtctccagaaatggaagaagaaggcgaagtcagttgaagtcacgagaaatcagcgaggcatttgaaggcgcttcctgaaaacctttattccctggcacgttgtctgtttcaacagccctgcccctcctcggagcctgcttgtggaattcttccccttcgggtgtgtggtggcattccccgccacgtccaatgtggactccaaaggatttgtcccttctttgtcatttgaaatgaaatgatggccacgcgtcggactggtctgtctgagggagatggtgacaagctcaaggcctgcgaggtctcaaaaaataaagatggaaaagaacaaagtgaaactgtatcactgtctgaagatgaaacattctcctggccaggtcccaaaacagttacgttgaaaagaacatctcaaggctttggttttacattaagacattttattgtttatcccccagagtctgcaattcaattttcatataaggatgaagaaaatggaaacagaggaggaaaacaaagaaaccgcttggaaccaatggataccatatttgttaagcaagttaaagaaggaggacctgcttttgaagctggattatgtacaggtgaccgaattataaaagtcaatggagaaagtgttattggcaaaacctattcccaagtaattgctttaattcaaaacagtgatacaacattggaacttagtgttatgccaaaagatgaagacattctccaagtggcatattctcaagatgcctacctgaaaggcaacgaagcttatagcggcaatgcccgcaatatacctgaacctccaccaatctgctatccctggctgccatctgccccatcagccatggcacagccagttgaaatatctcctcctgactcatcattgagcaaacagcaaaccagtacaccagtactgacacaacctggtagggcctatagaatggaaatacaagtgcctccatcaccaacagatgttgcaaaatcaaacacagcagtgtgtgtttgcaatgaaagtgtaaggactgtcattgtgccttctgagaaggttgtagatttgttatccaatagaaacaaccatacaggtccttcacatagaactgaagaagtgaggtatggcgtgagtgagcagacctctttaaaaacagtgtcaagaaccacatcaccaccattatcaattcccaccactcatctaattcatcagcctgcaggctccagatcactggaaccttctggaattttacttaagtctggaaattacagtggacattctgatggaatctcaagcagcagatctcaagctgtggaggctccctctgtatctgttaatcactattcgccaaattcccatcagcacatagactggaaaaactataaaacttacaaagagtatattgataacagacgattgcacataggttgtcggacaatacaagaaagattagatagtttaagagcagcatctcaaagcacgacagattataaccaggtcgtccccaaccgcactactttgcagggacgacgtcgaagcacctctcatgatcgagtgccccagtctgtccagatacggcaacgcagtgtgtcccaagaaagactggaagattctgtgctaatgaagtattgtccaagaagtgcatctcaaggagcactgacgtctccatctgttagttttagtaatcatagaactcgttcatgggattatattgagggacaggatgaaaccttagaaaatgtcaattctggaactccaatacctgattccaatggagagaaaaaacagacttacaagtggagtgggtttactgaacaggatgatagacgaggtatttgtgaaagacctaggcagcaagaaattcataaatcttttcgaggttccaattttactgtggctccaagcgttgttaattctgataacaggcgaatgagtggtagaggagtgggatctgtgtcgcaattttctagcattccaagtatcatgagaaagacatttgagaaaaagccaactgctacaggaactttcggcgtccgactagatgactgcccaccagctcatactaatcggtatattccattaatagttgacatatgttgcaaattagttgaagaaagaggtcttgaatatacaggtatttatagagttcctggaaataatgcagccatctcaagtatgcaagaagaactcaacaagggaatggctgatattgatatacaagatgataaatggcgagatttgaatgtgataagcagtttactaaaatccttcttcagaaaactccctgagcctctcttcacaaatgataaatatgctgattttattgaagccaatcgtaaagaagatcctctagatcgtctgaaaacattaaaaagactaattcacgatttgcctgaacatcattatgaaacacttaagttcctttcagctcatctgaagacagtggcagaaaattcagaaaaaaataagatggaaccaagaaacctagcaatagtgtttggtcccacccttgttcgaacatcagaagacaacatgacccacatggtcacccacatgcctgaccagtacaagattgtagaaacgctcatccagcaccatgactggtttttcacagaagaaggtgctgaagagcctcttacaacagtgcaggaggaaagcacagtagactcccagccagtgccaaacatagatcatttactcaccaacattggaaggacaggagtctccccaggagatgtatcagattcagctactagtgactcaacaaaatctaagggttcttggggatctggaaaggatcagtatagcagggaactgcttgtgtcctccatctttgcagctgctagtcgcaagaggaagaagccgaaagaaaaagcacagcctagcagctcagaagatgaactggacaatgtattttttaagaaagaaaatgtggaacagtgtcacaatgatactaaagaggagtccaaaaaagaaagtgagacactgggcagaaaacagaagatcatcattgccaaagaaaacagcactaggaaagaccccagcacgacaaaagatgaaaagatatcactaggaaaagagagcacgccttctgaagaaccctcaccaccacacaactcaaaacacaacaagtcaccaactctcagctgtcgctttgccatcctgaaagagagccccaggtcacttctggcacagaagtcctcccaccttgaagagacaggctctgactctggcactttgctcagcacgtcttcccaggcctccctggcaaggttttccatgaagaaatcaaccagtccagaaacgaaacatagcgagtttttggccaacgtcagcaccatcacctcagattattccaccacatcgtctgctacatacttgactagcctggactccagtcgactgagccctgaggtgcaatccgtggcagagagcaagggggacgaggcagatgacgagagaagcgaactcatcagtgaagggcggcctgtggaaaccgacagcgagagcgagtttcccgtgttccccacagccttgacttcagagaggcttttccgaggaaaactgcaagaagtgactaagagcagccggagaaattctgaaggaagtgaattaagttgcaccgagggaagtttaacatcaagtttagatagccggagacagctcttcagttcccataaactcatcgaatgtgatactctttccaggaaaaaatcagctagattcaagtcagatagtggaagtctaggagatgccaagaatgagaaagaagcaccttcgttaactaaagtgtttgatgttatgaaaaaaggaaagtcaactgggagtttactgacacccaccagaggcgaatccgaaaaacaggaacccacatggaaaacgaaaatagcagatcggttaaaactgagacccagagcccctgcggatgacatgtttggagtagggaatcacaaagtgaatgccgagactgctaaaaggaaaagcatccggcgcagacatacactaggagggcacagagatgctaccgaaatcagcgttttgaatttttggaaagtgcatgagcagagcggggagagagaatctgaactttcagctgtaaaccggttaaaaccaaaatgctcagcccaggacctttccatctcagactggctggccagggaacgcctacgcaccagtacctctgaccttagcagaggagaaatcggagatccccagacagagaacccaagcacacgagaaatagccacgaccgacacacctttgtctcttcattgcaacacaggcagttcttccagcaccttggcttcaacaaacaggccccttctttccataccaccacagtcacctgaccaaataaacggagaaagcttccagaacgtgagcaaaaatgctagttctgcagcgaatgcccaacctcataaactgtctgaaaccccaggcagtaaagcagagtttcatccctgtctttaaactgggggtatgtccactctagcaagtaaaaaaactactgttacacgttccagtaactctgtcaatattttcttgtatcagaattgttattatgcagccttcatttgggctggtttcatcattttgcactgtgaaatagctttacagtgcattactacagccagaagaacatatatatatatatatatatttaaaaatatatcggatagttgtatacaaatgagcaaggtatttgttgcaacttactacatagcatatacccaaaatcactgaagaaaatcgctggcatcagtgtgcagcaaatttgttcttttggtttcatcactaacaaaagtgcctcatcataaaaatacagttggtttttagggtgccatattgttaaaattagataacttacttacattgaataaacgaatgcgttttattggtaacagatatcattacatttaccagttttaacacaggtggatacagaacttccattctttagtcattccaggtggatctgagttttatattcaaacttttaatacagtttttgagttttgtgtgacttgaatttttaatctttctgtaaaatacgtaacttaaatgaacatattaaatgtgtatcttttcttcagataccagatttgatataatgttgtaacataggtgtgtagatagtggatcctggatggaactggcttctttatcgagaagaatataattctgcatgaggacttaatgaatccaaacctgtgtcatgcctgtgtgcatacccaattaaacactggaaataaaaattgttttggtgaattttg

SEQ ID NO: 175696 - DNA, 2751 bp, Homo sapiens
  Payload ID: 14510
  Gene Symbol: ARHGAP22
  Gene Name: Rho GTPase activating protein 22
  Uniprot ID: Q7Z5H3
  ENST ID: ENST00000249601
  CDS Start-End: 298-2394
ggactgccccgccctggtccagtgattgatcagcagtgattactgaggctttaatggtccgcttggatgggaattaattctgggatggataaataatgcatcgaggtttatgtagtccaaggcgagccgtccgtccggagccaggagaggtagccgagggagcctgacgggtgacgccagcggccacggggccccgaacgagcaggacatgaggggcgactaggcgcgaggacgagcaaaagcaagtggatgacagcatgaacggccctgcggggctggccggacggctgcaagaacatgctgagcccaaagatcaggcaggccaggagggcccgctccaaaagcctagtgatgggggagcagagccggagccctgggcggatgccgtgccctcacaggctgggccccgtgctgaaggcgggctggctgaagaagcagaggagcatcatgaagaactggcagcagcgctggtttgtgctgcgtggggatcagcttttctactacaaggacaaagatgagatcaagccccagggatttatttctctacaagggacacaggtgactgaacttcctcctggccccgaggacccagggaagcacctctttgagatcagcccaggtggtgccggggagcgggagaaggtgccggccaaccccgaggcgctcctgctcatggccagctcccagcgtgacatggaggactgggtgcaggccatccgccgagtcatctgggccccgctgggcggagggatctttgggcagcgcctagaggaaacagtccaccacgagcggaagtatggcccccgcctggcgcccctgctggtggagcagtgtgtggacttcatccgggagcgcgggctcactgaggaggggctgttccgcatgccaggccaggccaacctggtgagggacctgcaggattccttcgactgtggggagaagccactgtttgacagcacaacagacgtgcacacggtggcctccctgctgaagctgtacctgcgggagctccccgagcccgtggtccccttcgccaggtacgaggacttcctcagctgcgcccagctgctcaccaaggacgagggggagggcactctggagttggctaaacaagtgagcaaccttcctcaggcaaattacaacctgctcagatacatctgcaagtttctggatgaagttcaggcatactcaaatgtcaacaagatgagtgtccagaatctggcaaccgtttttggacctaacattctgcggccacaggtagaggacccagtaaccatcatggaaggcacttccctcgtccagcacctgatgaccgtcctcatccgcaaacacagccagctcttcacggcaccggtcccggaagggcccacctccccgcgcgggggcctgcaatgcgcagtggggtggggctccgaggaggtcaccagggacagccaaggagagcccggcggccccggcctgcccgcgcacaggacctcttccctggacggggcggccgtggcggtgctctccagaacagcccccacggggccggggagccggtgcagccctgggaagaaggtgcagaccctgcccagttggaagtcctccttccggcagccgaggtccctatcgggaagcccgaaggggggcggctcatccctggaggtgcccatcatctcctccggcgggaactggcttatgaacgggctgtcctccctgcgcggacaccgccgggcctcgtcgggagaccggctcaaggactcgggctccgtgcagagactctccacctacgacaatgtgcccgcgccgggcctggtccccggcatacccagcgtggccagtatggcgtggtccggggcctcgtccagcgagtcgtcggtggggggctcactcagcagctgcacggcctgccgcgccagcgactcgtctgcccgcagttccctgcacaccgactgggccctggagccctccccgctccccagcagcagcgaggaccccaagtccctggacctggaccacagcatggacgaggcgggcgcgggtgccagcaacagcgagcccagcgagccggacagccccacccgggaacacgcgcgccgctccgaggccttacaggggctggtcactgagctcagggccgagctgtgccgccagcggactgagtacgagaggagtgtgaaaagaatcgaagaagggagtgctgacctgagaaaacgaatgtcccggttagaagaagaactggaccaggaaaagaaaaaatacatcatgctggaaataaagctgcggaactctgaacgggcgcgggaggatgcggagaggaggaaccagctgttgcagagggaaatggaggagtttttttcgaccctaggaagcttgactgttggggcaaaaggtgccagggccccaaagtaaaaggaatggcagagctcacttctgtaccacgtctgctggtctccagccttgtatggagttagaagcgtctgtatctctggagcagccaggcgctctggagccagctggagagagagagatcctgatacctctgtggggactgtggggacttttgggaccccacacactccaggtgggatcagatgctgctccaaccatgcagttcctggtgagggtcagaaggggacggtaccaagagtagcgcttagcccttacccaggaaatatccttcatggccacagaaatggagggcgcccaggatccaggcagccaccgggaacagtcagctttctttattaaatgtgctcacaaagcatg

SEQ ID NO: 175697 - DNA, 2107 bp, Homo sapiens
  Payload ID: 14510
  Gene Symbol: ARHGAP22
  Gene Name: Rho GTPase activating protein 22
  ENST ID: ENST00000374170
  CDS Start-End: 133-1752
cgcgggccggcggtcccgcgcaccctgcgcccagctgggcactgcccgtgggccggacctcggccgcgccgccccggggcgcaggcggcaggcggggagaggagccgagcggcggggccgcgggcggctgccatggggctgtgctgctgcaaggactggaggggacacctgcgagcgcccaaaggtggtgccggggagcgggagaaggtgccggccaaccccgaggcgctcctgctcatggccagctcccagcgtgacatggaggactgggtgcaggccatccgccgagtcatctgggccccgctgggcggagggatctttgggcagcgcctagaggaaacagtccaccacgagcggaagtatggcccccgcctggcgcccctgctggtggagcagtgtgtggacttcatccgggagcgcgggctcactgaggaggggctgttccgcatgccaggccaggccaacctggtgagggacctgcaggattccttcgactgtggggagaagccactgtttgacaggtttctggatgaagttcaggcatactcaaatgtcaacaagatgagtgtccagaatctggcaaccgtttttggacctaacattctgcggccacaggtagaggacccagtaaccatcatggaaggcacttccctcgtccagcacctgatgaccgtcctcatccgcaaacacagccagctcttcacggcaccggtcccggaagggcccacctccccgcgcgggggcctgcaatgcgcagtggggtggggctccgaggaggtcaccagggacagccaaggagagcccggcggccccggcctgcccgcgcacaggacctcttccctggacggggcggccgtggcggtgctctccagaacagcccccacggggccggggagccggtgcagccctgggaagaaggtgcagaccctgcccagttggaagtcctccttccggcagccgaggtccctatcgggaagcccgaaggggggcggctcatccctggaggtgcccatcatctcctccggcgggaactggcttatgaacgggctgtcctccctgcgcggacaccgccgggcctcgtcgggagaccggctcaaggactcgggctccgtgcagagactctccacctacgacaatgtgcccgcgccgggcctggtccccggcatacccagcgtggccagtatggcgtggtccggggcctcgtccagcgagtcgtcggtggggggctcactcagcagctgcacggcctgccgcgccagcgactcgtctgcccgcagttccctgcacaccgactgggccctggagccctccccgctccccagcagcagcgaggaccccaagtccctggacctggaccacagcatggacgaggcgggcgcgggtgccagcaacagcgagcccagcgagccggacagccccacccgggaacacgcgcgccgctccgaggccttacaggggctggtcactgagctcagggccgagctgtgccgccagcggactgagtacgagaggagtgtgaaaagaatcgaagaagggagtgctgacctgagaaaacgaatgtcccggttagaagaagaactggaccaggaaaagaaaaaatacatcatgctggaaataaagctgcggaactctgaacgggcgcgggaggatgcggagaggaggaaccagctgttgcagagggaaatggaggagtttttttcgaccctaggaagcttgactgttggggcaaaaggtgccagggccccaaagtaaaaggaatggcagagctcacttctgtaccacgtctgctggtctccagccttgtatggagttagaagcgtctgtatctctggagcagccaggcgctctggagccagctggagagagagagatcctgatacctctgtggggactgtggggacttttgggaccccacacactccaggtgggatcagatgctgctccaaccatgcagttcctggtgagggtcagaaggggacggtaccaagagtagcgcttagcccttacccaggaaatatccttcatggccacagaaatggagggcgcccaggatccaggcagccaccgggaacagtcagctttctttattaaatgtgctcacaaagca

SEQ ID NO: 175698 - DNA, 2380 bp, Homo sapiens
  Payload ID: 14510
  Gene Symbol: ARHGAP22
  Gene Name: Rho GTPase activating protein 22
  ENST ID: ENST00000374172
  CDS Start-End: 256-2025
gatgctccaaatatccctacaaagtactttattattcctgtttcacagacaaggaaactggggcacagacaggttgaacaatgttcctgtagctgagccaggatttgaacccagggatttatttctctacaagggacacaggtgactgaacttcctcctggccccgaggacccagggaagcacctctttgagatcagcccaggtggtgccggggagcgggagaaggtgccggccaaccccgaggcgctcctgctcatggccagctcccagcgtgacatggaggactgggtgcaggccatccgccgagtcatctgggccccgctgggcggaggtactgcccgtagatcgcatgcccaccctctagaacccttgcctccagggatctttgggcagcgcctagaggaaacagtccaccacgagcggaagtatggcccccgcctggcgcccctgctggtggagcagtgtgtggacttcatccgggagcgcgggctcactgaggaggggctgttccgcatgccaggccaggccaacctggtgagggacctgcaggattccttcgactgtggggagaagccactgtttgacagcacaacagacgtgcacacggtggcctccctgctgaagctgtacctgcgggagctccccgagcccgtggtccccttcgccaggtacgaggacttcctcagctgcgcccagctgctcaccaaggacgagggggagggcactctggagttggctaaacaagtgagcaaccttcctcaggcaaattacaacctgctcagatacatctgcaagtttctggatgaagttcaggcatactcaaatgtcaacaagatgagtgtccagaatctggcaaccgtttttggacctaacattctgcggccacaggtagaggacccagtaaccatcatggaaggcacttccctcgtccagcacctgatgaccgtcctcatccgcaaacacagccagctcttcacggcaccggtcccggaagggcccacctccccgcgcgggggcctgcaatgcgcagtggggtggggctccgaggaggtcaccagggacagccaaggagagcccggcggccccggcctgcccgcgcacaggacctcttccctggacggggcggccgtggcggtgctctccagaacagcccccacggggccggggagccggtgcagccctgggaagaaggtgcagaccctgcccagttggaagtcctccttccggcagccgaggtccctatcgggaagcccgaaggggggcggctcatccctggaggtgcccatcatctcctccggcgggaactggcttatgaacgggctgtcctccctgcgcggacaccgccgggcctcgtcgggagaccggctcaaggactcgggctccgtgcagagactctccacctacgacaatgtgcccgcgccgggcctggtccccggcatacccagcgtggccagtatggcgtggtccggggcctcgtccagcgagtcgtcggtggggggctcactcagcagctgcacggcctgccgcgccagcgactcgtctgcccgcagttccctgcacaccgactgggccctggagccctccccgctccccagcagcagcgaggaccccaagtccctggacctggaccacagcatggacgaggcgggcgcgggtgccagcaacagcgagcccagcgagccggacagccccacccgggaacacgcgcgccgctccgaggccttacaggggctggtcactgagctcagggccgagctgtgccgccagcggactgagtacgagaggagtgtgaaaagaatcgaagaagggagtgctgacctgagaaaacgaatgtcccggttagaagaagaactggaccaggaaaagaaaaaatacatcatgctggaaataaagctgcggaactctgaacgggcgcgggaggatgcggagaggaggaaccagctgttgcagagggaaatggaggagtttttttcgaccctaggaagcttgactgttggggcaaaaggtgccagggccccaaagtaaaaggaatggcagagctcacttctgtaccacgtctgctggtctccagccttgtatggagttagaagcgtctgtatctctggagcagccaggcgctctggagccagctggagagagagagatcctgatacctctgtggggactgtggggacttttgggaccccacacactccaggtgggatcagatgctgctccaaccatgcagttcctggtgagggtcagaaggggacggtaccaagagtagcgcttagcccttacccaggaaatatccttcatggccacagaaatggagggcgcccaggatccaggcagccaccgggaacagtcagctttctttattaaatgtgctcacaaagca

SEQ ID NO: 175699 - DNA, 2340 bp, Homo sapiens
  Payload ID: 14510
  Gene Symbol: ARHGAP22
  Gene Name: Rho GTPase activating protein 22
  Uniprot ID: Q7Z5H3
  ENST ID: ENST00000417247
  CDS Start-End: 160-1986
aaaaggcctcagcctgatgcccacaggcagagcacacaggcagccgagtggccgcagccctgcagtggaggagtgcctcgtgcacctggtggttttctgcaccccaacaggtgtgtctggccactgctcctctcactgcagcccccgctgctccacaccatgcccttctggcccatcaggtgtctgaagaggagcaggcgtatgcccaggggtggtgccggggagcgggagaaggtgccggccaaccccgaggcgctcctgctcatggccagctcccagcgtgacatggaggactgggtgcaggccatccgccgagtcatctgggccccgctgggcggagggatctttgggcagcgcctagaggaaacagtccaccacgagcggaagtatggcccccgcctggcgcccctgctggtggagcagtgtgtggacttcatccgggagcgcgggctcactgaggaggggctgttccgcatgccaggccaggccaacctggtgagggacctgcaggattccttcgactgtggggagaagccactgtttgacagcacaacagacgtgcacacggtggcctccctgctgaagctgtacctgcgggagctccccgagcccgtggtccccttcgccaggtacgaggacttcctcagctgcgcccagctgctcaccaaggacgagggggagggcactctggagttggctaaacaagtgagcaaccttcctcaggcaaattacaacctgctcagatacatctgcaagtttctggatgaagttcaggcatactcaaatgtcaacaagatgagtgtccagaatctggcaaccgtttttggacctaacattctgcggccacaggtagaggacccagtaaccatcatggaaggcacttccctcgtccagcacctgatgaccgtcctcatccgcaaacacagccagctcttcacggcaccggtcccggaagggcccacctccccgcgcgggggcctgcaatgcgcagtggggtggggctccgaggaggtcaccagggacagccaaggagagcccggcggccccggcctgcccgcgcacaggacctcttccctggacggggcggccgtggcggtgctctccagaacagcccccacggggccggggagccggtgcagccctgggaagaaggtgcagaccctgcccagttggaagtcctccttccggcagccgaggtccctatcgggaagcccgaaggggggcggctcatccctggaggtgcccatcatctcctccggcgggaactggcttatgaacgggctgtcctccctgcgcggacaccgccgggcctcgtcgggagaccggctcaaggactcgggctccgtgcagagactctccacctacgacaatgtgcccgcgccgggcctggtccccggcatacccagcgtggccagtatggcgtggtccggggcctcgtccagcgagtcgtcggtggggggctcactcagcagctgcacggcctgccgcgccagcgactcgtctgcccgcagttccctgcacaccgactgggccctggagccctccccgctccccagcagcagcgaggaccccaagtccctggacctggaccacagcatggacgaggcgggcgcgggtgccagcaacagcgagcccagcgagccggacagccccacccgggaacacgcgcgccgctccgaggccttacaggggctggtcactgagctcagggccgagctgtgccgccagcggactgagtacgagaggagtgtgaaaagaatcgaagaagggagtgctgacctgagaaaacgaatgtcccggttagaagaagaactggaccaggaaaagaaaaaatacatcatgctggaaataaagctgcggaactctgaacgggcgcgggaggatgcggagaggaggaaccagctgttgcagagggaaatggaggagtttttttcgaccctaggaagcttgactgttggggcaaaaggtgccagggccccaaagtaaaaggaatggcagagctcacttctgtaccacgtctgctggtctccagccttgtatggagttagaagcgtctgtatctctggagcagccaggcgctctggagccagctggagagagagagatcctgatacctctgtggggactgtggggacttttgggaccccacacactccaggtgggatcagatgctgctccaaccatgcagttcctggtgagggtcagaaggggacggtaccaagagtagcgcttagcccttacccaggaaatatccttcatggccacagaaatggagggcgcccaggatccaggcagccaccgggaacagtcagctttctttattaaatgtgctcacaaagc

SEQ ID NO: 175700 - DNA, 2352 bp, Homo sapiens
  Payload ID: 14510
  Gene Symbol: ARHGAP22
  Gene Name: Rho GTPase activating protein 22
  Uniprot ID: Q7Z5H3
  ENST ID: ENST00000417912
  CDS Start-End: 157-2301
caggagaggtagccgagggagcctgacgggtgacgccagcggccacggggccccgaacgagcaggacatgaggggcgactaggcgcgaggacgagcaaaagcaagtggatgacagcatgaacggccctgcggggctggccggacggctgcaagaacatgctgagcccaaagatcaggcaggccaggagggcccgctccaaaagcctagtgatgggggagcagagccggagccctgggcggatgccgtgccctcacaggctgggccccgtgctgaaggcgggctggctgaagaagcagaggagcatcatgaagaactggcagcagcgctggtttgtgctgcgtggggatcagcttttctactacaaggacaaagatgagatcaagccccagggatttatttctctacaagggacacaggtgactgaacttcctcctggccccgaggacccagggaagcacctctttgagatcagcccaggtggtgccggggagcgggagaaggtgccggccaaccccgaggcgctcctgctcatggccagctcccagcgtgacatggaggactgggtgcaggccatccgccgagtcatctgggccccgctgggcggaggtactgcccgtagatcgcatgcccaccctctagaacccttgcctccagggatctttgggcagcgcctagaggaaacagtccaccacgagcggaagtatggcccccgcctggcgcccctgctggtggagcagtgtgtggacttcatccgggagcgcgggctcactgaggaggggctgttccgcatgccaggccaggccaacctggtgagggacctgcaggattccttcgactgtggggagaagccactgtttgacagcacaacagacgtgcacacggtggcctccctgctgaagctgtacctgcgggagctccccgagcccgtggtccccttcgccaggtacgaggacttcctcagctgcgcccagctgctcaccaaggacgagggggagggcactctggagttggctaaacaagtgagcaaccttcctcaggcaaattacaacctgctcagatacatctgcaagtttctggatgaagttcaggcatactcaaatgtcaacaagatgagtgtccagaatctggcaaccgtttttggacctaacattctgcggccacaggtagaggacccagtaaccatcatggaaggcacttccctcgtccagcacctgatgaccgtcctcatccgcaaacacagccagctcttcacggcaccggtcccggaagggcccacctccccgcgcgggggcctgcaatgcgcagtggggtggggctccgaggaggtcaccagggacagccaaggagagcccggcggccccggcctgcccgcgcacaggacctcttccctggacggggcggccgtggcggtgctctccagaacagcccccacggggccggggagccggtgcagccctgggaagaaggtgcagaccctgcccagttggaagtcctccttccggcagccgaggtccctatcgggaagcccgaaggggggcggctcatccctggaggtgcccatcatctcctccggcgggaactggcttatgaacgggctgtcctccctgcgcggacaccgccgggcctcgtcgggagaccggctcaaggactcgggctccgtgcagagactctccacctacgacaatgtgcccgcgccgggcctggtccccggcatacccagcgtggccagtatggcgtggtccggggcctcgtccagcgagtcgtcggtggggggctcactcagcagctgcacggcctgccgcgccagcgactcgtctgcccgcagttccctgcacaccgactgggccctggagccctccccgctccccagcagcagcgaggaccccaagtccctggacctggaccacagcatggacgaggcgggcgcgggtgccagcaacagcgagcccagcgagccggacagccccacccgggaacacgcgcgccgctccgaggccttacaggggctggtcactgagctcagggccgagctgtgccgccagcggactgagtacgagaggagtgtgaaaagaatcgaagaagggagtgctgacctgagaaaacgaatgtcccggttagaagaagaactggaccaggaaaagaaaaaatacatcatgctggaaataaagctgcggaactctgaacgggcgcgggaggatgcggagaggaggaaccagctgttgcagagggaaatggaggagtttttttcgaccctaggaagcttgactgttggggcaaaaggtgccagggccccaaagtaaaaggaatggcagagctcacttctgtaccacgtctgctggtctccagccttg

SEQ ID NO: 175701 - DNA, 2595 bp, Homo sapiens
  Payload ID: 14510
  Gene Symbol: ARHGAP22
  Gene Name: Rho GTPase activating protein 22
  Uniprot ID: Q7Z5H3
  ENST ID: ENST00000435790
  CDS Start-End: 332-2446
acttctcaattctttgttctgtgaagtggttgtcactattgttcccattttacagatttgaggaactgataccccaagaccccgtgactttctcaaggccattccaagatccctagatgcacttacgcttaatgaactaattcttcacagcgaggcttcttgcttaaaatccaagaaaataccagataaagggcattctaaatatatttcttttctatagatgtggatctcctgttactggaaaacaggaattagcttgtctgcttgaggatgtggttggttctttataaaaaggatacagaagaaatttgcacagactgccagcttcattatgctgccgacagcttccagcaaaaggaggacgtttgcagccagatatttcacccgctccaaaagcctagtgatgggggagcagagccggagccctgggcggatgccgtgccctcacaggctgggccccgtgctgaaggcgggctggctgaagaagcagaggagcatcatgaagaactggcagcagcgctggtttgtgctgcgtggggatcagcttttctactacaaggacaaagatgagatcaagccccagggatttatttctctacaagggacacaggtgactgaacttcctcctggccccgaggacccagggaagcacctctttgagatcagcccaggtggtgccggggagcgggagaaggtgccggccaaccccgaggcgctcctgctcatggccagctcccagcgtgacatggaggactgggtgcaggccatccgccgagtcatctgggccccgctgggcggagggatctttgggcagcgcctagaggaaacagtccaccacgagcggaagtatggcccccgcctggcgcccctgctggtggagcagtgtgtggacttcatccgggagcgcgggctcactgaggaggggctgttccgcatgccaggccaggccaacctggtgagggacctgcaggattccttcgactgtggggagaagccactgtttgacagcacaacagacgtgcacacggtggcctccctgctgaagctgtacctgcgggagctccccgagcccgtggtccccttcgccaggtacgaggacttcctcagctgcgcccagctgctcaccaaggacgagggggagggcactctggagttggctaaacaagtgagcaaccttcctcaggcaaattacaacctgctcagatacatctgcaagtttctggatgaagttcaggcatactcaaatgtcaacaagatgagtgtccagaatctggcaaccgtttttggacctaacattctgcggccacaggtagaggacccagtaaccatcatggaaggcacttccctcgtccagcacctgatgaccgtcctcatccgcaaacacagccagctcttcacggcaccggtcccggaagggcccacctccccgcgcgggggcctgcaatgcgcagtggggtggggctccgaggaggtcaccagggacagccaaggagagcccggcggccccggcctgcccgcgcacaggacctcttccctggacggggcggccgtggcggtgctctccagaacagcccccacggggccggggagccggtgcagccctgggaagaaggtgcagaccctgcccagttggaagtcctccttccggcagccgaggtccctatcgggaagcccgaaggggggcggctcatccctggaggtgcccatcatctcctccggcgggaactggcttatgaacgggctgtcctccctgcgcggacaccgccgggcctcgtcgggagaccggctcaaggactcgggctccgtgcagagactctccacctacgacaatgtgcccgcgccgggcctggtccccggcatacccagcgtggccagtatggcgtggtccggggcctcgtccagcgagtcgtcggtggggggctcactcagcagctgcacggcctgccgcgccagcgactcgtctgcccgcagttccctgcacaccgactgggccctggagccctccccgctccccagcagcagcgaggaccccaagtccctggacctggaccacagcatggacgaggcgggcgcgggtgccagcaacagcgagcccagcgagccggacagccccacccgggaacacgcgcgccgctccgaggccttacaggggctggtcactgagctcagggccgagctgtgccgccagcggactgagtacgagaggagtgtgaaaagaatcgaagaagggagtgctgacctgagaaaacgaatgtcccggttagaagaagaactggaccaggaaaagaaaaaatacatcatgctggaaataaagctgcggaactctgaacgggcgcgggaggatgcggagaggaggaaccagctgttgcagagggaaatggaggagtttttttcgaccctaggaagcttgactgttggggcaaaaggtgccagggccccaaagtaaaaggaatggcagagctcacttctgtaccacgtctgctggtctccagccttgtatggagttagaagcgtctgtatctctggagcagccaggcgctctggagccagctggagagagagagatcctgatacctctgtggggactgtggggac

SEQ ID NO: 175702 - DNA, 2764 bp, Homo sapiens
  Payload ID: 14510
  Gene Symbol: ARHGAP22
  Gene Name: Rho GTPase activating protein 22
  ENST ID: ENST00000460425
  CDS Start-End: 869-1654
agaggcgccgagcagccgggagctccgtcctgcctgaggatgcggggcccaggctgcatccccccggccctgctcgcctgctcatcacacggaggccggggacagggtcacggccagggagcctgcggggctaaaggagcgggccgggagctcaagagctgccgccgggcggcgaggaaggagccccaggcaggccccgggcggccgaggcaggggaggagacggctggccctggttccaggtgagcagccccgcccgctctgctggaggccccgcttaccaccggcgggagatgcgggtgcaagccctggggcgcacgtggccaggccactgccacgcccgagggacgggttttcgtcgccacctcggccctggtgaaccctgtgactggagtgcctcccaatcccaccgtgatgcccacctcggggcgctgccaggtgccaggctaatgcgtgtgatccacagtgtgctgagaagtgctgactgtcattgtgaatgtccgtggtggggtgacgcccgggcagggtgcactggcctggttccagaagacctggcctctccagctcccacggcgcgcccgtttgctgcgtggcccatgctgctggcggctgctcctggctgagtcattccaagacgagcgtccagtccgcgctctctgccgcccttcccagcgctgcccggcaggccccgggaactgtgcccagctgtgcccgcttagctggtgtatgacctgcctttgaacttgctgcaaagaaagatgtggatctcctgttactggaaaacaggaattagcttgtctgcttgaggatgtggttggttctttataaaaaggatacagaagaaatttgcacagactgccagcttcattatgctgccgacagcttccagcaaaaggaggacgtttgcagccagatatttcacccgctccaaaagcctagtgatgggggagcagagccggagccctgggcggatgccgtgccctcacaggctgggccccgtgctgaaggcgggctggctgaagaagcagaggagcatcatgaagaactggcagcagcgctggtttgtgctgcgtggggatcagcttttctactacaaggacaaagatgagatcaagccccagggatttatttctctacaagggacacaggtgactgaacttcctcctggccccgaggacccagggaagcacctctttgagatcagcccaggtggtgccggggagcgggagaaggtgccggccaaccccgaggcgctcctgctcatggccagctcccagcgtgacatggaggactgggtgcaggccatccgccgagtcatctgggccccgctgggcggagggatctttgggcagcgcctagaggaaacagtccaccacgagcggaagtatggcccccgcctggcgcccctgctggtggagcagtgtgtggacttcatccgggagcgcgggctcactgaggaggggctgttccgcatgccaggccaggccaacctggtgagggacctgcaggattccttcgactgtggggagaagccactgtttgacagcacaacagacgtgcacacggtggcctccctgctgaagctgtacctgcgggagctccccgagcccgtggtccccttcgccagggcactctggagttggctaaacaagtgagcaaccttcctcaggcaaattacaacctgctcagatacatctgcaagtttctggatgaagttcaggcatactcaaatgtcaacaagatgagtgtccagaatctggcaaccgtttttggacctaacattctgcggccacaggtagaggacccagtaaccatcatggaaggcacttccctcgtccagcacctgatgaccgtcctcatccgcaaacacagccagctcttcacggcaccggtcccggaagggcccacctccccgcgcgggggcctgcaatgcgcagtggggtggggctccgaggaggtcaccagggacagccaaggagagcccggcggccccggcctgcccgcgcacaggacctcttccctggacggggcggccgtggcggtgctctccagaacagcccccacggggccggggagccggtgcagccctgggaagaaggtgcagaccctgcccagttggaagtcctccttccggcagccgaggtccctatcgggaagcccgaaggggggcggctcatccctggaggtgcccatcatctcctccggcgggaactggcttatgaacgggctgtcctccctgcgcggacaccgccgggcctcgtcgggagaccggctcaaggactcgggctccgtgcagagactctccacctacgacaatgtgcccgcgccgggcctggtccccggcatacccagcgtggccagtatggcgtggtccggggcctcgtccagcgagtcgtcggtggggggctcactcagcagctgcacggcctgccgcgccagcgactcgtctgcccgcagttccctgcacaccgactgggccctggagccctccccgctccccagcagcagcgaggaccccaagtccctggacctggaccacagcatggacgaggcgggcgcgggtgccagcaacagcgagcccagcgagccggacagccccacccgggaacacgcgcgccgctccgaggccttacaggggctggtcactgagctcagggccgagctgtgccgccagcggactgagtacgagaggagtgtgaaaagaatcgaagaagggagtgctgacctgagaaaacgaatgtcccggttagaagaagaactggacc

SEQ ID NO: 175703 - DNA, 1951 bp, Homo sapiens
  Payload ID: 14510
  Gene Symbol: ARHGAP22
  Gene Name: Rho GTPase activating protein 22
  ENST ID: ENST00000477708
  CDS Start-End: 1-1596
atgtgtgtgcccccacacaggaaagatggctctattccctgtcccagagccctatgctcccagagtgtggacattcaggcatggcagttgtcagcagcacagaggggtgacgtggggcagccgagagagttctggcatctcaggtcccaggttccagttccaacctgccacctgctcaccgtgcagccttggtgcctgcttcctcaccccaccccagctggagggcgtgagcgcaggcacagtgcttcctccctgcttgcggctctgtgcctgaggaaggcggttctgcggccccatcctgctgtcctgcctggagttggagggtgtgtggtcctttcctctgggcggatgaaggctcccttgaggggcggcctggctctggggacagggccagctcccacgaagctgcagcttctccatgactggcagagcgagcctgggccgagtggctggcagcaaggcccttctccgcctctcttcccggcaggcacttccctcgtccagcacctgatgaccgtcctcatccgcaaacacagccagctcttcacggcaccggtcccggaagggcccacctccccgcgcgggggcctgcaatgcgcagtggggtggggctccgaggaggtcaccagggacagccaaggagagcccggcggccccggcctgcccgcgcacaggacctcttccctggacggggcggccgtggcggtgctctccagaacagcccccacggggccggggagccggtgcagccctgggaagaaggtgcagaccctgcccagttggaagtcctccttccggcagccgaggtccctatcgggaagcccgaaggggggcggctcatccctggaggtgcccatcatctcctccggcgggaactggcttatgaacgggctgtcctccctgcgcggacaccgccgggcctcgtcgggagaccggctcaaggactcgggctccgtgcagagactctccacctacgacaatgtgcccgcgccgggcctggtccccggcatacccagcgtggccagtatggcgtggtccggggcctcgtccagcgagtcgtcggtggggggctcactcagcagctgcacggcctgccgcgccagcgactcgtctgcccgcagttccctgcacaccgactgggccctggagccctccccgctccccagcagcagcgaggaccccaagtccctggacctggaccacagcatggacgaggcgggcgcgggtgccagcaacagcgagcccagcgagccggacagccccacccgggaacacgcgcgccgctccgaggccttacaggggctggtcactgagctcagggccgagctgtgccgccagcggactgagtacgagaggagtgtgaaaagaatcgaagaagggagtgctgacctgagaaaacgaatgtcccggttagaagaagaactggaccaggaaaagaaaaaatacatcatgctggaaataaagctgcggaactctgaacgggcgcgggaggatgcggagaggaggaaccagctgttgcagagggaaatggaggagtttttttcgaccctaggaagcttgactgttggggcaaaaggtgccagggccccaaagtaaaaggaatggcagagctcacttctgtaccacgtctgctggtctccagccttgtatggagttagaagcgtctgtatctctggagcagccaggcgctctggagccagctggagagagagagatcctgatacctctgtggggactgtggggacttttgggaccccacacactccaggtgggatcagatgctgctccaaccatgcagttcctggtgagggtcagaaggggacggtaccaagagtagcgcttagcccttacccaggaaatatccttcatggccacagaaatggagggcgcccaggatccaggcagccaccgggaacagtcagctttctttattaaatgtgctcacaaagca

SEQ ID NO: 175704 - DNA, 407 bp, Homo sapiens
  Payload ID: 14511
  Gene Symbol: ARHGAP23
  Gene Name: Rho GTPase activating protein 23
  ENST ID: ENST00000620329
  CDS Start-End: 1-407
atccgggatctcccaggacactactatgaaacgctcaaattccttgtgggccatctcaagaccatcgctgaccactctgagaaaaacaagatggaaccccggaacctggccctggtctttgggccgacactggtgaggacgtctgaggacaacatgacagacatggtgacccacatgcctgaccgctacaagatcgtggagacactgatccagcactcagactggttcttcagtgacgaagaggacaagggagagagaattctaccacctgtagttcagccaagtccaagggttcgtgggcccccaagaaggagccgtacgcccgggagatgctggcgatctccttcatctcggccgtcaaccgcaagcgcaagaagcggcgggaggcgcgggggctgggcagcagc

SEQ ID NO: 175705 - DNA, 5964 bp, Homo sapiens
  Payload ID: 14511
  Gene Symbol: ARHGAP23
  Gene Name: Rho GTPase activating protein 23
  Uniprot ID: Q9P227
  ENST ID: ENST00000610551
  CDS Start-End: 69-4544
ccgcccctcccgggtccctgccggcgcccccagccgtgccccggccgcagagccgccgctgccacccgatgaatggagtcgccttctgcctggtcgggatcccgccccgcccggagccccggcccccacagctgccactgggcccaagagatgggtgctctcctaggcgccccttcccctggcaggggccgaggacgctgctgctgtacaaaagtccccaggacggctttggcttcactctgcgccacttcatcgtgtacccacccgagtcggccgtgcactgcagcctgaaggaggaagagaatggaggccgtggaggaggaccctccccccggtaccgcctggagcccatggacaccatctttgtcaagaatgtgaaggaagacggccctgcccatagggcggggcttcgcacaggagaccggctggtaaaggtgaatggggaaagcgtcattgggaagacctactctcaggtcatagctctgatccagaatagtgatgacactctggagctgtctatcatgcccaaggacgaggacatcctccagctggcctactcccaggatgcctacctgaaagggaacgagccgtattctggagaggcccgcagcatcccagagccaccgccgatctgctacccccgcaagacctacgcccctcctgcccgggcctccaccagggccactatggtgcctgagcccacctcagcactgcccagtgacccccggagtcctgctgcctggagtgacccggggctccgtgtgccacctgctgcccgtgcccacctggacaactcttccttggggatgagccagccccgccccagccctggtgccttcccccacctctcctcggagccccggacgccccgtgccttcccagagcctggcagccgggtgccccccagcagactggagtgccagcaggccttgtcacactggctgtcaaaccaggtaccccgccgggcgggggagagacggtgcccagccatggccccccgggcccgcagcgcctcccaggaccggttggaggaggtggctgccccccgcccgtggccctgctccacctcccaggatgctttgagccagctgggccaggagggctggcaccgagctcgctcagatgactacttgagccgggccacccgttctgccgaggcactggggccaggggcactggtgtcaccccgctttgagcggtgtggctgggcttcccagcgttcgtctgcccgcacccccgcctgcccaactcgggacctgccagggccccaggccccacccccgtctggcctgcagggcctggatgacctcgggtacatcggctaccggagctacagcccatcattccagcgccggaccggcctcctccatgcgctctccttccgggactcaccctttggggggctgcctaccttcaacctggcccagtcccctgcgtcattcccaccagaggcctccgagccacccagggttgtacggccggaacccagcacccgggccctggagcctcctgcggaggatcgcggcgatgaggtggtcctgaggcagaagcccccgacgggccgcaaggttcagctgacccccgcaagacagatgaaccttggatttggtgacgagtccccagagccagaggccagtgggcgaggggaacgcctgggcaggaaggtggcccctttggccaccaccgaagactctctggcttccatcccctttattgatgagcccaccagccccagcattgacctccaagccaagcacgtccctgcctctgctgtggtctccagtgccatgaactcagcccctgtcctgggcaccagcccatcttccccgaccttcactttcaccctcggacgccattactcgcaggactgcagcagcatcaaggctggccgccgctcctcctacctgctggccatcaccacggagcgctccaagtcctgcgatgatggactcaacaccttccgcgacgagggccgggttctgcggcgcctgccaaaccgcatacccagcctgcggatgctccggagcttcttcaccgacgggtccttggatagctggggcacctctgaagatgctgacgctccttctaagcgacactcaacctctgacctctcagatgcgaccttcagcgatatcaggagagaaggctggttgtattataagcagattctcaccaagaaggggaagaaagcgggcagcggcctgcgccagtggaagcgggtgtacgccgcgctgcgggcgcgctcgctctcgctgagcaaggagcggcgggagcccgggccggcggcggcgggggctgcggcggccggcgcaggtgaggacgaggcggcgcccgtctgcatcggctcctgcctcgtggacatctcctacagcgagaccaagaggaggcacgtgttccggctgaccaccgctgacttctgtgaatatctctttcaggctgaggaccgggatgacatgctgggctggatcagagcgatccgggagaacagcagggccgagggcgaggaccccggctgtgccaaccaagctctgatcagcaagaagcttaacgattatcgcaaagtgagccatagctctgggcccaaagctgattcctcccccaaaggctctcgcggcctggggggcctcaagtctgagttcctcaagcagagtgcggcacgtggcctcaggactcaggacctgcccgcagggagcaaggatgacagtgctgcagcccccaaaaccccctggggcatcaacatcatcaagaaaaataagaaggccgctccgagggcgtttggggtcaggctggaggagtgccagccagccacggagaaccagcgcgtccccttaatcgtggctgcatgctgtcgcattgtggaggcacgagggctggagtccacaggcatttaccgagtgcccggcaacaatgcagtggtgtccagcctacaggagcagctcaaccgcgggcctggtgacatcaacctgcaggatgagcgctggcaagacctcaatgtgatcagcagcctgctcaagtccttcttccgaaagctgcccgagcctcttttcactgatgacaaatacaacgacttcatcgaggccaaccgcattgaggacgcacgggagcgaatgaggacgctgcggaagctgatccgggatctcccaggacactactatgaaacgctcaaattccttgtgggccatctcaagaccatcgctgaccactctgagaaaaacaagatggaaccccggaacctggccctggtctttgggccgacactggtgaggacgtctgaggacaacatgacagacatggtgacccacatgcctgaccgctacaagatcgtggagacactgatccagcactcagactggttcttcagtgacgaagaggacaagggagagagaacccctgtgggcgacaaggagcctcaggcagtgcccaacattgagtacctcctgcccaacattggcaggacagtgccccctggcgacccggggtcagattctaccacctgtagttcagccaagtccaagggttcgtgggcccccaagaaggagccgtacgcccgggagatgctggcgatctccttcatctcggccgtcaaccgcaagcgcaagaagcggcgggaggcgcgggggctgggcagcagcaccgacgacgactcggagcaggaggcgcacaagcctggggcgggggccacagcgccggggactcaggagcggccgcaggggccgctgcctggcgccgtcgcccccgaggcccccggacgcctcagtcccccggcggcgccggaggagcggccggccgcggacacgcgctccattgtgtcgggctactccaccctgtccaccatggaccgcagcgtgtgctcgggcgctagcggtcggcgggcaggggcgggggatgaggcggacgacgagcgtagcgagctgagccacgtggagacggacactgagggcgcggcgggcgcggggcctggggggcgcctgacacgccggccgtccttcagctcgcaccacctcatgccctgcgacactctggcgcgccgccgcctggcccggggccgcccagacggcgagggcgcgggccggggcggtccccgcgccccggagccgcccggctcggcgtcgtccagcagccaggagtcgctgcggcccccggcggcggcgctggcctcccggccctcgcgcatggaggcgctgcgtctaaggctccgcggcacggcggacgacatgctcgccgtgcgcctgcggcggccgctgtcgcccgagacccggcggcgccggagcagctggcgccgccacaccgtggtggtgcagagcccgctgactgacctcaacttcaacgagtggaaggagctgggcggagggggccccccggagcctgcgggcgcgcgggcgcacagtgacaacaaggactccggactcagcagcctggagtccaccaaggcgcgggccccgtcgtccgctgcctcgcagccgcccgcgcccggggacacggggtccctgcagagccagcccccgcgccgctcggccgcctcccgcctgcatcagtgtctgtgatccccacctcccgcgccgctcgggcgccacccctccctagagcccctttggaaccaggaggcttcaccagcctgcacctcctcttctgtggcccctgggtgcatggtgtgggtggagggcgcagcaggcagtgtctctagttggtgtgctggaactggcagggcagaggagaaggctggggccggactaattgaatggaagggggttccagaggtgatgagcagaagaggagggggcgtgggctgctggggtctgtgtccctgcacacatgcgcccgataggtccttctgagcctttctgtggctgcacttggggacccttgtggaccatggggtgtggctagggaacccctaagtttcagactaaaggaaagatcctgggtgatgctggctttttgcttctttcttctgccctcccacctcagcttgtaagcggggatgtgtgtatgtctggggagaggaggtgtagggtgcgtatgtccatggggggaggggcttgtgtgtgcagtcattgtcccaaggtgtttccagtagcgacttctgtccccctatccccaccctggtccccactttgcgcccccgggctccctgcctttggtgcacacaggatcctgcccgccccccttgccagagccagagaagggggttggggccattccaaggaggcaggactgaaaccctcaccagggttactccccaacatccttttgcctgagtcaccctctaagcgctttaaccacgggcagctgcctgttccccagacagtttttggtggggggggtccagggtcccccttgctggtacctccctcacccctctttttgtttttccatctgtgcctgttccttccacagcccaggcacacagaagcccaccttcttccccttaggaggagggatagtcaacacccctgctgtctctctgtcactcacacactgatttatggggtctgagctgggctgttcctgcaggatggacaggacccagcgccctcttctccccacaggctgtaaatagacttccaatcaccaggccagcccccacacaccctcactcattccagggaagcccaggtaggtggtgaacccgctgccacgtctatcagtcctcttgttttatgcaaagatttactgtaaagtagatttctttccctccctcccccattcttttattgtaaatattgtctctaaatgtgtaacatattataaagaatttataaggatttttaaagatgttttgctcatttacaaaagtgttgtaacagtgttggacaaagccttccaccccatgtccgcatggctcctttcactgtgtccttgacacacctctctggcaacaactaaaatttcctgcttctgaaaagtcctgtcttaaaagtacagtctatatcttggaaataaatagctttcctcaaggcatga

SEQ ID NO: 175706 - DNA, 488 bp, Homo sapiens
  Payload ID: 14511
  Gene Symbol: ARHGAP23
  Gene Name: Rho GTPase activating protein 23
  ENST ID: ENST00000616909
  CDS Start-End: 1-488
cgaccttcagcgatatcaggagagaaggctggttgtattataagcagattctcaccaagaaggggaaggctgaggaccgggatgacatgctgggctggatcagagcgatccgggagaacagcagggccgagggcgaggaccccggctgtgccaaccaagctctgatcagcaagaagcttaacgattatcgcaaagtgagccatagctctgggcccaaagctgattcctcccccaaaggctctcgcggcctggggggcctcaagtctgagttcctcaagcagagtgcggcacgtggcctcaggactcaggacctgcccgcagggagcaaggatgacagtgctgcagcccccaaaaccccctggggcatcaacatcatcaagaaaaataagaaggccgctccgagggcgtttggggtcaggctggaggagtgccagccagccacggagaaccagcgcgtccccttaatcgtggctgcatgctgtcgcatt

SEQ ID NO: 175707 - DNA, 5964 bp, Homo sapiens
  Payload ID: 14511
  Gene Symbol: ARHGAP23
  Gene Name: Rho GTPase activating protein 23
  Uniprot ID: Q9P227
  ENST ID: ENST00000622683
  CDS Start-End: 69-4544
ccgcccctcccgggtccctgccggcgcccccagccgtgccccggccgcagagccgccgctgccacccgatgaatggagtcgccttctgcctggtcgggatcccgccccgcccggagccccggcccccacagctgccactgggcccaagagatgggtgctctcctaggcgccccttcccctggcaggggccgaggacgctgctgctgtacaaaagtccccaggacggctttggcttcactctgcgccacttcatcgtgtacccacccgagtcggccgtgcactgcagcctgaaggaggaagagaatggaggccgtggaggaggaccctccccccggtaccgcctggagcccatggacaccatctttgtcaagaatgtgaaggaagacggccctgcccatagggcggggcttcgcacaggagaccggctggtaaaggtgaatggggaaagcgtcattgggaagacctactctcaggtcatagctctgatccagaatagtgatgacactctggagctgtctatcatgcccaaggacgaggacatcctccagctggcctactcccaggatgcctacctgaaagggaacgagccgtattctggagaggcccgcagcatcccagagccacccccgatctgctacccccgcaagacctacgcccctcctgcccgggcctccaccagggccactatggtgcctgagcccacctcagcactgcccagtgacccccggagtcctgctgcctggagtgacccggggctccgtgtgccacctgctgcccgtgcccacctggacaactcttccttggggatgagccagccccgccccagccctggtgccttcccccacctctcctcggagccccggacgccccgtgccttcccagagcctggcagccgggtgccccccagcagactggagtgccagcaggccttgtcacactggctgtcaaaccaggtaccccgccgggcgggggagagacggtgcccagccatggccccccgggcccgcagcgcctcccaggaccggttggaggaggtggctgccccccgcccgtggccctgctccacctcccaggatgctttgagccagctgggccaggagggctggcaccgagctcgctcagatgactacttgagccgggccacccgttctgccgaggcactggggccaggggcactggtgtcaccccgctttgagcggtgtggctgggcttcccagcgttcgtctgcccgcacccccgcctgcccaactcgggacctgccagggccccaggccccacccccgtctggcctgcagggcctggatgacctcgggtacatcggctaccggagctacagcccatcattccagcgccggaccggcctcctccatgcgctctccttccgggactcaccctttggggggctgcctaccttcaacctggcccagtcccctgcgtcattcccaccagaggcctccgagccacccagggttgtacggccggaacccagcacccgggccctggagcctcctgcggaggatcgcggcgatgaggtggtcctgaggcagaagcccccgacgggccgcaaggttcagctgacccccgcaagacagatgaaccttggatttggtgacgagtccccagagccagaggccagtgggcgaggggaacgcctgggcaggaaggtggcccctttggccaccaccgaagactctctggcttccatcccctttattgatgagcccaccagccccagcattgacctccaagccaagcacgtccctgcctctgctgtggtctccagtgccatgaactcagcccctgtcctgggcaccagcccatcttccccgaccttcactttcaccctcggacgccattactcgcaggactgcagcagcatcaaggctggccgccgctcctcctacctgctggccatcaccacggagcgctccaagtcctgcgatgatggactcaacaccttccgcgacgagggccgggttctgcggcgcctgccaaaccgcatacccagcctgcggatgctccggagcttcttcaccgacgggtccttggatagctggggcacctctgaagatgctgacgctccttctaagcgacactcaacctctgacctctcagatgcgaccttcagcgatatcaggagagaaggctggttgtattataagcagattctcaccaagaaggggaagaaagcgggcagcggcctgcgccagtggaagcgggtgtacgccgcgctgcgggcgcgctcgctctcgctgagcaaggagcggcgggagcccgggccggcggcggcgggggctgcggcggccggcgcaggtgaggacgaggcggcgcccgtctgcatcggctcctgcctcgtggacatctcctacagcgagaccaagaggaggcacgtgttccggctgaccaccgctgacttctgtgaatatctctttcaggctgaggaccgggatgacatgctgggctggatcagagcgatccgggagaacagcagggccgagggcgaggaccccggctgtgccaaccaagctctgatcagcaagaagcttaacgattatcgcaaagtgagccatagctctgggcccaaagctgattcctcccccaaaggctctcgcggcctggggggcctcaagtctgagttcctcaagcagagtgcggcacgtggcctcaggactcaggacctgcccgcagggagcaaggatgacagtgctgcagcccccaaaaccccctggggcatcaacatcatcaagaaaaataagaaggccgctccgagggcgtttggggtcaggctggaggagtgccagccagccacggagaaccagcgcgtccccttaatcgtggctgcatgctgtcgcattgtggaggcacgagggctggagtccacaggcatttaccgagtgcccggcaacaatgcagtggtgtccagcctacaggagcagctcaaccgcgggcctggtgacatcaacctgcaggatgagcgctggcaagacctcaatgtgatcagcagcctgctcaagtccttcttccgaaagctgcccgagcctcttttcactgatgacaaatacaacgacttcatcgaggccaaccgcattgaggacgcgcgggagcgaatgaggacgctgcggaagctgatccgggatctcccaggacactactatgaaacgctcaaattccttgtgggccatctcaagaccatcgctgaccactctgagaaaaacaagatggaaccccggaacctggccctggtctttgggccgacactggtgaggacgtctgaggacaacatgacagacatggtgacccacatgcctgaccgctacaagatcgtggagacactgatccagcactcagactggttcttcagtgacgaagaggacaagggagagagaacccctgtgggcgacaaggagcctcaggcagtgcccaacattgagtacctcctgcccaacattggcaggacagtgccccctggcgacccggggtcagattctaccacctgtagttcagccaagtccaagggttcgtgggcccccaagaaggagccgtacgcccgggagatgctggcgatctccttcatctcggccgtcaaccgcaagcgcaagaagcggcgggaggcgcgggggctgggcagcagcaccgacgacgactcggagcaggaggcgcacaagcctggggcgggggccacagcgccggggactcaggagcggccgcaggggccgctgcctggcgccgtcgcccccgaggcccccggacgcctcagtcccccggcggcgccggaggagcggccggccgcggacacgcgctccattgtgtcgggctactccaccctgtccaccatggaccgcagcgtgtgctcgggcgctagcggtcggcgggcaggggcgggggatgaggcggacgacgagcgtagcgagctgagccacgtggagacggacactgagggcgcggcgggcgcggggcctggggggcgcctgacacgccggccgtccttcagctcgcaccacctcatgccctgcgacactctggcgcgccgccgcctggcccggggccgcccagacggcgagggcgcgggccggggcggtccccgcgccccggagccgcccggctcggcgtcgtccagcagccaggagtcgctgcggcccccggcggcggcgctggcctcccggccctcgcgcatggaggcgctgcgtctaaggctccgcggcacggcggacgacatgctcgccgtgcgcctgcggcggccgctgtcgcccgagacccggcggcgccggagcagctggcgccgccacaccgtggtggtgcagagcccgctgactgacctcaacttcaacgagtggaaggagctgggcggagggggccccccggagcctgcgggcgcgcgggcgcacagtgacaacaaggactccggactcagcagcctggagtccaccaaggcgcgggccccgtcgtccgctgcctcgcagccgcccgcgcccggggacacggggtccctgcagagccagcccccgcgccgctcggccgcctcccgcctgcatcagtgtctgtgatccccacctcccgcgccgctcgggcgccacccctccctagagcccctttggaaccaggaggcttcaccagcctgcacctcctcttctgtggcccctgggtgcatggtgtgggtggagggcgcagcaggcagtgtctctagttggtgtgctggaactggcagggcagaggagaaggctggggccggactaattgaatggaagggggttccagaggtgatgagcagaagaggagggggcgtgggctgctggggtctgtgtccctgcacacatgcgcccgataggtccttctgagcctttctgtggctgcacttggggacccttgtggaccatggggtgtggctagggaacccctaagtttcagactaaaggaaagatcctgggtgatgctggctttttgcttctttcttctgccctcccacctcagcttgtaagcggggatgtgtgtatgtctggggagaggaggtgtagggtgcgtatgtccatggggggaggggcttgtgtgtgcagtcattgtcccaaggtgtttccagtagcgacttctgtccccctatccccaccctggtccccactttgcgcccccgggctccctgcctttggtgcacacaggatcctgcccgccccccttgccagagccagagaagggggttggggccattccaaggaggcaggactgaaaccctcaccagggttactccccaacatccttttgcctgagtcaccctctaagcgctttaaccacgggcagctgcctgttccccagacagtttttggtggggggggtccagggtcccccttgctggtacctccctcacccctctttttgtttttccatctgtgcctgttccttccacagcccaggcacacagaagcccaccttcttccccttaggaggagggatagtcaacacccctgctgtctctctgtcactcacacactgatttatggggtctgagctgggctgttcctgcaggatggacaggacccagcgccctcttctccccacaggctgtaaatagacttccaatcaccaggccagcccccacacaccctcactcattccagggaagcccaggtaggtggtgaacccgctgccacgtctatcagtcctcttgttttatgcaaagatttactgtaaagtagatttctttccctccctcccccattcttttattgtaaatattgtctctaaatgtgtaacatattataaagaatttataaggatttttaaagatgttttgctcatttacaaaagtgttgtaacagtgttggacaaagccttccaccccatgtccgcatggctcctttcactgtgtccttgacacacctctctggcaacaactaaaatttcctgcttctgaaaagtcctgtcttaaaagtacagtctatatcttggaaataaatagctttcctcaaggcatga

SEQ ID NO: 175708 - DNA, 438 bp, Homo sapiens
  Payload ID: 14511
  Gene Symbol: ARHGAP23
  Gene Name: Rho GTPase activating protein 23
  ENST ID: ENST00000620325
  CDS Start-End: 1-252
cgcgtccccttaatcgtggctgcatgctgtcgcattgtggaggcacgagggctggagtccacaggcatttaccgagtgcccggcaacaatgcagtggtgtccagcctacaggagcagctcaaccgcgggcctggtgacatcaacctgcaggatgagcgctggcaagacctcaatgtgatcagcagcctgctcaagtccttcttccgaaagctgcccgagcctcttttcactgatggtgcccttctcttctgacctgctgaaccttggtgtccatgtcctggagacgggggcagggaccccttttctgggatcagcatgcagctcagatggtattgcctcccaaatgaacacagctgggctaccccaggtcaggtgcacacccgagtgtagctgtgacaaatacaacgacttcatcgaggccaaccgcattgaggacgc

SEQ ID NO: 175709 - DNA, 969 bp, Homo sapiens
  Payload ID: 14511
  Gene Symbol: ARHGAP23
  Gene Name: Rho GTPase activating protein 23
  ENST ID: ENST00000618942
  CDS Start-End: 663-969
gaaggatgcgtgtgtgccggtctgctgtgcatgtgtgtatctgcatgtctgtgatgcatgcgcatgcgtctgtatgtgcattgtgtgtgcaggactttgattctgtgcaactctgtgcatatctatgtgtctacaaaagtgtgcacatgtgtactcatttgtgtgtgtgtatctgtgtgtctgcatatttgcacatgcttgtctgtatgtttgtggtatgttccgtctacatgagtgtatgtggctggggctgtgtctgcataagtatgtgtctatctgggagtgcatatatgtgtgcatgtgtgtgtgtgagattgtgcatgagctaagacaacgacaggcacttcctgggcaggaaggctgtatccagggtcctgcacatagtaggtgctcagtgaacatttgctgaactcagctgaactgaactgaatgaacttgcttcactgccactgggcccaagagatgggtgctctcctaggcgccccttcccctggcaggggccgaggacgctgctgctgtacaaaagtccccaggacggctttggcttcactctgcgccacttcatcgtgtacccacccgagtcggccgtgcactgcagcctgaaggaggaagagaatggaggccgtggaggaggaccctccccccggtaccgcctggagcccatggacaccatctttgtcaagaatgtgaaggaagacggccctgcccatagggcggggcttcgcacaggagaccggctggtaaaggtgaatggggaaagcgtcattgggaagacctactctcaggtcatagctctgatccagaatagtgatgacactctggagctgtctatcatgcccaaggacgaggacatcctccagctggcctactcccaggatgcctacctgaaagggaacgagccgtattctggagaggcccgcagcatcccagagccacccccgatctgctacccccgcaagacctacgccc

SEQ ID NO: 175710 - DNA, 3663 bp, Homo sapiens
  Payload ID: 14511
  Gene Symbol: ARHGAP23
  Gene Name: Rho GTPase activating protein 23
  Uniprot ID: Q9P227
  ENST ID: ENST00000620417
  CDS Start-End: 1-3435
atgaatggagtcgccttctgcctggtcgggatcccgccccgcccggagccccggcccccacagctgccactgggcccaagagatgggtgctctcctaggcgccccttcccctggcaggggccgaggacgctgctgctgtacaaaagtccccaggacggctttggcttcactctgcgccacttcatcgtgtacccacccgagtcggccgtgcactgcagcctgaaggaggaagagaatggaggccgtggaggaggaccctccccccggtaccgcctggagcccatggacaccatctttgtcaagaatgtgaaggaagacggccctgcccatagggcggggcttcgcacaggagaccggctggtaaaggtgaatggggaaagcgtcattgggaagacctactctcaggtcatagctctgatccagaatagtgatgacactctggagctgtctatcatgcccaaggacgaggacatcctccagctggcctactcccaggatgcctacctgaaagggaacgagccgtattctggagaggcccgcagcatcccagagccacccccgatctgctacccccgcaagacctacgcccctcctgcccgggcctccaccagggccactatggtgcctgagcccacctcagcactgcccagtgacccccggagtcctgctgcctggagtgacccggggctccgtgtgccacctgctgcccgtgcccacctggacaactcttccttggggatgagccagccccgccccagccctggtgccttcccccacctctcctcggagccccggacgccccgtgccttcccagagcctggcagccgggtgccccccagcagactggagtgccagcaggccttgtcacactggctgtcaaaccaggtaccccgccgggcgggggagagacggtgcccagccatggccccccgggcccgcagcgcctcccaggaccggttggaggaggtggctgccccccgcccgtggccctgctccacctcccaggatgctttgagccagctgggccaggagggctggcaccgagctcgctcagatgactacttgagccgggccacccgttctgccgaggcactggggccaggggcactggtgtcaccccgctttgagcggtgtggctgggcttcccagcgttcgtctgcccgcacccccgcctgcccaactcgggacctgccagggccccaggccccacccccgtctggcctgcagggcctggatgacctcgggtacatcggctaccggagctacagcccatcattccagcgccggaccggcctcctccatgcgctctccttccgggactcaccctttggggggctgcctaccttcaacctggcccagtcccctgcgtcattcccaccagaggcctccgagccacccagggttgtacggccggaacccagcacccgggccctggagcctcctgcggaggatcgcggcgatgaggtggtcctgaggcagaagcccccgacgggccgcaaggttcagctgacccccgcaagacagatgaaccttggatttggtgacgagtccccagagccagaggccagtgggcgaggggaacgcctgggcaggaaggtggcccctttggccaccaccgaagactctctggcttccatcccctttattgatgagcccaccagccccagcattgacctccaagccaagcacgtccctgcctctgctgtggtctccagtgccatgaactcagcccctgtcctgggcaccagcccatcttccccgaccttcactttcaccctcggacgccattactcgcaggactgcagcagcatcaaggctggccgccgctcctcctacctgctggccatcaccacggagcgctccaagtcctgcgatgatggactcaacaccttccgcgacgagggccgggttctgcggcgcctgccaaaccgcatacccagcctgcggatgctccggagcttcttcaccgacgggtccttggatagctggggcacctctgaagatgctgacgctccttctaagcgacactcaacctctgacctctcagatgcgaccttcagcgatatcaggagagaaggctggttgtattataagcagattctcaccaagaaggggaagaaagcgggcagcggcctgcgccagtggaagcgggtgtacgccgcgctgcgggcgcgctcgctctcgctgagcaaggagcggcgggagcccgggccggcggcggcgggggctgcggcggccggcgcaggtgaggacgaggcggcgcccgtctgcatcggctcctgcctcgtggacatctcctacagcgagaccaagaggaggcacgtgttccggctgaccaccgctgacttctgtgaatatctctttcaggctgaggaccgggatgacatgctgggctggatcagagcgatccgggagaacagcagggccgagggcgaggaccccggctgtgccaaccaagctctgatcagcaagaagcttaacgattatcgcaaagtgagccatagctctgggcccaaagctgattcctcccccaaaggctctcgcggcctggggggcctcaagtctgagttcctcaagcagagtgcggcacgtggcctcaggactcaggacctgcccgcagggagcaaggatgacagtgctgcagcccccaaaaccccctggggcatcaacatcatcaagaaaaataagaaggccgctccgagggcgtttggggtcaggctggaggagtgccagccagccacggagaaccagcgcgtccccttaatcgtggctgcatgctgtcgcattgtggaggcacgagggctggagtccacaggcatttaccgagtgcccggcaacaatgcagtggtgtccagcctacaggagcagctcaaccgcgggcctggtgacatcaacctgcaggatgagcgctggcaagacctcaatgtgatcagcagcctgctcaagtccttcttccgaaagctgcccgagcctcttttcactgatgacaaatacaacgacttcatcgaggccaaccgcattgaggacgcgcgggagcgaatgaggacgctgcggaagctgatccgggatctcccaggacactactatgaaacgctcaaattccttgtgggccatctcaagaccatcgctgaccactctgagaaaaacaagatggaaccccggaacctggccctggtctttgggccgacactggtgaggacgtctgaggacaacatgacagacatggtgacccacatgcctgaccgctacaagatcgtggagacactgatccagcactcagactggttcttcagtgacgaagaggacaagggagagagaacccctgtgggcgacaaggagcctcaggcagtgcccaacattgagtacctcctgcccaacattggcaggacagtgccccctggcgacccggggtcagcggacctgttggagatttaaaggattctaccacctgtagttcagccaagtccaagggttcgtgggcccccaagaaggagccgtacgcccgggagatgctggcgatctccttcatctcggccgtcaaccgcaagcgcaagaagcggcgggaggcgcgggggctgggcagcagcaccgacgacgactcggagcaggaggcgcacaagcctggggcgggggccacagcgccggggactcaggagcggccgc

SEQ ID NO: 175711 - DNA, 769 bp, Homo sapiens
  Payload ID: 14511
  Gene Symbol: ARHGAP23
  Gene Name: Rho GTPase activating protein 23
  ENST ID: ENST00000619156
  CDS Start-End: 1-390
tccaagtcctgcgatgatggactcaacaccttccgcgacgagggccgggttctgcggcgcctgccaaaccgcatacccagcctgcggatgctccggagcttcttcaccgacgggtccttggatagctggggcacctctgaagatgctgacgctccttctaagcgacactcaacctctgacctctcagatgcgaccttcagcgatatcaggagagaaggctggttgtattataagcagattctcaccaagaaggggaagaaagcgggcagcggcctgcgccagtggaagcgggtgtacgccgcgctgcgggcgcgctcgctctcgctgagcaaggagcggcgggagcccgggccggcggcggcgggggctgcggcggccggcgcaggctgaggaccgggatgacatgctgggctggatcagagcgatccgggagaacagcagggccgagggcgaggaccccggctgtgccaaccaagctctgatcagcaagaagcttaacgattatcgcaaagtgagccatagctctgggcccaaagctgattcctcccccaaaggctctcgcggcctggggggcctcaagtctgagttcctcaagcagagtgcggcacgtggcctcaggactcaggacctgcccgcagggagcaaggatgacagtgctgcagcccccaaaaccccctggggcatcaacatcatcaagaaaaataagaaggccgctccgagggcgtttggggtcaggctggaggagtgccagccagccacggagaaccag

SEQ ID NO: 175712 - DNA, 659 bp, Homo sapiens
  Payload ID: 14511
  Gene Symbol: ARHGAP23
  Gene Name: Rho GTPase activating protein 23
  ENST ID: ENST00000614693
  CDS Start-End: 1-193
gttcttcagtgacgaagaggacaagggagagagaacccctgtgggcgacaaggagcctcaggcagtgcccaacattgagtacctcctgcccaacattggcaggacagtgccccctggcgacccggggtcagattctaccacctgtagttcagccaagtccaaggtacgtatgaaggcaattctgaaggcttgatccctgtacaaggcagcccactttggtttttgttcaagggaattgagggaatggcagttggaccatggggaaagttgatggtccctgggagggaaggcaggaggtaccgagtgcccaaggtaagctgagaaattgcttaccttggcagtgtttggtgaggcatctgctgtagtagaaggacctggcctgggagttatgtggctaggaggcaatgtcactcagtagttagaagcacagactctgcagtcagacagtcctgggtttgagttctggctccaccatttagtagtttgggacattgggcaagttacttaaccactttctgatccttagcttcctcatctataaaatgggaatatcagtaaatctgtggggtgctataataaataaaacagatatcctttaaggtctttggagagcctaaagcaagcagaaggaaataaagagaggagcagaaatccatgaa

SEQ ID NO: 175713 - DNA, 769 bp, Homo sapiens; identical to SEQ ID NO: 175711
  Payload ID: 14511
  Gene Symbol: ARHGAP23
  Gene Name: Rho GTPase activating protein 23
  ENST ID: ENST00000633443
  CDS Start-End: 1-390

SEQ ID NO: 175714 - DNA, 659 bp, Homo sapiens; identical to SEQ ID NO: 175712
  Payload ID: 14511
  Gene Symbol: ARHGAP23
  Gene Name: Rho GTPase activating protein 23
  ENST ID: ENST00000634129
  CDS Start-End: 1-193

SEQ ID NO: 175715 - DNA, 407 bp, Homo sapiens; identical to SEQ ID NO: 175704
  Payload ID: 14511
  Gene Symbol: ARHGAP23
  Gene Name: Rho GTPase activating protein 23
  ENST ID: ENST00000631490
  CDS Start-End: 1-407

SEQ ID NO: 175716 - DNA, 3663 bp, Homo sapiens
  Payload ID: 14511
  Gene Symbol: ARHGAP23
  Gene Name: Rho GTPase activating protein 23
  Uniprot ID: Q9P227
  ENST ID: ENST00000631799
  CDS Start-End: 1-3435
atgaatggagtcgccttctgcctggtcgggatcccgccccgcccggagccccggcccccacagctgccactgggcccaagagatgggtgctctcctaggcgccccttcccctggcaggggccgaggacgctgctgctgtacaaaagtccccaggacggctttggcttcactctgcgccacttcatcgtgtacccacccgagtcggccgtgcactgcagcctgaaggaggaagagaatggaggccgtggaggaggaccctccccccggtaccgcctggagcccatggacaccatctttgtcaagaatgtgaaggaagacggccctgcccatagggcggggcttcgcacaggagaccggctggtaaaggtgaatggggaaagcgtcattgggaagacctactctcaggtcatagctctgatccagaatagtgatgacactctggagctgtctatcatgcccaaggacgaggacatcctccagctggcctactcccaggatgcctacctgaaagggaacgagccgtattctggagaggcccgcagcatcccagagccaccgccgatctgctacccccgcaagacctacgcccctcctgcccgggcctccaccagggccactatggtgcctgagcccacctcagcactgcccagtgacccccggagtcctgctgcctggagtgacccggggctccgtgtgccacctgctgcccgtgcccacctggacaactcttccttggggatgagccagccccgccccagccctggtgccttcccccacctctcctcggagccccggacgccccgtgccttcccagagcctggcagccgggtgccccccagcagactggagtgccagcaggccttgtcacactggctgtcaaaccaggtaccccgccgggcgggggagagacggtgcccagccatggccccccgggcccgcagcgcctcccaggaccggttggaggaggtggctgccccccgcccgtggccctgctccacctcccaggatgctttgagccagctgggccaggagggctggcaccgagctcgctcagatgactacttgagccgggccacccgttctgccgaggcactggggccaggggcactggtgtcaccccgctttgagcggtgtggctgggcttcccagcgttcgtctgcccgcacccccgcctgcccaactcgggacctgccagggccccaggccccacccccgtctggcctgcagggcctggatgacctcgggtacatcggctaccggagctacagcccatcattccagcgccggaccggcctcctccatgcgctctccttccgggactcaccctttggggggctgcctaccttcaacctggcccagtcccctgcgtcattcccaccagaggcctccgagccacccagggttgtacggccggaacccagcacccgggccctggagcctcctgcggaggatcgcggcgatgaggtggtcctgaggcagaagcccccgacgggccgcaaggttcagctgacccccgcaagacagatgaaccttggatttggtgacgagtccccagagccagaggccagtgggcgaggggaacgcctgggcaggaaggtggcccctttggccaccaccgaagactctctggcttccatcccctttattgatgagcccaccagccccagcattgacctccaagccaagcacgtccctgcctctgctgtggtctccagtgccatgaactcagcccctgtcctgggcaccagcccatcttccccgaccttcactttcaccctcggacgccattactcgcaggactgcagcagcatcaaggctggccgccgctcctcctacctgctggccatcaccacggagcgctccaagtcctgcgatgatggactcaacaccttccgcgacgagggccgggttctgcggcgcctgccaaaccgcatacccagcctgcggatgctccggagcttcttcaccgacgggtccttggatagctggggcacctctgaagatgctgacgctccttctaagcgacactcaacctctgacctctcagatgcgaccttcagcgatatcaggagagaaggctggttgtattataagcagattctcaccaagaaggggaagaaagcgggcagcggcctgcgccagtggaagcgggtgtacgccgcgctgcgggcgcgctcgctctcgctgagcaaggagcggcgggagcccgggccggcggcggcgggggctgcggcggccggcgcaggtgaggacgaggcggcgcccgtctgcatcggctcctgcctcgtggacatctcctacagcgagaccaagaggaggcacgtgttccggctgaccaccgctgacttctgtgaatatctctttcaggctgaggaccgggatgacatgctgggctggatcagagcgatccgggagaacagcagggccgagggcgaggaccccggctgtgccaaccaagctctgatcagcaagaagcttaacgattatcgcaaagtgagccatagctctgggcccaaagctgattcctcccccaaaggctctcgcggcctggggggcctcaagtctgagttcctcaagcagagtgcggcacgtggcctcaggactcaggacctgcccgcagggagcaaggatgacagtgctgcagcccccaaaaccccctggggcatcaacatcatcaagaaaaataagaaggccgctccgagggcgtttggggtcaggctggaggagtgccagccagccacggagaaccagcgcgtccccttaatcgtggctgcatgctgtcgcattgtggaggcacgagggctggagtccacaggcatttaccgagtgcccggcaacaatgcagtggtgtccagcctacaggagcagctcaaccgcgggcctggtgacatcaacctgcaggatgagcgctggcaagacctcaatgtgatcagcagcctgctcaagtccttcttccgaaagctgcccgagcctcttttcactgatgacaaatacaacgacttcatcgaggccaaccgcattgaggacgcacgggagcgaatgaggacgctgcggaagctgatccgggatctcccaggacactactatgaaacgctcaaattccttgtgggccatctcaagaccatcgctgaccactctgagaaaaacaagatggaaccccggaacctggccctggtctttgggccgacactggtgaggacgtctgaggacaacatgacagacatggtgacccacatgcctgaccgctacaagatcgtggagacactgatccagcactcagactggttcttcagtgacgaagaggacaagggagagagaacccctgtgggcgacaaggagcctcaggcagtgcccaacattgagtacctcctgcccaacattggcaggacagtgccccctggcgacccggggtcagcggacctgttggagatttaaaggattctaccacctgtagttcagccaagtccaagggttcgtgggcccccaagaaggagccgtacgcccgggagatgctggcgatctccttcatctcggccgtcaaccgcaagcgcaagaagcggcgggaggcgcgggggctgggcagcagcaccgacgacgactcggagcaggaggcgcacaagcctggggcgggggccacagcgccggggactcaggagcggccgc

SEQ ID NO: 175717 - DNA, 438 bp, Homo sapiens; identical to SEQ ID NO: 175708
  Payload ID: 14511
  Gene Symbol: ARHGAP23
  Gene Name: Rho GTPase activating protein 23
  ENST ID: ENST00000632895
  CDS Start-End: 1-252

SEQ ID NO: 175718 - DNA, 488 bp, Homo sapiens; identical to SEQ ID NO: 175706
  Payload ID: 14511
  Gene Symbol: ARHGAP23
  Gene Name: Rho GTPase activating protein 23
  ENST ID: ENST00000633302
  CDS Start-End: 1-488

SEQ ID NO: 175719 - DNA, 969 bp, Homo sapiens
  Payload ID: 14511
  Gene Symbol: ARHGAP23
  Gene Name: Rho GTPase activating protein 23
  ENST ID: ENST00000632947
  CDS Start-End: 663-969
gaaggatgcgtgtgtgccggtctgctgtgcatgtgtgtatctgcatgtctgtgatgcatgcgcatgcgtctgtatgtgcattgtgtgtgcaggactttgattctgtgcaactctgtgcatatctatgtgtctacaaaagtgtgcacatgtgtactcatttgtgtgtgtgtatctgtgtgtctgcatatttgcacatgcttgtctgtatgtttgtggtatgttccgtctacatgagtgtatgtggctggggctgtgtctgcataagtatgtgtctatctgggagtgcatatatgtgtgcatgtgtgtgtgtgagattgtgcatgagctaagacaacgacaggcacttcctgggcaggaaggctgtatccagggtcctgcacatagtaggtgctcagtgaacatttgctgaactcagctgaactgaactgaatgaacttgcttcactgccactgggcccaagagatgggtgctctcctaggcgccccttcccctggcaggggccgaggacgctgctgctgtacaaaagtccccaggacggctttggcttcactctgcgccacttcatcgtgtacccacccgagtcggccgtgcactgcagcctgaaggaggaagagaatggaggccgtggaggaggaccctccccccggtaccgcctggagcccatggacaccatctttgtcaagaatgtgaaggaagacggccctgcccatagggcggggcttcgcacaggagaccggctggtaaaggtgaatggggaaagcgtcattgggaagacctactctcaggtcatagctctgatccagaatagtgatgacactctggagctgtctatcatgcccaaggacgaggacatcctccagctggcctactcccaggatgcctacctgaaagggaacgagccgtattctggagaggcccgcagcatcccagagccaccgccgatctgctacccccgcaagacctacgccc

SEQ ID NO: 175720 - DNA, 4572 bp, Homo sapiens
  Payload ID: 14512
  Gene Symbol: ARHGAP24
  Gene Name: Rho GTPase activating protein 24
  Uniprot ID: Q8N264
  ENST ID: ENST00000264343
  CDS Start-End: 659-2626
gggagtttgaagacagaaaggaaaggggagaaacctgcagagagcatcaaaggatggggggtgctataaaagaagcaggggggtcctttgaaagaaatctatcatgcactgaaatgctttctggagaaggtgccattattttcctcccctcttgctcagatgaaaggagccagcaaggacagtcctgaaatattcctcaggggactttttgtcattgttcctctttcctcttgcacagagctatttgctgacctttccagaggaatctcagtccagctgagaagacagttcttaataaaaacaaaaaaatgcaaaaaccaattcctgctgtttgaatgggaatggtagcttgcttgctgcagttcttttcctgtgacattttggaatgtctgcagaaacttaaaaaaaagaaaaaaaaaaccttaaaaactccctggattaggcaagagaaaaggaagtttttttttgctaaacaggagtaaatgagaggtggtaacttatccctaagccaggacctggatgatcaaaaccttcaaattctagggatcagcacttcaaaaataacaagtaaacaagcatgaggagtggctgttgggtttcgctcagaggcaggttttaaaggaagccaaaaccgggttcagaacttcaggcctgtacgatgcctgaagaccggaattctggggggtgcccggctggtgccttagcctcaactcctttcatccctaaaactacatacagaagaatcaaacggtgttttagttttcggaaaggcatttttggacagaaactggaggatactgttcgttatgagaagagatatgggaaccgtctggctccgatgttggtggagcagtgcgtggactttatccgacaaagggggctgaaagaagagggtctctttcgactgccaggccaggctaatcttgttaaggagctccaagatgcctttgactgtggggagaagccatcatttgacagcaacacagatgtacacacggtggcatcacttcttaagctgtacctccgagaacttccagaaccagttattccttatgcgaagtatgaagattttttgtcatgtgccaaactgctcagcaaggaagaggaagcaggtgttaaggaattagcaaagcaggtgaagagtttgccagtggtaaattacaacctcctcaagtatatttgcagattcttggatgaagtacagtcctactcgggagttaacaaaatgagtgtgcagaacttggcaacggtctttggtcctaatatcctgcgccccaaagtggaagatcctttgactatcatggagggcactgtggtggtccagcagttgatgtcagtgatgattagcaaacatgattgcctctttcccaaagatgcagaactacaaagcaagccccaagatggagtgagcaacaacaatgaaattcagaagaaagccaccatggggcagttacagaacaaggagaacaataacaccaaggacagccctagtaggcagtgctcctgggacaagtctgagtcaccccagagaagcagcatgaacaatggatcccccacagctctatcaggcagcaaaaccaacagcccaaagaacagtgttcacaagctagatgtgtctagaagcccccctctcatggtcaaaaagaacccagcctttaataagggtagtgggatagttaccaatgggtccttcagcagcagtaatgcagaaggtcttgagaaaacccaaaccacccccaatgggagcctacaggccagaaggagctcttcactgaaggtatctggtaccaaaatgggcacgcacagtgtacagaatggaacggtgcgcatgggcattttgaacagcgacacactcgggaaccccacaaatgttcgaaacatgagctggctgccaaatggctatgtgaccctgagggataacaagcagaaagaacaagctggagagttaggccagcacaacagactgtccacctatgataatgtccatcaacagttctccatgatgaaccttgatgacaagcagagcattgacagtgctacctggtccacttcctcctgtgaaatctccctccctgagaactccaactcctgtcgctcttctaccaccacctgcccagagcaagacttttttggggggaactttgaggaccctgttttggatgggcccccgcaggacgacctttcccaccccagggactatgaaagcaaaagtgaccacaggagtgtgggaggtcgaagtagtcgtgccaccagtagcagtgacaacagtgagacatttgtgggcaacagcagcagcaaccacagtgcactgcacagtttagtttccagcctgaaacaggaaatgaccaaacagaagatagagtatgagtccaggataaagagcttagaacagcgaaacttgactttggaaacagaaatgatgagcctccatgatgaactggatcaggagaggaaaaagttcacaatgatagaaataaaaatgcgaaatgccgagcgagcaaaagaagatgccgagaaaagaaatgacatgctacagaaagaaatggagcagtttttttccacgtttggagaactgacagtggaacccaggagaaccgagagaggaaacacaatatggattcagtgagcctgctttcgcctgctgtctctgatggctctggcaaggactccagggattctggtgggatatgacttagaaccaggtggctggtcacctggatgtacagaagtctaactggtgaaggaatatcatttacagacattaaacatccatatctgcaatgtgtaccaaagttatatcatgccccataatgctactgtcaagtgttacaactggatatgtgtatatagagtagtttttcaaaagtaaactaaaaatgagaagcatatttcaagaattattttattgcaagtcttgtatttaaatgttaaatcaatatgttgttgcaatttagcttgctttcaagcttcaccccttgcacttaacataagctatttttggcattgtgttatcatcggcttattttatagatcaatatttttatttcccttttttgctgaggaaatgaagataagcaaaaatataaatatatatataaatatatgagttattaaaatcagaagaatactttgtggctgtgctgtttgtgccaatagactttgtcatgaccaaaaagagaaatgtaaatagttttataaaatacagtcgaatcaccaggaacctttgagctgcttttaaaattcttcccctggcaccactcagttttgcttttgcgaggcgatttgacataggaactttgagactccatgagaaagtccctttctgaggcccactgtctaccttgccagatcctcagtgcgtatcgccaatgcaggatgctccttagaaaagaaaaaatggtaaagaatggcatttaacgattcaggctttgaattactctgtccctctggaccgaatctctttaactgctggatagttttagaggaattctcctgctacttaggtactgggaaacaatgcttgctaaaccatgcccacgtgagcacctgtctcccactcaaacctctcccatctcccaacaactgcactttagaataccagcagtgaaatggtattactgtttccctctgagtgaaactgctagagtatatgtcacgtagtgacatttttttctcactcaggctattgccatctgggattctctccctactacagctggcaaagttggtttgcagcaagaagatagtgggagggggccaggctgcaggagaaggagaaaagtttagaagaaacaaaccattttgcttctaattttgacagtatcactttcctgttaaaacatacaataattttaaaaggtgaatgcctaaagttccaattttagcaaatatgggaacctcagcaatgctaattttctagaaaaacccagggctctttggagctagagttttgggagaacagttcttcacaataaggcaatggttttgagaggccaggcaaataatctttctcaccgtagaacaaaaagttacaaaaggcataatcggaaatagagactacatacttgagtttatggggtttgtgttgtttgaaggttcaatgcttgcatgtgtttatttattttcaagagggaaagtggtctgtactgctttcatccttgccactgtcttgcttttattttttactctcccactgagcaagcgtctgtggtcctatggtatcaaccagtatctttatagcaataatttctttaattcccttttctctctctttccaattatttaaccagttacttccacctggacatacgataggaaattcaaactcaaaatatgaaaattgatcttaataactctcccttcatatcttttcacctatttccagtccttatcatagttgataaaaacctcagactcatccagaaagctatatgatgcactagtaaaaaaaacaaagatattcaaactgcttgggttcaaatggtatacaatttgccagctgttactgaaccttctatgcataactttttttttcctctgtgcaattggaataataaaaatactactcccata

SEQ ID NO: 175721 - DNA, 2740 bp, Homo sapiens
  Payload ID: 14512
  Gene Symbol: ARHGAP24
  Gene Name: Rho GTPase activating protein 24
  Uniprot ID: Q8N264
  ENST ID: ENST00000395183
  CDS Start-End: 278-2239
ggatgggaggatactgactaagtctgagaaggaggagaaagaaaattagctacaggaagagtttatatccccttctacaagaaaacttaaatatagctaccaccgctttgaaaggaatggtttgtgtccaaacagcattttccagacaagctctgtacttttttgccaaaagaattaactttaaactgaaggcagtggacagttaaacaagagtcggcactgggaacagctgtgcgtagaccagaccagtgacttataaggaggcgatcgagatcggatgacagcaaatcatgaaagctacctcctcatggcaagcacccagaatgatatggaagactgggtgaagtcaatccgccgagtcatatggggacctttcggaggaggcatttttggacagaaactggaggatactgttcgttatgagaagagatatgggaaccgtctggctccgatgttggtggagcagtgcgtggactttatccgacaaagggggctgaaagaagagggtctctttcgactgccaggccaggctaatcttgttaaggagctccaagatgcctttgactgtggggagaagccatcatttgacagcaacacagatgtacacacggtggcatcacttcttaagctgtacctccgagaacttccagaaccagttattccttatgcgaagtatgaagattttttgtcatgtgccaaactgctcagcaaggaagaggaagcaggtgttaaggaattagcaaagcaggtgaagagtttgccagtggtaaattacaacctcctcaagtatatttgcagattcttggatgaagtacagtcctactcgggagttaacaaaatgagtgtgcagaacttggcaacggtctttggtcctaatatcctgcgccccaaagtggaagatcctttgactatcatggagggcactgtggtggtccagcagttgatgtcagtgatgattagcaaacatgattgcctctttcccaaagatgcagaactacaaagcaagccccaagatggagtgagcaacaacaatgaaattcagaagaaagccaccatggggcagttacagaacaaggagaacaataacaccaaggacagccctagtaggcagtgctcctgggacaagtctgagtcaccccagagaagcagcatgaacaatggatcccccacagctctatcaggcagcaaaaccaacagcccaaagaacagtgttcacaagctagatgtgtctagaagcccccctctcatggtcaaaaagaacccagcctttaataagggtagtgggatagttaccaatgggtccttcagcagcagtaatgcagaaggtcttgagaaaacccaaaccacccccaatgggagcctacaggccagaaggagctcttcactgaaggtatctggtaccaaaatgggcacgcacagtgtacagaatggaacggtgcgcatgggcattttgaacagcgacacactcgggaaccccacaaatgttcgaaacatgagctggctgccaaatggctatgtgaccctgagggataacaagcagaaagaacaagctggagagttaggccagcacaacagactgtccacctatgataatgtccatcaacagttctccatgatgaaccttgatgacaagcagagcattgacagtgctacctggtccacttcctcctgtgaaatctccctccctgagaactccaactcctgtcgctcttctaccaccacctgcccagagcaagacttttttggggggaactttgaggaccctgttttggatgggcccccgcaggacgacctttcccaccccagggactatgaaagcaaaagtgaccacaggagtgtgggaggtcgaagtagtcgtgccaccagtagcagtgacaacagtgagacatttgtgggcaacagcagcagcaaccacagtgcactgcacagtttagtttccagcctgaaacaggaaatgaccaaacagaagatagagtatgagtccaggataaagagcttagaacagcgaaacttgactttggaaacagaaatgatgagcctccatgatgaactggatcaggagaggaaaaagttcacaatgatagaaataaaaatgcgaaatgccgagcgagcaaaagaagatgccgagaaaagaaatgacatgctacagaaagaaatggagcagtttttttccacgtttggagaactgacagtggaacccaggagaaccgagagaggaaacacaatatggattcagtgagcctgctttcgcctgctgtctctgatggctctggcaaggactccagggattctggtgggatatgacttagaaccaggtggctggtcacctggatgtacagaagtctaactggtgaaggaatatcatttacagacattaaacatccatatctgcaatgtgtaccaaagttatatcatgccccataatgctactgtcaagtgttacaactggatatgtgtatatagagtagtttttcaaaagtaaactaaaaatgagaagcatatttcaagaattattttattgcaagtcttgtatttaaatgttaaatcaatatgttgttgcaatttagcttgctttcaagcttcaccccttgcacttaacataagctatttttggcattgtgttatcatcggcttattttatagatcaatatttttatttcccttttttgctgaggaaatgaagataagcaaaaatataaatatatatataaatatatgagttattaaaatcagaagaata

SEQ ID NO: 175722 - DNA, 4661 bp, Homo sapiens
  Payload ID: 14512
  Gene Symbol: ARHGAP24
  Gene Name: Rho GTPase activating protein 24
  Uniprot ID: Q8N264
  ENST ID: ENST00000395184
  CDS Start-End: 467-2713
ttgtactgtatatttacacattcacacacaatcaccctttctaacttctgggactctttgcgcaactgctaggatttctcaagtgcatgtggcaacacagcccagctccgggtggaaaccagcagggctctggaggggctcggagaccaggggagctgtcaaggctgcggcggggaccagagaggagcctggcgggggtggctgggtggctgggggaatccccccaacttcccatcgcaggcgcagctctctcggccgcctatttcctccgaaacccgcgctgcggagcagcccagtgcatagagttcaacacttccccttgttgtggaaagtaaaggagcctcactaccacctttttttctttgcgttttcttactgctggtcctgggagccttttccttcggagcagcagccctgtccggcatctgtcttgagctcccagcaaggaaagtccatcagcttgataatggaggagaacaatgactccacggagaacccccaacaaggccaagggcggcagaatgccatcaagtgtgggtggctgaggaagcaaggaggctttgtcaagacttggcatactcgctggtttgtgctcaagggggatcagctctattatttcaaagatgaagatgaaaccaagcccttgggtactatttttctgcctggaaataaagtttctgagcatccctgcaatgaagagaacccagggaagttcctttttgaagtagttccaggaggcgatcgagatcggatgacagcaaatcatgaaagctacctcctcatggcaagcacccagaatgatatggaagactgggtgaagtcaatccgccgagtcatatggggacctttcggaggaggcatttttggacagaaactggaggatactgttcgttatgagaagagatatgggaaccgtctggctccgatgttggtggagcagtgcgtggactttatccgacaaagggggctgaaagaagagggtctctttcgactgccaggccaggctaatcttgttaaggagctccaagatgcctttgactgtggggagaagccatcatttgacagcaacacagatgtacacacggtggcatcacttcttaagctgtacctccgagaacttccagaaccagttattccttatgcgaagtatgaagattttttgtcatgtgccaaactgctcagcaaggaagaggaagcaggtgttaaggaattagcaaagcaggtgaagagtttgccagtggtaaattacaacctcctcaagtatatttgcagattcttggatgaagtacagtcctactcgggagttaacaaaatgagtgtgcagaacttggcaacggtctttggtcctaatatcctgcgccccaaagtggaagatcctttgactatcatggagggcactgtggtggtccagcagttgatgtcagtgatgattagcaaacatgattgcctctttcccaaagatgcagaactacaaagcaagccccaagatggagtgagcaacaacaatgaaattcagaagaaagccaccatggggcagttacagaacaaggagaacaataacaccaaggacagccctagtaggcagtgctcctgggacaagtctgagtcaccccagagaagcagcatgaacaatggatcccccacagctctatcaggcagcaaaaccaacagcccaaagaacagtgttcacaagctagatgtgtctagaagcccccctctcatggtcaaaaagaacccagcctttaataagggtagtgggatagttaccaatgggtccttcagcagcagtaatgcagaaggtcttgagaaaacccaaaccacccccaatgggagcctacaggccagaaggagctcttcactgaaggtatctggtaccaaaatgggcacgcacagtgtacagaatggaacggtgcgcatgggcattttgaacagcgacacactcgggaaccccacaaatgttcgaaacatgagctggctgccaaatggctatgtgaccctgagggataacaagcagaaagaacaagctggagagttaggccagcacaacagactgtccacctatgataatgtccatcaacagttctccatgatgaaccttgatgacaagcagagcattgacagtgctacctggtccacttcctcctgtgaaatctccctccctgagaactccaactcctgtcgctcttctaccaccacctgcccagagcaagacttttttggggggaactttgaggaccctgttttggatgggcccccgcaggacgacctttcccaccccagggactatgaaagcaaaagtgaccacaggagtgtgggaggtcgaagtagtcgtgccaccagtagcagtgacaacagtgagacatttgtgggcaacagcagcagcaaccacagtgcactgcacagtttagtttccagcctgaaacaggaaatgaccaaacagaagatagagtatgagtccaggataaagagcttagaacagcgaaacttgactttggaaacagaaatgatgagcctccatgatgaactggatcaggagaggaaaaagttcacaatgatagaaataaaaatgcgaaatgccgagcgagcaaaagaagatgccgagaaaagaaatgacatgctacagaaagaaatggagcagtttttttccacgtttggagaactgacagtggaacccaggagaaccgagagaggaaacacaatatggattcagtgagcctgctttcgcctgctgtctctgatggctctggcaaggactccagggattctggtgggatatgacttagaaccaggtggctggtcacctggatgtacagaagtctaactggtgaaggaatatcatttacagacattaaacatccatatctgcaatgtgtaccaaagttatatcatgccccataatgctactgtcaagtgttacaactggatatgtgtatatagagtagtttttcaaaagtaaactaaaaatgagaagcatatttcaagaattattttattgcaagtcttgtatttaaatgttaaatcaatatgttgttgcaatttagcttgctttcaagcttcaccccttgcacttaacataagctatttttggcattgtgttatcatcggcttattttatagatcaatatttttatttcccttttttgctgaggaaatgaagataagcaaaaatataaatatatatataaatatatgagttattaaaatcagaagaatactttgtggctgtgctgtttgtgccaatagactttgtcatgaccaaaaagagaaatgtaaatagttttataaaatacagtcgaatcaccaggaacctttgagctgcttttaaaattcttcccctggcaccactcagttttgcttttgcgaggcgatttgacataggaactttgagactccatgagaaagtccctttctgaggcccactgtctaccttgccagatcctcagtgcgtatcgccaatgcaggatgctccttagaaaagaaaaaatggtaaagaatggcatttaacgattcaggctttgaattactctgtccctctggaccgaatctctttaactgctggatagttttagaggaattctcctgctacttaggtactgggaaacaatgcttgctaaaccatgcccacgtgagcacctgtctcccactcaaacctctcccatctcccaacaactgcactttagaataccagcagtgaaatggtattactgtttccctctgagtgaaactgctagagtatatgtcacgtagtgacatttttttctcactcaggctattgccatctgggattctctccctactacagctggcaaagttggtttgcagcaagaagatagtgggagggggccaggctgcaggagaaggagaaaagtttagaagaaacaaaccattttgcttctaattttgacagtatcactttcctgttaaaacatacaataattttaaaaggtgaatgcctaaagttccaattttagcaaatatgggaacctcagcaatgctaattttctagaaaaacccagggctctttggagctagagttttgggagaacagttcttcacaataaggcaatggttttgagaggccaggcaaataatctttctcaccgtagaacaaaaagttacaaaaggcataatcggaaatagagactacatacttgagtttatggggtttgtgttgtttgaaggttcaatgcttgcatgtgtttatttattttcaagagggaaagtggtctgtactgctttcatccttgccactgtcttgcttttattttttactctcccactgagcaagcgtctgtggtcctatggtatcaaccagtatctttatagcaataatttctttaattcccttttctctctctttccaattatttaaccagttacttccacctggacatacgataggaaattcaaactcaaaatatgaaaattgatcttaataactctcccttcatatcttttcacctatttccagtccttatcatagttgataaaaacctcagactcatccagaaagctatatgatgcactagtaaaaaaaacaaagatattcaaactgcttgggttcaaatggtatacaatttgccagctgttactgaaccttctatgcataactttttttttcctctgtgcaattggaataataaaaatactactcccataga

SEQ ID NO: 175723 - DNA, 1273 bp, Homo sapiens
  Payload ID: 14512
  Gene Symbol: ARHGAP24
  Gene Name: Rho GTPase activating protein 24
  Uniprot ID: Q8N264
  ENST ID: ENST00000503995
  CDS Start-End: 343-1083
gggctctggaggggctcggagaccaggggagctgtcaaggctgcggcggggaccagagaggagcctggcgggggtggctgggtggctgggggaatccccccaacttcccatcgcaggcgcagctctctcggccgcctatttcctccgaaacccgcgctgcggagcagcccagtgcatagagttcaacacttccccttgttgtggaaagtaaaggagcctcactaccacctttttttctttgcgttttcttactgctggtcctgggagccttttccttcggagcagcagccctgtccggcatctgtcttgagctcccagcaaggaaagtccatcagcttgataatggaggagaacaatgactccacggagaacccccaacaaggccaagggcggcagaatgccatcaagtgtgggtggctgaggaagcaaggaggctttgtcaagacttggcatactcgctggtttgtgctcaagggggatcagctctattatttcaaagatgaagatgaaaccaagcccttgggtactatttttctgcctggaaataaagtttctgagcatccctgcaatgaagagaacccagggaagttcctttttgaagtagttccaggaggcgatcgagatcggatgacagcaaatcatgaaagctacctcctcatggcaagcacccagaatgatatggaagactgggtgaagtcaatccgccgagtcatatggggacctttcggaggaggcatttttggacagaaactggaggatactgttcgttatgagaagagatatgggaaccgtctggctccgatgttggtggagcagtgcgtggactttatccgacaaagggggctgaaagaagagggtctctttcgactgccaggccaggctaatcttgttaaggagctccaagatgcctttgactgtggggagaagccatcatttgacagcaacacagatgtacacacggtggcatcacttcttaagctgtacctccgagaacttccagaaccagttattccttatgcgaagtatgaagattttttgtcatgtgccaaactgctcagcaaggaagaggaagcagtaagttgatgcatttatttccaaataagcttttgtttggaatttttttctgtgttcttagtcttaaatctgtaaatttccattgccctatcccggtgttactctccactatcctttgaattgacctcacacacactgagactttccgtatacagctcaagcaccatttccgatcccctctctgatcaaaaaaaaagaa

SEQ ID NO: 175724 - DNA, 572 bp, Homo sapiens
  Payload ID: 14512
  Gene Symbol: ARHGAP24
  Gene Name: Rho GTPase activating protein 24
  ENST ID: ENST00000509300
  CDS Start-End: 219-572
tttttacctgagctcagtagctggggagcccactagtgctggggagcgagccgtggtttccattcctgggtgatggagtcatgggagaaactgcagtgagcaaacacagtaggacctgagttgggctcgaatgtgctttaagcgactcaggacagagcagctgctctgtctcccagcttgcaagtgcagcctgcatttgtcactgaccactgaagtgtatgtttgtgcaaggcatttttggacagaaactggaggatactgttcgttatgagaagagatatgggaaccgtctggctccgatgttggtggagcagtgcgtggactttatccgacaaagggggctgaaagaagagggtctctttcgactgccaggccaggctaatcttgttaaggagctccaagatgcctttgactgtggggagaagccatcatttgacagcaacacagatgtacacacggtggcatcacttcttaagctgtacctccgagaacttccagaaccagttattccttatgcgaagtatgaagattttttgtcatgtgccaaactgctcagcaaggaagaggaagca

SEQ ID NO: 175725 - DNA, 1936 bp, Homo sapiens
  Payload ID: 14512
  Gene Symbol: ARHGAP24
  Gene Name: Rho GTPase activating protein 24
  ENST ID: ENST00000514229
  CDS Start-End: 71-1936
aggacagagcagctgctctgtctcccagcttgcaagtgcagcctgcatttgtcactgaccactgaagtgtatgtttgtgcaaggaggcgatcgagatcggatgacagcaaatcatgaaagctacctcctcatggcaagcacccagaatgatatggaagactgggtgaagtcaatccgccgagtcatatggggacctttcggaggaggcatttttggacagaaactggaggatactgttcgttatgagaagagatatgggaaccgtctggctccgatgttggtggagcagtgcgtggactttatccgacaaagggggctgaaagaagagggtctctttcgactgccaggccaggctaatcttgttaaggagctccaagatgcctttgactgtggggagaagccatcatttgacagcaacacagatgtacacacggtggcatcacttcttaagctgtacctccgagaacttccagaaccagttattccttatgcgaagtatgaagattttttgtcatgtgccaaactgctcagcaaggaagaggaagcaggtgttaaggaattagcaaagcaggtgaagagtttgccagtggtaaattacaacctcctcaagtatatttgcagattcttggatgaagtacagtcctactcgggagttaacaaaatgagtgtgcagaacttggcaacggtctttggtcctaatatcctgcgccccaaagtggaagatcctttgactatcatggagggcactgtggtggtccagcagttgatgtcagtgatgattagcaaacatgattgcctctttcccaaagatgcagaactacaaagcaagccccaagatggagtgagcaacaacaatgaaattcagaagaaagccaccatggggcagttacagaacaaggagaacaataacaccaaggacagccctagtaggcagtgctcctgggacaagtctgagtcaccccagagaagcagcatgaacaatggatcccccacagctctatcaggcagcaaaaccaacagcccaaagaacagtgttcacaagctagatgtgtctagaagcccccctctcatggtcaaaaagaacccagcctttaataagggtagtgggatagttaccaatgggtccttcagcagcagtaatgcagaaggtcttgagaaaacccaaaccacccccaatgggagcctacaggccagaaggagctcttcactgaaggtatctggtaccaaaatgggcacgcacagtgtacagaatggaacggtgcgcatgggcattttgaacagcgacacactcgggaaccccacaaatgttcgaaacatgagctggctgccaaatggctatgtgaccctgagggataacaagcagaaagaacaagctggagagttaggccagcacaacagactgtccacctatgataatgtccatcaacagttctccatgatgaaccttgatgacaagcagagcattgacagtgctacctggtccacttcctcctgtgaaatctccctccctgagaactccaactcctgtcgctcttctaccaccacctgcccagagcaagacttttttggggggaactttgaggaccctgttttggatgggcccccgcaggacgacctttcccaccccagggactatgaaagcaaaagtgaccacaggagtgtgggaggtcgaagtagtcgtgccaccagtagcagtgacaacagtgagacatttgtgggcaacagcagcagcaaccacagtgcactgcacagtttagtttccagcctgaaacaggaaatgaccaaacagaagatagagtatgagtccaggataaagagcttagaacagcgaaacttgactttggaaacagaaatgatgagcctccatgatgaactggatcaggagaggaaaaagttcacaatgatagaaataaaaatgcgaaatgccgagcgagca

SEQ ID NO: 175726 - DNA, 567 bp, Homo sapiens
  Payload ID: 14512
  Gene Symbol: ARHGAP24
  Gene Name: Rho GTPase activating protein 24
  ENST ID: ENST00000512201
  CDS Start-End: 322-567
ataactcattaggcttgaatgagatgctttgaactgtggtgactacagtaatgttcccctctgcatgttgaagtgacaagtgcctccttggcctattgctgatcctgcctgctgtagaaatctccagctgtccaatatttggaagaaaactggctgtgcgtgtagtagagatgctctctctttgtgaagaaggccctgcatacattaaacaagtccggtactatttttctgcctggaaataaagtttctgagcatccctgcaatgaagagaacccagggaagttcctttttgaagtagttccaggaggcgatcgagatcggatgacagcaaatcatgaaagctacctcctcatggcaagcacccagaatgatatggaagactgggtgaagtcaatccgccgagtcatatggggacctttcggaggaggcatttttggacagaaactggaggatactgttcgttatgagaagagatatgggaaccgtctggctccgatgttggtggagcagtgcgtggactttatccgacaaagggggctgaaagaagagggtctctttcgactgcca

SEQ ID NO: 175727 - DNA, 2939 bp, Homo sapiens
  Payload ID: 14513
  Gene Symbol: ARHGAP25
  Gene Name: Rho GTPase activating protein 25
  Uniprot ID: P42331
  ENST ID: ENST00000409220
  CDS Start-End: 381-2300
ccgagccttcagagtgaggcattattttctcctctctcttgtcagatactgactcccacgcaggaaaaaggaagcaccttttgtcagatgctgtggccacttcctcttcagaaggctccagccaacctttcggtttgcagaatgacggggcccgccgcggtgccggactgcctgtgcacggggccaccgactgcagcctgggttttattcttggcctggccctgaccgggagctggcccctcggctgcttctctggctcgggggggactttctctggctcagatccggacccctgaactggacctggttgtcgtccccccgcttctcagccccctctggggttcctctctcctctccgcccactctttgctcactgccccatgtccctcggtcagtcggcctgtctgttcctctctatagctcggtcaaggagtgtgatgactggcgagcagatggctgccttccatccatcgtccacccccaacccgctggagaggcccatcaagatgggctggctgaagaagcagaggtccatcgtgaagaactggcagcagaggtactttgtgctgagggcgcagcagctctactactacaaggatgaagaggacacgaagccccagggctgcatgtatctaccaggatgtacaatcaaggagatcgccacaaacccagaagaagctgggaagtttgtctttgaaatcattccagcctcatgggaccagaatcgcatgggacaggactcctatgtcctcatggccagctctcaggcggagatggaggagtgggttaaattcctcaggagagttgctggcacaccctgtggagcagtgtttggccagcgcttggatgagactgtggcctatgaacagaaattcggcccccatctggtgcccatcctggtggagaaatgtgcagagttcatcctggagcacggccggaatgaagagggcatcttccgtctgcctgggcaggacaacctggtgaagcagctgagagacgcttttgatgctggggagcggccctcctttgacagagacacagatgtgcacactgtggcttccctgttaaagctctacctccgagacctcccagagcccgtggttccctggagccagtacgaagggttcctgctctgtgggcagctcacgaatgcggatgaggcaaaggctcagcaggagttgatgaagcagctctccatccttcctcgtgacaactatagtctcctgagctacatctgcaggttcctacatgaaatacagctgaactgtgctgttaacaagatgagtgtggacaacctggctactgtgattggtgtgaatctcatcaggtcgaaggtcgaagaccctgccgtgatcatgagagggactcctcagatccaaagagtgatgactatgatgatcagagaccatgaagtcctcttccccaagtccaaggatatacccctgtcaccccctgcccagaaaaatgaccccaagaaagctccagtggcccgaagctctgtaggctgggatgccactgaagacctccgaatttctaggacagacagcttcagtagcatgacaagcgactctgatacaaccagccccaccggacagcagccgagcgatgcgtttccggaggacagcagcaaagtacccagggaaaagccaggagactggaaaatgcaatctcgtaaaaggactcaaacactccctaaccggaaatgtttcttgacatcagcttttcagggtgccaacagcagcaaaatggagatctttaaaaatgaattctggtcgccttcctcagaggctaaggcaggggaagggcacaggagaacgatgtctcaagacttgcgccaactttctgactcccaacggacttccacctacgataacgtcccttccctgccagggtcccctggggaggaagccagtgcactctcttcccaagcctgtgactccaagggagatactcttgccagtccaaactctgaaactgggcctggaaaaaagaactctggagaagaggaaattgattctttgcagaggatggtccaagagctacgaaaggaaatagaaacacagaagcaaatgtatgaggaacagattaaaaaccttgagaaggaaaattatgacgtttgggctaaagtggtgaggctcaatgaagaactggagaaggaaaagaagaagtctgcagccctagagatcagcctccgcaacatggagcgctcccgggaggatgttgagaagaggaacaaggccttggaagaagaagtcaaggaatttgtcaaatccatgaaggaacccaagaccgaggcttaagggtcccaggagtactgcagggacagccccagagaggcccaactctggcccctttctcagtgctatctgatgacggggaaacaaaattattctctgagagggaaaggacatttgagggaaacatcaaatttccccataaataaatgaatggagtttgcaggaaggtgagggtgagcagagatgtgtgtggacatctctgaccatccatcgctgtattcaaatggattgttttattccattctggtctcaggcatgaccacgtccagtgaagacatttgaggcagcacatctcaggacccaggcaatagactggccccaactcaggctggactaaggtgtgattaattctttgttttttgtgtggaacagctcaccttgtcagacagcctcagggcatctctgagacacaggggcagaaaatgacattcatcttttgagtcctcatccatggagtgctgtgtttggggggctgcatctgctgaagcgagaaccccattctgccaccccaccaggatgcccattctccaggacttctccaacttactattagactaaaccagaacaagcaacaaactgtatttatgcaagcaaaattgatgagaaaattatattcaaataaagcaaaaattaaaaaaaaaa

SEQ ID NO: 175728 - DNA, 2936 bp, Homo sapiens
  Payload ID: 14513
  Gene Symbol: ARHGAP25
  Gene Name: Rho GTPase activating protein 25
  Uniprot ID: P42331
  ENST ID: ENST00000409030
  CDS Start-End: 381-2297
ccgagccttcagagtgaggcattattttctcctctctcttgtcagatactgactcccacgcaggaaaaaggaagcaccttttgtcagatgctgtggccacttcctcttcagaaggctccagccaacctttcggtttgcagaatgacggggcccgccgcggtgccggactgcctgtgcacggggccaccgactgcagcctgggttttattcttggcctggccctgaccgggagctggcccctcggctgcttctctggctcgggggggactttctctggctcagatccggacccctgaactggacctggttgtcgtccccccgcttctcagccccctctggggttcctctctcctctccgcccactctttgctcactgccccatgtccctcggtcagtcggcctgtctgttcctctctatagctcggtcaaggagtgtgatgactggcgagcagatggctgccttccatccatcgtccacccccaacccgctggagaggcccatcaagatgggctggctgaagaagcagaggtccatcgtgaagaactggcagcagaggtactttgtgctgagggcgcagcagctctactactacaaggatgaagaggacacgaagccccagggctgcatgtatctaccaggatgtacaatcaaggagatcgccacaaacccagaagaagctgggaagtttgtctttgaaatcattccagcctcatgggaccagaatcgcatgggacaggactcctatgtcctcatggccagctctcaggcggagatggaggagtgggttaaattcctcaggagagttgctggcacaccctgtggagtgtttggccagcgcttggatgagactgtggcctatgaacagaaattcggcccccatctggtgcccatcctggtggagaaatgtgcagagttcatcctggagcacggccggaatgaagagggcatcttccgtctgcctgggcaggacaacctggtgaagcagctgagagacgcttttgatgctggggagcggccctcctttgacagagacacagatgtgcacactgtggcttccctgttaaagctctacctccgagacctcccagagcccgtggttccctggagccagtacgaagggttcctgctctgtgggcagctcacgaatgcggatgaggcaaaggctcagcaggagttgatgaagcagctctccatccttcctcgtgacaactatagtctcctgagctacatctgcaggttcctacatgaaatacagctgaactgtgctgttaacaagatgagtgtggacaacctggctactgtgattggtgtgaatctcatcaggtcgaaggtcgaagaccctgccgtgatcatgagagggactcctcagatccaaagagtgatgactatgatgatcagagaccatgaagtcctcttccccaagtccaaggatatacccctgtcaccccctgcccagaaaaatgaccccaagaaagctccagtggcccgaagctctgtaggctgggatgccactgaagacctccgaatttctaggacagacagcttcagtagcatgacaagcgactctgatacaaccagccccaccggacagcagccgagcgatgcgtttccggaggacagcagcaaagtacccagggaaaagccaggagactggaaaatgcaatctcgtaaaaggactcaaacactccctaaccggaaatgtttcttgacatcagcttttcagggtgccaacagcagcaaaatggagatctttaaaaatgaattctggtcgccttcctcagaggctaaggcaggggaagggcacaggagaacgatgtctcaagacttgcgccaactttctgactcccaacggacttccacctacgataacgtcccttccctgccagggtcccctggggaggaagccagtgcactctcttcccaagcctgtgactccaagggagatactcttgccagtccaaactctgaaactgggcctggaaaaaagaactctggagaagaggaaattgattctttgcagaggatggtccaagagctacgaaaggaaatagaaacacagaagcaaatgtatgaggaacagattaaaaaccttgagaaggaaaattatgacgtttgggctaaagtggtgaggctcaatgaagaactggagaaggaaaagaagaagtctgcagccctagagatcagcctccgcaacatggagcgctcccgggaggatgttgagaagaggaacaaggccttggaagaagaagtcaaggaatttgtcaaatccatgaaggaacccaagaccgaggcttaagggtcccaggagtactgcagggacagccccagagaggcccaactctggcccctttctcagtgctatctgatgacggggaaacaaaattattctctgagagggaaaggacatttgagggaaacatcaaatttccccataaataaatgaatggagtttgcaggaaggtgagggtgagcagagatgtgtgtggacatctctgaccatccatcgctgtattcaaatggattgttttattccattctggtctcaggcatgaccacgtccagtgaagacatttgaggcagcacatctcaggacccaggcaatagactggccccaactcaggctggactaaggtgtgattaattctttgttttttgtgtggaacagctcaccttgtcagacagcctcagggcatctctgagacacaggggcagaaaatgacattcatcttttgagtcctcatccatggagtgctgtgtttggggggctgcatctgctgaagcgagaaccccattctgccaccccaccaggatgcccattctccaggacttctccaacttactattagactaaaccagaacaagcaacaaactgtatttatgcaagcaaaattgatgagaaaattatattcaaataaagcaaaaattaaaaaaaaaa

SEQ ID NO: 175729 - DNA, 2945 bp, Homo sapiens
  Payload ID: 14513
  Gene Symbol: ARHGAP25
  Gene Name: Rho GTPase activating protein 25
  Uniprot ID: P42331
  ENST ID: ENST00000409202
  CDS Start-End: 366-2306
agtaaggcctgagattctttcgaaaaggagctttgcttcccatgacgcagagggaagtgtcaactgggatatttctggtaaaactgaaagcaagaaaagcagggtgctagcccctgtgggactgagggtggaggctgggggagtttgggtgccatcctccagtgacagatggatggacctttcatctaagagaaaggaggagacacgttggcaaatcagcctcaagcctaagattgcttgtgaagcaatcataaggaggaacaaaaacagacacaaaaacagagggaaagagtgaaaagacaagaagggcgcaaactgtgacagactcaccgcttcactaactactcacttaaactggaagcaaaatgtccctaaaattgccaaggaactgggatttcaacctgaaagtggaggctgcgaaaatagctcggtcaaggagtgtgatgactggcgagcagatggctgccttccatccatcgtccacccccaacccgctggagaggcccatcaagatgggctggctgaagaagcagaggtccatcgtgaagaactggcagcagaggtactttgtgctgagggcgcagcagctctactactacaaggatgaagaggacacgaagccccagggctgcatgtatctaccaggatgtacaatcaaggagatcgccacaaacccagaagaagctgggaagtttgtctttgaaatcattccagcctcatgggaccagaatcgcatgggacaggactcctatgtcctcatggccagctctcaggcggagatggaggagtgggttaaattcctcaggagagttgctggcacaccctgtggagcagtgtttggccagcgcttggatgagactgtggcctatgaacagaaattcggcccccatctggtgcccatcctggtggagaaatgtgcagagttcatcctggagcacggccggaatgaagagggcatcttccgtctgcctgggcaggacaacctggtgaagcagctgagagacgcttttgatgctggggagcggccctcctttgacagagacacagatgtgcacactgtggcttccctgttaaagctctacctccgagacctcccagagcccgtggttccctggagccagtacgaagggttcctgctctgtgggcagctcacgaatgcggatgaggcaaaggctcagcaggagttgatgaagcagctctccatccttcctcgtgacaactatagtctcctgagctacatctgcaggttcctacatgaaatacagctgaactgtgctgttaacaagatgagtgtggacaacctggctactgtgattggtgtgaatctcatcaggtcgaaggtcgaagaccctgccgtgatcatgagagggactcctcagatccaaagagtgatgactatgatgatcagagaccatgaagtcctcttccccaagtccaaggatatacccctgtcaccccctgcccagaaaaatgaccccaagaaagctccagtggcccgaagctctgtaggctgggatgccactgaagacctccgaatttctaggacagacagcttcagtagcatgacaagcgactctgatacaaccagccccaccggacagcagccgagcgatgcgtttccggaggacagcagcaaagtacccagggaaaagccaggagactggaaaatgcaatctcgtaaaaggactcaaacactccctaaccggaaatgtttcttgacatcagcttttcagggtgccaacagcagcaaaatggagatctttaaaaatgaattctggtcgccttcctcagaggctaaggcaggggaagggcacaggagaacgatgtctcaagacttgcgccaactttctgactcccaacggacttccacctacgataacgtcccttccctgccagggtcccctggggaggaagccagtgcactctcttcccaagcctgtgactccaagggagatactcttgccagtccaaactctgaaactgggcctggaaaaaagaactctggagaagaggaaattgattctttgcagaggatggtccaagagctacgaaaggaaatagaaacacagaagcaaatgtatgaggaacagattaaaaaccttgagaaggaaaattatgacgtttgggctaaagtggtgaggctcaatgaagaactggagaaggaaaagaagaagtctgcagccctagagatcagcctccgcaacatggagcgctcccgggaggatgttgagaagaggaacaaggccttggaagaagaagtcaaggaatttgtcaaatccatgaaggaacccaagaccgaggcttaagggtcccaggagtactgcagggacagccccagagaggcccaactctggcccctttctcagtgctatctgatgacggggaaacaaaattattctctgagagggaaaggacatttgagggaaacatcaaatttccccataaataaatgaatggagtttgcaggaaggtgagggtgagcagagatgtgtgtggacatctctgaccatccatcgctgtattcaaatggattgttttattccattctggtctcaggcatgaccacgtccagtgaagacatttgaggcagcacatctcaggacccaggcaatagactggccccaactcaggctggactaaggtgtgattaattctttgttttttgtgtggaacagctcaccttgtcagacagcctcagggcatctctgagacacaggggcagaaaatgacattcatcttttgagtcctcatccatggagtgctgtgtttggggggctgcatctgctgaagcgagaaccccattctgccaccccaccaggatgcccattctccaggacttctccaacttactattagactaaaccagaacaagcaacaaactgtatttatgcaagcaaaattgatgagaaaattatattcaaataaagcaaaaattaaaaaaaaaa

SEQ ID NO: 175730 - DNA, 1843 bp, Homo sapiens
  Payload ID: 14513
  Gene Symbol: ARHGAP25
  Gene Name: Rho GTPase activating protein 25
  Uniprot ID: P42331
  ENST ID: ENST00000497079
  CDS Start-End: 242-1618
gaatgacggggcccgccgcggtgccggactgcctgtgcacggggccaccgactgcagcctgggttttattcttggcctggccctgaccgggagctggcccctcggctgcttctctggctcgggggggactttctctggctcagatccggacccctgaactggacctggttgtcgtccccccgcttctcagccccctctggggttcctctctcctctccgcccactctttgctcactgccccatgtccctcggtcagtcggcctgtctgttcctctctatagctcggtcaaggagtgtgatgactggcgagcagatggctgccttccatccatcgtccacccccaacccgctggagaggcccatcaagatgggctggctgaagaagcagaggtccatcgtgaagaactggcagcagaggtactttgtgctgagggcgcagcagctctactactacaaggatgaagaggacacgaagccccagggctgcatgtatctaccaggatgtacaatcaaggagatcgccacaaacccagaagaagctgggaagtttgtctttgaaatcattccagcctcatgggaccagaatcgcatgggacaggactcctatgtcctcatggccagctctcaggcggagatggaggagtgggttaaattcctcaggagagttgctggcacaccctgtggagcagtgtttggccagcgcttggatgagactgtggcctatgaacagaaattcggcccccatctggtgcccatcctggtggagaaatgtgcagagttcatcctggagcacggccggaatgaagagggcatcttccgtctgcctgggcaggacaacctggtgaagcagctgagagacgcttttgatgctggggagcggccctcctttgacagagacacagatgtgcacactgtggcttccctgttaaagctctacctccgagacctcccagagcccgtggttccctggagccagtacgaagggttcctgctctgtgggcagctcacgaatgcggatgaggcaaaggctcagcaggagttgatgaagcagctctccatccttcctcgtgacaactatagtctcctgagctacatctgcaggttcctacatgaaatacagctgaactgtgctgttaacaagatgagtgtggacaacctggctactgtgattggtgtgaatctcatcaggtcgaaggtcgaagaccctgccgtgatcatgagagggactcctcagatccaaagagtgatgactatgatgatcagagaccatgaagtcctcttccccaagtccaaggatatacccctgtcaccccctgcccagaaaaatgaccccaagaaagctccagtggcccgaagctctgtaggctgggatgccactgaagacctccgaatttctaggacagacagcttcagtagcatggtaaggtgcagagaaccttcctgcttccattgggttcttcctttagtccaggccatcccatgtaaggcctgctctcgggtggcaatttggggagttttaggtgatgcagtggcagtgggcgctgctgctacagactcatctgaacacaccttgaaagcctggcctctttccaaatctagtttctattggcatctttgaggggggtgagtgacaagtgtgccaatcacccagtgactgagcaatgaggtcctcactgaagcccactctgaaagagagactcaaatacagtccagagaagttcagtgggaaaaatgtatacaacattgtaaatgttttggtcagaattgttgaaaattctgggtgaacgtccagagaaaactggtttcctgctaacccatgaaacgtgattcctttctcagagta

SEQ ID NO: 175731 - DNA, 1227 bp, Homo sapiens
  Payload ID: 14513
  Gene Symbol: ARHGAP25
  Gene Name: Rho GTPase activating protein 25
  ENST ID: ENST00000463483
  CDS Start-End: 341-1192
gtttacctaagctagcctgggcaatggcgggcgcccctcccccagcttctctgcggccttgcagtttgatctcagactgctgtgctagcaatcagcgagactccgcgggcgtaggaccctccgagccagagtctcctgcaatgattcagacttggctttactggcttcttccatagataagcaccagcctaggagctctcaaagttgttccagctaaaggacacactcagcttttggtctacagtgacttccagcctaagtggctctggacactgctggaaccccccgctccatctccctccataaatatgtctctgcagcagctcggtcaaggagtgtgatgactggcgagcagatggctgccttccatccatcgtccacccccaacccgctggagaggcccatcaagatgggctggctgaagaagcagaggtccatcgtgaagaactggcagcagaggtactttgtgctgagggcgcagcagctctactactacaaggatgaagaggacacgaagccccagggctgcatgtatctaccaggatgtacaatcaaggagatcgccacaaacccagaagaagctgggaagtttgtctttgaaatcattccagcctcatgggaccagaatcgcatgggacaggactcctatgtcctcatggccagctctcaggcggagatggaggagtgggttaaattcctcaggagagttgctggcacaccctgtggagcagtgtttggccagcgcttggatgagactgtggcctatgaacagaaattcggcccccatctggtgcccatcctggtggagaaatgtgcagagttcatcctggagcacggccggaatgaagagggcatcttccgtctgcctgggcaggacaacctggtgaagcagctgagagacgcttttgatgctggggagcggccctcctttgacagagacacagatgtgcacactgtggcttccctgttaaagctctacctccgagacctcccagagcccgtggttccctggagccagtacgaagggttcctgctctgtgggcagctcacgaatgcggatgaggcaaagaactacaggaacaggaatgactgccaaagtgttgtttctgcacagatacaccaattctgtcccagggtctccttgctggcacatgggcaggctcatttactggtaaatgatttacttgtgtaaatctcttcccaggctcagcaggagttgatgaagca

SEQ ID NO: 175732 - DNA, 1362 bp, Homo sapiens
  Payload ID: 14513
  Gene Symbol: ARHGAP25
  Gene Name: Rho GTPase activating protein 25
  ENST ID: ENST00000473986
  CDS Start-End: 278-535
ctcttcagaaggctccagccaacctttcggtttgcagaatgacggggcccgccgcggtgccggactgcctgtgcacggggccaccgactgcagcctgggttttattcttggcctggccctgaccgggagctggcccctcggctgcttctctggctcgggggggactttctctggctcagatccggacccctgaactggacctggttgtcgtccccccgcttctcagccccctctggggttcctctctcctctccgcccactctttgctcactgccccatgtccctcggtcagtcggcctgtctgttcctctctatagctcggtcaaggagtgtgatgactggcgagcagatggctgccttccatccatcgtccacccccaacccgctggagaggcccatcaagatgggctggctgaagaagcagaggtccatcgtgaagaactggcagcagagtggtcctccaggaagcaccaggacgggcactgtggagtttcctacacatggctctgagtcaagactggcaacagggcggtgatggtagtgacactcagtcaagggctcagagagagtggatttgggttcaggaaaaccgattttgggactcattgatttgtttgttcaggctgcatgtatctaccaggatgtacaatcaaggagatcgccacaaacccagaagaagctgggaagtttgtctttgaaatcattccagcctcatgggaccagaatcgcatgggacaggactcctatgtcctcatggccagctctcaggcggagatggaggagtgggttaaattcctcaggagagttgctggcacaccctgtggagcagtgtttggccagcgcttggatgagactgtggcctatgaacagaaattcggcccccatctggtgcccatcctggtggagaaatgtgcagagttcatcctggagcacggccggaatgaagagggcatcttccgtctgcctgggcaggacaacctggtgaagcagctgagagacgcttttgatgctggggagcggccctcctttgacagacacagatgtgcacactgtggcttccctgttaaagctctacctccgagacctcccagagcccgtggttccctggagccagtacgaagggttcctgctctgtgggcagctcacgaatgcggatgaggcaaaggctcagcaggagttgatgaagcagctctccatccttcctcgtgacaactatagtctcctgagctacatctgcaggttcctacatgaaatacagctgaactgtgctgttaacaagatgagtgtggacaacctggctactgtgattggtgtgaatctcatcaggtcgaaggtcgaagaccctgccgtgatcatgagagg

SEQ ID NO: 175733 - DNA, 1933 bp, Homo sapiens
  Payload ID: 14513
  Gene Symbol: ARHGAP25
  Gene Name: Rho GTPase activating protein 25
  ENST ID: ENST00000479844
  CDS Start-End: 275-1294
attctgggccaccctggttattttccttcagccctttctggggacctgctgtgcgccacccctgtggcaactctagctgtggattgacccagatctggctcggctgggaactgggatcttcatcccagactgacctgaattttgtcttttattttttaaaaataatttgttgtagttcctagattataaaagtcatgcttgcttgacttggaaaccaggaagatatagcaaacagttcctacatgaaatacagctgaactgtgctgttaacaagatgagtgtggacaacctggctactgtgattggtgtgaatctcatcaggtcgaaggtcgaagaccctgccgtgatcatgagagggactcctcagatccaaagagtgatgactatgatgatcagagaccatgaagtcctcttccccaagtccaaggatatacccctgtcaccccctgcccagaaaaatgaccccaagaaagctccagtggcccgaagctctgtaggctgggatgccactgaagacctccgaatttctaggacagacagcttcagtagcatgacaagcgactctgatacaaccagccccaccggacagcagccgagcgatgcgtttccggaggacagcagcaaagtacccagggaaaagccaggagactggaaaatgcaatctcgtaaaaggactcaaacactccctaaccggaaatgtttcttgacatcagcttttcagggtgccaacagcagcaaaatggagatctttaaaaatgaattctggtcgccttcctcagaggctaaggcaggggaagggcacaggagaacgatgtctcaagacttgcgccaactttctgactcccaacggacttccacctacgataacgtcccttccctgccagggtcccctggggaggaagccagtgcactctcttcccaagcctgtgactccaagggagatactcttgccagtccaaactctgaaactgggcctggaaaaaagaactctggagaagaggaaattgattctttgcagaggatggtccaagagctacgaaaggaaatagaaacacagaagcaaatgtatgaggaacagattaaaaaccttgagaaggaaaattatgacgtttgggctaaagtggtgaggctcaatgaagaactggagaaggaaaagaagaagtctgcagccctagagatcagcctccgcaacatggagcgctcccgggaggatgttgagaagaggaacaaggccttggaagaagaagtcaaggaatttgtcaaatccatgaaggaacccaagaccgaggcttaagggtcccaggagtactgcagggacagccccagagaggcccaactctggcccctttctcagtgctatctgatgacggggaaacaaaattattctctgagagggaaaggacatttgagggaaacatcaaatttccccataaataaatgaatggagtttgcaggaaggtgagggtgagcagagatgtgtgtggacatctctgaccatccatcgctgtattcaaatggattgttttattccattctggtctcaggcatgaccacgtccagtgaagacatttgaggcagcacatctcaggacccaggcaatagactggccccaactcaggctggactaaggtgtgattaattctttgttttttgtgtggaacagctcaccttgtcagacagcctcagggcatctctgagacacaggggcagaaaatgacattcatcttttgagtcctcatccatggagtgctgtgtttggggggctgcatctgctgaagcgagaaccccattctgccaccccaccaggatgcccattctccaggacttctccaacttactattagactaaaccagaacaagcaacaaactgtatttatgcaagcaaaattgatgagaaaattatattcaaataaagcaaaaattaaaaaaaaaa

SEQ ID NO: 175734 - DNA, 2096 bp, Homo sapiens
  Payload ID: 14513
  Gene Symbol: ARHGAP25
  Gene Name: Rho GTPase activating protein 25
  ENST ID: ENST00000497259
  CDS Start-End: 1-1517
aagcacagaatgacgggcaggttctgtttgctctctcctcagcagtgtttggccagcgcttggatgagactgtggcctatgaacagaaattcggcccccatctggtgcccatcctggtggagaaatgtgcagagttcatcctggagcacggccggaatgaagagggcatcttccgtctgcctgggcaggacaacctggtgaagcagctgagagacgcttttgatgctggggagcggccctcctttgacagagacacagatgtgcacactgtggcttccctgttaaagctctacctccgagacctcccagagcccgtggttccctggagccagtacgaagggttcctgctctgtgggcagctcacgaatgcggatgaggcaaaggctcagcaggagttgatgaagcagctctccatccttcctcgtgacaactatagtctcctgagctacatctgcaggttcctacatgaaatacagctgaactgtgctgttaacaagatgagtgtggacaacctggctactgtgattggtgtgaatctcatcaggtcgaaggtcgaagaccctgccgtgatcatgagagggactcctcagatccaaagagtgatgactatgatgatcagagaccatgaagtcctcttccccaagtccaaggatatacccctgtcaccccctgcccagaaaaatgaccccaagaaagctccagtggcccgaagctctgtaggctgggatgccactgaagacctccgaatttctaggacagacagcttcagtagcatgacaagcgactctgatacaaccagccccaccggacagcagccgagcgatgcgtttccggaggacagcagcaaagtacccagggaaaagccaggagactggaaaatgcaatctcgtaaaaggactcaaacactccctaaccggaaatgtttcttgacatcagcttttcagggtgccaacagcagcaaaatggagatctttaaaaatgaattctggtcgccttcctcagaggctaaggcaggggaagggcacaggagaacgatgtctcaagacttgcgccaactttctgactcccaacggacttccacctacgataacgtcccttccctgccagggtcccctggggaggaagccagtgcactctcttcccaagcctgtgactccaagggagatactcttgccagtccaaactctgaaactgggcctggaaaaaagaactctggagaagaggaaattgattctttgcagaggatggtccaagagctacgaaaggaaatagaaacacagaagcaaatgtatgaggaacagattaaaaaccttgagaaggaaaattatgacgtttgggctaaagtggtgaggctcaatgaagaactggagaaggaaaagaagaagtctgcagccctagagatcagcctccgcaacatggagcgctcccgggaggatgttgagaagaggaacaaggccttggaagaagaagtcaaggaatttgtcaaatccatgaaggaacccaagaccgaggcttaagggtcccaggagtactgcagggacagccccagagaggcccaactctggcccctttctcagtgctatctgatgacggggaaacaaaattattctctgagagggaaaggacatttgagggaaacatcaaatttccccataaataaatgaatggagtttgcaggaaggtgagggtgagcagagatgtgtgtggacatctctgaccatccatcgctgtattcaaatggattgttttattccattctggtctcaggcatgaccacgtccagtgaagacatttgaggcagcacatctcaggacccaggcaatagactggccccaactcaggctggactaaggtgtgattaattctttgttttttgtgtggaacagctcaccttgtcagacagcctcagggcatctctgagacacaggggcagaaaatgacattcatcttttgagtcctcatccatggagtgctgtgtttggggggctgcatctgctgaagcgagaaccccattctgccaccccaccaggatgcccattctccaggacttctccaacttactattagactaaaccagaacaagcaacaaactgtat

SEQ ID NO: 175735 - DNA, 990 bp, Homo sapiens
  Payload ID: 14513
  Gene Symbol: ARHGAP25
  Gene Name: Rho GTPase activating protein 25
  ENST ID: ENST00000488795
  CDS Start-End: 125-544
gaagcaatcataaggaggaacaaaaacagacacaaaaacagagggaaagagtgaaaagacaagaagggcgcaaactgtgacagactcaccgcttcactaactactcacttaaactggaagcaaaatgtccctaaaattgccaaggaactgggatttcaacctgaaagtggaggctgcgaaaatagctcggtcaaggagtgtgatgactggcgagcagatggctgccttccatccatcgtccacccccaacccgctggagaggcccatcaagatgggctggctgaagaagcagaggtccatcgtgaagaactggcagcagaggtactttgtgctgagggcgcagcagctctactactacaaggatgaagaggacacgaagccccagcagtgtttggccagcgcttggatgagactgtggcctatgaacagaaattcggcccccatctggtgcccatcctggtggagaaatgtgcagagttcatcctggagcacggccggaatgaagagggcatcttccgtctgcctgggcaggacaacctggtgaagcagctgagagacgcttttgatgctggggagcggccctcctttgacagagacacagatgtgcacactgtggcttccctgttaaagctctacctccgagacctcccagagcccgtggttccctggagccagtacgaagggttcctgctctgtgggcagctcacgaatgcggatgaggcaaaggctcagcaggagttgatgaagcagctctccatccttcctcgtgacaactatagtctcctgagctacatctgcaggtgagaggcccctggtatcaactctgcagttttcaaccccatcagaaagaagctcctagttagaagaggagggaccacgtctgtgaacagagagattctggtctagcactttggaagatcagctgtattcacatagcactgaagtagcttcctgtataatttcaaggattctgaaaacctggttgaacca

SEQ ID NO: 175736 - DNA, 2247 bp, Homo sapiens
  Payload ID: 14513
  Gene Symbol: ARHGAP25
  Gene Name: Rho GTPase activating protein 25
  Uniprot ID: P42331
  ENST ID: ENST00000467265
  CDS Start-End: 319-2139
cagagggaagtgtcaactgggatatttctggtaaaactgaaagcaagaaaagcagggtgctagcccctgtgggactgagggtggaggctgggggagtttgggtgccatcctccagtgacagatggatggacctttcatctaagagaaaggaggagacacgttggcaaatcagcctcaagcctaagattgcttgtgaagcaatcataaggaggaacaaaaacagacacaaaaacagagggaaagagtgaaaagacaagaagggcgcaaactgtgacagactcaccgcttcactaactactcacttaaactggaagcaaaatgtccctaaaattgccaaggaactgggatttcaacctgaaagtggaggctgcgaaaatagctcggtcaaggagtgtgatgactggcgagcagatggctgccttccatccatcgtccacccccaacccgctggagaggcccatcaagatgggctggctgaagaagcagaggtccatcgtgaagaactggcagcagaggtactttgtgctgagggcgcagcagctctactactacaaggatgaagaggacacgaagccccagggctgcatgtatctaccaggatgtacaatcaaggagatcgccacaaacccagaagaagctgggaagtttgtctttgaaatcattccagtgtttggccagcgcttggatgagactgtggcctatgaacagaaattcggcccccatctggtgcccatcctggtggagaaatgtgcagagttcatcctggagcacggccggaatgaagagggcatcttccgtctgcctgggcaggacaacctggtgaagcagctgagagacgcttttgatgctggggagcggccctcctttgacagagacacagatgtgcacactgtggcttccctgttaaagctctacctccgagacctcccagagcccgtggttccctggagccagtacgaagggttcctgctctgtgggcagctcacgaatgcggatgaggcaaaggctcagcaggagttgatgaagcagctctccatccttcctcgtgacaactatagtctcctgagctacatctgcaggttcctacatgaaatacagctgaactgtgctgttaacaagatgagtgtggacaacctggctactgtgattggtgtgaatctcatcaggtcgaaggtcgaagaccctgccgtgatcatgagagggactcctcagatccaaagagtgatgactatgatgatcagagaccatgaagtcctcttccccaagtccaaggatatacccctgtcaccccctgcccagaaaaatgaccccaagaaagctccagtggcccgaagctctgtaggctgggatgccactgaagacctccgaatttctaggacagacagcttcagtagcatgacaagcgactctgatacaaccagccccaccggacagcagccgagcgatgcgtttccggaggacagcagcaaagtacccagggaaaagccaggagactggaaaatgcaatctcgtaaaaggactcaaacactccctaaccggaaatgtttcttgacatcagcttttcagggtgccaacagcagcaaaatggagatctttaaaaatgaattctggtcgccttcctcagaggctaaggcaggggaagggcacaggagaacgatgtctcaagacttgcgccaactttctgactcccaacggacttccacctacgataacgtcccttccctgccagggtcccctggggaggaagccagtgcactctcttcccaagcctgtgactccaagggagatactcttgccagtccaaactctgaaactgggcctggaaaaaagaactctggagaagaggaaattgattctttgcagaggatggtccaagagctacgaaaggaaatagaaacacagaagcaaatgtatgaggaacagattaaaaaccttgagaaggaaaattatgacgtttgggctaaagtggtgaggctcaatgaagaactggagaaggaaaagaagaagtctgcagccctagagatcagcctccgcaacatggagcgctcccgggaggatgttgagaagaggaacaaggccttggaagaagaagtcaaggaatttgtcaaatccatgaaggaacccaagaccgaggcttaagggtcccaggagtactgcagggacagccccagagaggcccaactctggcccctttctcagtgctatctgatgacggggaaacaaaattattctctgagagggaaagga

SEQ ID NO: 175737 - DNA, 6862 bp, Homo sapiens
  Payload ID: 14514
  Gene Symbol: ARHGAP26
  Gene Name: Rho GTPase activating protein 26
  Uniprot ID: Q9UNA1
  ENST ID: ENST00000274498
  CDS Start-End: 379-2823
ggcggggcggccgaggctgctgtgagagggcgctcgaggctgccgagagctagctagcgaaggaggcggggaggcggcgtctgcactcgctcgcccgctcgctcgcttcccggcgccgctgcgggtccgcgctgcgtttcctgctcgcgatccgctccgttgcccgcgcccggaacagcagcacctcggccgggtccgagctcggttcgggagtcttgcgcgccggcggacaccgcgcgcggagtgagccagcgccacacctgtggagccggcggccgtcgggggagccggccggggtcccgccgcgtgagtgctctgggcggcgggcggcccgggccccggcggaggcgcgccccccggctgggcgccgcgcgcaccatggggctcccagcgctcgagttcagcgactgctgcctcgatagtccgcacttccgagagacgctcaagtcgcacgaagcagagctggacaagaccaacaaattcatcaaggagctcatcaaggacgggaagtcactcataagcgcgctcaagaatttgtcttcagcgaagcggaagtttgcagattccttaaatgaatttaaatttcagtgcataggagatgcagaaacagatgatgagatgtgtatagcaagatctttgcaggagtttgccactgtcctcaggaatcttgaagatgaacggatacggatgattgagaatgccagcgaggtgctcatcactcccttggagaagtttcgaaaggaacagatcggggctgccaaggaagccaaaaagaagtatgacaaagagacagaaaagtattgtggcatcttagaaaaacacttgaatttgtcttccaaaaagaaagaatctcagcttcaggaggcagacagccaagtggacctggtccggcagcatttctatgaagtatccctggaatatgtcttcaaggtgcaggaagtccaagagagaaagatgtttgagtttgtggagcctctgctggccttcctgcaaggactcttcactttctatcaccatggttacgaactggccaaggatttcggggacttcaagacacagttaaccattagcatacagaacacaagaaatcgctttgaaggcactagatcagaagtggaatcactgatgaaaaagatgaaggagaatccccttgagcacaagaccatcagtccctacaccatggagggatacctctacgtgcaggagaaacgtcactttggaacttcttgggtgaagcactactgtacatatcaacgggattccaaacaaatcaccatggtaccatttgaccaaaagtcaggaggaaaagggggagaagatgaatcagttatcctcaaatcctgcacacggcggaaaacagactccattgagaagaggttttgctttgatgtggaagcagtagacaggccaggggttatcaccatgcaagctttgtcggaagaggaccggaggctctggatggaagccatggatggccgggaacctgtctacaactcgaacaaagacagccagagtgaagggactgcgcagttggacagcattggcttcagcataatcaggaaatgcatccatgctgtggaaaccagagggatcaacgagcaagggctgtatcgaattgtgggtgtcaactccagagtgcagaagttgctgagtgtcctgatggaccccaagactgcttctgagacagaaacagatatctgtgctgaatgggagataaagaccatcactagtgctctgaagacctacctaagaatgcttccaggaccactcatgatgtaccagtttcaaagaagtttcatcaaagcagcaaaactggagaaccaggagtctcgggtctctgaaatccacagccttgttcatcggctcccagagaaaaatcggcagatgttacagctgctcatgaaccacttggcaaatgttgctaacaaccacaagcagaatttgatgacggtggcaaaccttggtgtggtgtttggacccactctgctgaggcctcaggaagaaacagtagcagccatcatggacatcaaatttcagaacattgtcattgagatcctaatagaaaaccacgaaaagatatttaacaccgtgcccgatatgcctctcaccaatgcccagctgcacctgtctcggaagaagagcagtgactccaagcccccgtcctgcagcgagaggcccctgacgctcttccacaccgttcagtcaacagagaaacaggaacaaaggaacagcatcatcaactccagtttggaatctgtctcatcaaatccaaacagcatccttaattccagcagcagcttacagcccaacatgaactccagtgacccagacctggctgtggtcaaacccacccggcccaactcactccccccgaatccaagcccaacttcacccctctcgccatcttggcccatgttctcggcgccatccagccctatgcccacctcatccacgtccagcgactcatcccccgtcaggtctgttgcagggtttgtttggttttctgttgctgccgttgttctctcattggctcggtcctctcttcatgcagtgttcagcctcctcgtcaactttgttccctgccatccaaacctgcacttgctttttgacaggccagaagaagcggtacatgaagactccagcacaccgttccggaaggcaaaagccttgtatgcctgcaaagctgaacatgactcagaactttcgttcacagcaggcacggtcttcgataacgttcacccatctcaggagcctggctggttggaggggactctgaacggaaagactggcctcatccctgagaattacgtggagttcctctaaccgtgggccccagcagaactgctgagctttacatggtatccatgacaactgctgattccagtgtcgaggccatttctctttgccactgagaaatgcagcgtgactgactctgttgctacctgtcaacatgaatgtttctgtgagctctggtgtcactcatctccatgatcatctcagccaacatgcatcagtactgcaagaaaagaagtcaatcagcagaggagagcatttgataactaagaggaagacttgcaaagccgttttctcatgagtaccctgaatagggggcactcattttgtttcaacggtccaaacgcccaaccttcagaaagaggaagtcagatagaaatagtccctgagagcacactgtgtagctaagcctgctggggctgggtgaagaaattggcgctgagatccaggctggatccattgcttttgtttacaataggcactctctctaccccacctctcagtacttgagacttaaagtgctacaggcagctggatctgtttgcatgcaggatgaagagggttaaaacactgtttatataagatccaatctctcaccatctctaaagcagccgttggcctgtcatcagtgagatacaatccagtcttctcatgcacgggaacacacacaccctgcgtttctccctcccaggctaggaacctctctgccaccaagggctgccatccatcgcctagtaaccacggcaacccaacctactctaaaaccaaaccaaaaaaataaaataacacatcctctttgcatgacacattttttttctcccctttttggtacactttttttgaatggttttctaacaacttgaagcacaggatcaaggaattagggtggtctacttgaggcagatgggatagtagctgggaactgttccctttctgattaatttcagcagcatcggaatatatttggagcacaccctagtaacctcttgagattaaattacatagtcttaatatttctgttcctccatgcaactgatgtttgttttttaaagggtaagatgctgcctcccaatgggtgatgccatctgactggtttccccatgtcctcccattcacccatctctgctcccacccttgcctgcctctaacccaccactggccagcccccttgccctactctgggctgctgaacactggtgctgtggtggttttcaaggttaattcctaggctaaccgtatggcctatagtttaaaagcacatctatgttcactgccactctgaaaaagggaattatttctcagtctttcaaggcttgagactaatataggccattgtgattcaggaagaaacccaaggttggagggtgggatgagtaccctctgaaaaagggaatttgctggtgaaaagaggctggatcttgtggaagactgtcttggatggggaagtactacctggagatttcaaattcacttggcctgcaaacaacagagttatccgtatcttccacatgtgaatgtcattgcaagggtgactctagacaaactacaaaccgatggaccgtcaagctccccaggagccccttggatggcagcgttgcttcagagtgtttcctgtttctggaattccttgttagggaactttaaagaagaaaagaaaaacttgaattgtgttgaattactgtatcttttacttttttttttttgaaaagataaacttgtaaatagagtgatttgaaatactatatggcaaagttttatatttgatattctttaagttagttgctcacacacttaggctttgattgctgaagaagtatgtttaagagggagagaggggaggcaaagctgaagagagtcaaggtcactgtccccgcttcggcctgaaggaaagagaagacatttctatggccttgctctctgctgtcctgttggtgggcacgacacatcagtggtgttcagtctttatgtgtttttaagcatcccttgggctttggatttggagatgggaagagcatctccaggcaatgagtttttcaaagaatgcctacttagtagtaagatgaagctcaggatttaaataagtggggtcaggcattcgagtttttgtctttcttctcaggtgtatttcttggtacccccaagatatcaggccagaaagagatgagtcagttgctgtgctctttacttctttttctccacatcttctgaggctttagaaatgtggacaagctagttttcaaattttgtgtgcgtctgtaagttcttaaagaaccagcttcttagaatgttcagttctcaatgtgctgctgctttcccttctcctaaacattttaaaactcttccctttcacctccaattcccgtgatcccaaaagaagaggaagactccaggaggggtatagattgtgccgtcatagctttacaggtggttttaaagttaacaggggtttgtcatggtgattcactactcagtttatcagctcaaggattatacagctcttttccgggaactcacccaggagcaagcgagacactaccattgaatcagggaatgagaattaagaatggacaggaccaagacagaactcaagaaagccactggggaaaactcgagaagaaagggagtatactagtaggttagatctgtgaacctgaggacaagaagaccttgggaaatggaggcctcaggggatgtgcattcacatactattacgcttctcaaagagagaccaacatcatgcttttaacacatttgatgaggttttttatttgtgtttttgtttgttttttgagatggagtctcactctgtggcccaggctggagtgcagtggcgcaatcttggctcactgcaacctccacctcccaggttcaagtgattctcctgtctcagcctcccaagtagctgggactacaggcatgagccatcacacccagctagttttttgtatttttagtaaagatggggttttgccatgtttgccaggctgatctcgaactcctgacctcaagtgatctgcccacttcagacccccaaagtgctgggattccaggtgtgagccgctgcggccgaccacatttgatgtttgaagttgtaatctgtcccatcataaacttacctggagctcatgtggaggaacagaaggccaagatccttgctttgggggtgcctcacgaagcatccctgtagacatttggccccagcttcactgcttggaagcatgtccctccctcttgagttggctctgatttgaaatcgggagaaacagagctgctgccaatgggatcttttaggtaactccctccctagcttccgtgtgtctgtgcagtgcccatgagctgctgccaatgggatctttcaggtaccccctccccagcttccctgtggctgtgcggtgcccttgacagatggcttctctgtttccctttgcccagccaggctcccctccttcctattagctacaaaactggataaacttcagaatatgagccaatgagtaggaaggaacttgaagactaaagattttactctctcccctatccatgccccctacctctgactctctctgtgtgaacaggaaactttagggcagatgaggagaatgaattggttatcagagtggaagaccatggcccaggatccctgagctttcccagtagcctccagtttcctttgtaagacccagggatcacttagccatagcctgaatcttttaggggtattaaggtcagcctctcactcttccttcaggttactaacaaaatttcgtagctaaagaatgccatggccgggtgcagtggctcacgcctataatcccagcactttgggaggccgaggcgggcggatcacgaggtcaggagattgagaccatcctggctacgacggtgaaaccccgtctctactaaaaatacaaaaaattagccgggtgtggtggcgggcgcctgtagtcccagctactctggaggctgaggcaggagaatggcatgaacccaggaggcagagattgcagtgagccaagatcacgcccctgcactccagcctgggtgacagagccagactccgtctcaaagg

SEQ ID NO: 175738 - DNA, 9200 bp, Homo sapiens
  Payload ID: 14514
  Gene Symbol: ARHGAP26
  Gene Name: Rho GTPase activating protein 26
  Uniprot ID: Q9UNA1
  ENST ID: ENST00000378004
  CDS Start-End: 356-2635
gagagggcgctcgaggctgccgagagctagctagcgaaggaggcggggaggcggcgtctgcactcgctcgcccgctcgctcgcttcccggcgccgctgcgggtccgcgctgcgtttcctgctcgcgatccgctccgttgcccgcgcccggaacagcagcacctcggccgggtccgagctcggttcgggagtcttgcgcgccggcggacaccgcgcgcggagtgagccagcgccacacctgtggagccggcggccgtcgggggagccggccggggtcccgccgcgtgagtgctctgggcggcgggcggcccgggccccggcggaggcgcgccccccggctgggcgccgcgcgcaccatggggctcccagcgctcgagttcagcgactgctgcctcgatagtccgcacttccgagagacgctcaagtcgcacgaagcagagctggacaagaccaacaaattcatcaaggagctcatcaaggacgggaagtcactcataagcgcgctcaagaatttgtcttcagcgaagcggaagtttgcagattccttaaatgaatttaaatttcagtgcataggagatgcagaaacagatgatgagatgtgtatagcaagatctttgcaggagtttgccactgtcctcaggaatcttgaagatgaacggatacggatgattgagaatgccagcgaggtgctcatcactcccttggagaagtttcgaaaggaacagatcggggctgccaaggaagccaaaaagaagtatgacaaagagacagaaaagtattgtggcatcttagaaaaacacttgaatttgtcttccaaaaagaaagaatctcagcttcaggaggcagacagccaagtggacctggtccggcagcatttctatgaagtatccctggaatatgtcttcaaggtgcaggaagtccaagagagaaagatgtttgagtttgtggagcctctgctggccttcctgcaaggactcttcactttctatcaccatggttacgaactggccaaggatttcggggacttcaagacacagttaaccattagcatacagaacacaagaaatcgctttgaaggcactagatcagaagtggaatcactgatgaaaaagatgaaggagaatccccttgagcacaagaccatcagtccctacaccatggagggatacctctacgtgcaggagaaacgtcactttggaacttcttgggtgaagcactactgtacatatcaacgggattccaaacaaatcaccatggtaccatttgaccaaaagtcaggaggaaaagggggagaagatgaatcagttatcctcaaatcctgcacacggcggaaaacagactccattgagaagaggttttgctttgatgtggaagcagtagacaggccaggggttatcaccatgcaagctttgtcggaagaggaccggaggctctggatggaagccatggatggccgggaacctgtctacaactcgaacaaagacagccagagtgaagggactgcgcagttggacagcattggcttcagcataatcaggaaatgcatccatgctgtggaaaccagagggatcaacgagcaagggctgtatcgaattgtgggtgtcaactccagagtgcagaagttgctgagtgtcctgatggaccccaagactgcttctgagacagaaacagatatctgtgctgaatgggagataaagaccatcactagtgctctgaagacctacctaagaatgcttccaggaccactcatgatgtaccagtttcaaagaagtttcatcaaagcagcaaaactggagaaccaggagtctcgggtctctgaaatccacagccttgttcatcggctcccagagaaaaatcggcagatgttacagctgctcatgaaccacttggcaaatgttgctaacaaccacaagcagaatttgatgacggtggcaaaccttggtgtggtgtttggacccactctgctgaggcctcaggaagaaacagtagcagccatcatggacatcaaatttcagaacattgtcattgagatcctaatagaaaaccacgaaaagatatttaacaccgtgcccgatatgcctctcaccaatgcccagctgcacctgtctcggaagaagagcagtgactccaagcccccgtcctgcagcgagaggcccctgacgctcttccacaccgttcagtcaacagagaaacaggaacaaaggaacagcatcatcaactccagtttggaatctgtctcatcaaatccaaacagcatccttaattccagcagcagcttacagcccaacatgaactccagtgacccagacctggctgtggtcaaacccacccggcccaactcactccccccgaatccaagcccaacttcacccctctcgccatcttggcccatgttctcggcgccatccagccctatgcccacctcatccacgtccagcgactcatcccccgtcagcacaccgttccggaaggcaaaagccttgtatgcctgcaaagctgaacatgactcagaactttcgttcacagcaggcacggtcttcgataacgttcacccatctcaggagcctggctggttggaggggactctgaacggaaagactggcctcatccctgagaattacgtggagttcctctaaccgtgggccccagcagaactgctgagctttacatggtatccatgacaactgctgattccagtgtcgaggccatttctctttgccactgagaaatgcagcgtgactgactctgttgctacctgtcaacatgaatgtttctgtgagctctggtgtcactcatctccatgatcatctcagccaacatgcatcagtactgcaagaaaagaagtcaatcagcagaggagagcatttgataactaagaggaagacttgcaaagccgttttctcatgagtaccctgaatagggggcactcattttgtttcaacggtccaaacgcccaaccttcagaaagaggaagtcagatagaaatagtccctgagagcacactgtgtagctaagcctgctggggctgggtgaagaaattggcgctgagatccaggctggatccattgcttttgtttacaataggcactctctctaccccacctctcagtacttgagacttaaagtgctacaggcagctggatctgtttgcatgcaggatgaagagggttaaaacactgtttatataagatccaatctctcaccatctctaaagcagccgttggcctgtcatcagtgagatacaatccagtcttctcatgcacgggaacacacacaccctgcgtttctccctcccaggctaggaacctctctgccaccaagggctgccatccatcgcctagtaaccacggcaacccaacctactctaaaaccaaaccaaaaaaataaaataacacatcctctttgcatgacacattttttttctcccctttttggtacactttttttgaatggttttctaacaacttgaagcacaggatcaaggaattagggtggtctacttgaggcagatgggatagtagctgggaactgttccctttctgattaatttcagcagcatcggaatatatttggagcacaccctagtaacctcttgagattaaattacatagtcttaatatttctgttcctccatgcaactgatgtttgttttttaaagggtaagatgctgcctcccaatgggtgatgccatctgactggtttccccatgtcctcccattcacccatctctgctcccacccttgcctgcctctaacccaccactggccagcccccttgccctactctgggctgctgaacactggtgctgtggtggttttcaaggttaattcctaggctaaccgtatggcctatagtttaaaagcacatctatgttcactgccactctgaaaaagggaattatttctcagtctttcaaggcttgagactaatataggccattgtgattcaggaagaaacccaaggttggagggtgggatgagtaccctctgaaaaagggaatttgctggtgaaaagaggctggatcttgtggaagactgtcttggatggggaagtactacctggagatttcaaattcacttggcctgcaaacaacagagttatccgtatcttccacatgtgaatgtcattgcaagggtgactctagacaaactacaaaccgatggaccgtcaagctccccaggagccccttggatggcagcgttgcttcagagtgtttcctgtttctggaattccttgttagggaactttaaagaagaaaagaaaaacttgaattgtgttgaattactgtatcttttacttttttttttttgaaaagataaacttgtaaatagagtgatttgaaatactatatggcaaagttttatatttgatattctttaagttagttgctcacacacttaggctttgattgctgaagaagtatgtttaagagggagagaggggaggcaaagctgaagagagtcaaggtcactgtccccgcttcggcctgaaggaaagagaagacatttctatggccttgctctctgctgtcctgttggtgggcacgacacatcagtggtgttcagtctttatgtgtttttaagcatcccttgggctttggatttggagatgggaagagcatctccaggcaatgagtttttcaaagaatgcctacttagtagtaagatgaagctcaggatttaaataagtggggtcaggcattcgagtttttgtctttcttctcaggtgtatttcttggtacccccaagatatcaggccagaaagagatgagtcagttgctgtgctctttacttctttttctccacatcttctgaggctttagaaatgtggacaagctagttttcaaattttgtgtgcgtctgtaagttcttaaagaaccagcttcttagaatgttcagttctcaatgtgctgctgctttcccttctcctaaacattttaaaactcttccctttcacctccaattcccgtgatcccaaaagaagaggaagactccaggaggggtatagattgtgccgtcatagctttacaggtggttttaaagttaacaggggtttgtcatggtgattcactactcagtttatcagctcaaggattatacagctcttttccgggaactcacccaggagcaagcgagacactaccattgaatcagggaatgagaattaagaatggacaggaccaagacagaactcaagaaagccactggggaaaactcgagaagaaagggagtatactagtaggttagatctgtgaacctgaggacaagaagaccttgggaaatggaggcctcaggggatgtgcattcacatactattacgcttctcaaagagagaccaacatcatgcttttaacacatttgatgaggttttttatttgtgtttttgtttgttttttgagatggagtctcactctgtggcccaggctggagtgcagtggcgcaatcttggctcactgcaacctccacctcccaggttcaagtgattctcctgtctcagcctcccaagtagctgggactacaggcatgagccatcacacccagctagttttttgtatttttagtaaagatggggttttgccatgtttgccaggctgatctcgaactcctgacctcaagtgatctgcccacttcagacccccaaagtgctgggattccaggtgtgagccgctgcggccgaccacatttgatgtttgaagttgtaatctgtcccatcataaacttacctggagctcatgtggaggaacagaaggccaagatccttgctttgggggtgcctcacgaagcatccctgtagacatttggccccagcttcactgcttggaagcatgtccctccctcttgagttggctctgatttgaaatcgggagaaacagagctgctgccaatgggatcttttaggtaactccctccctagcttccgtgtgtctgtgcagtgcccatgagctgctgccaatgggatctttcaggtaccccctccccagcttccctgtggctgtgcggtgcccttgacagatggcttctctgtttccctttgcccagccaggctcccctccttcctattagctacaaaactggataaacttcagaatatgagccaatgagtaggaaggaacttgaagactaaagattttactctctcccctatccatgccccctacctctgactctctctgtgtgaacaggaaactttagggcagatgaggagaatgaattggttatcagagtggaagaccatggcccaggatccctgagctttcccagtagcctccagtttcctttgtaagacccagggatcacttagccatagcctgaatcttttaggggtattaaggtcagcctctcactcttccttcaggttactaacaaaatttcgtagctaaagaatgccatggccgggtgcagtggctcacgcctataatcccagcactttgggaggccgaggcgggcggatcacgaggtcaggagattgagaccatcctggctacgacggtgaaaccccgtctctactaaaaatacaaaaaattagccgggtgtggtggcgggcgcctgtagtcccagctactctggaggctgaggcaggagaatggcatgaacccaggaggcagagattgcagtgagccaagatcacgcccctgcactccagcctgggtgacagagccagactccgtctcaaaggaaaaaaaaaaaaaaaaaaaaagaatgccatgccaggagaagacagctggtttcaaatccctgcccccaggcaagtaaaaccctgacttgctcaagacagaagatcttttctcctgtttttcaaaataaacatatatagggatggaccctgtgcattgtggcctgccttggtgtcctagaattggagccagtctttagcttaatgtctgaagtatttatacggccaatatgtgttttcttatgtcagaccacactgtctttttgaatatcagttcatttcctctcaccgagtgcttttcggtgagaggcaaagagaaagaatgaacaatcaagtattgacagactggcattagcaggacagagccatactagtgacaagggcatcccaaggcacttgcccagagctgcagagttgtgtgtgccatacctgcggctcaaagggaaggccttctatcccctgagtttctatcagctgaaaatggcaactgctgtctcagtaaaagctctgtcttgactgcagaggctccaaaagcattcacagttgagggggagaaagacagaaagaagaagccaaagataacctgatccctgcctgtctgttggcacctgtcatcctctggcttctgctcccaaaagcaagtctggatgactgagttttgtggacatggcactcccggagacagcagtggccaccatggcacccagagtttgcccaagtactgaatgttttgtgagcaaccatgttccccaagtaggtagccagcgctgcagaaaccaaacagcctcttagctacctgactttaaaaggaatgacctaggtgttctgccaaaggagttatctatcatctctggcaaacttgacaatcatcacttacctcgacaaccctgccccacatcactttataaagtcagcaggatgtcttctcacccaccctgtgctggtgtctaacaaatttatcttgtcatgctcaaatgtgtttggcagccacaccgatcggctgggtgctgaaccgcctctctgtaattgtagcatcaaaatgacaacagcagcagagcagcgaatcttgcacagccccacagcatgcctgagacaagactccaacaagtaataattagctttttttctcctgccgcctacagtacctgtctaactaaagagcttcccaaagtggagggaaaggccatagaatccaggtgtcattcagagccagtccttgctgaaatgtggtcttccagtggaagcacctgtattattgagaggaaaaagtgttggatgcaaagtaacaccaggactagagagaaagagaaaggtgaaccatcctaaggagctttggatacttttttagaaggataaatattatgcttactgaggagaaaaaaaaaagcgatcacagaaaaatttcacagctaatatttttacaaaagttgtgccagacattacagagtgaaaacgtctctcaaggtggaatgctttagagagcaaaggcttagcatagacctagacccttgtgtgggtatgacatgacatgacatgtccatgtcaaaattcactttagtcagaaccagagtattgataaacaaaatgtcagttacctggagcagtcctggagaggttaagacattctatactgttctacgtcaaccatttctacaaagttgtccagacacctaaaagcagctttcttggttatccagatgccagaatcaaccttgtatctgacaatgcacatctgttgattctaaagtatatttatgtgtgtgtgtatgtgtgtgtatacagcacatatttacatctatgaagacatagacacttacagagacccacatgagctggcactttctgagcctttacagcctttaagactcggaggttgagaattagagacacaagagaggctgtggatggcctattaaaatgattaaagatgtaaattcagtgccattttaaaactgttcatatttatcaaacaattactgtctacagctacattttttgttaacttacttaaagtcatgtcgcaagaaagatcaaacccatgaatgcttagtagctaaggctagtgttcaaaagcactctaaaagacattttgtccacattttggaaaagaaaatatttgcatgtttaattcataatttaggctatctttgagtatactgtaaagtgctgtgtgatataatatcaataaagtacttattaaatggcactttaatgttttcttttaaaataacgcactgttctaaacttcagtattgactattgactcgtgcatagaatccaatgctgtaattagaaagtaatctgtgactagaatagacctttgtccctgttagtagccctgttgccatgttcaggcttttaaaaaatgcttttgtgtcaccaaatatatctataaagaaaacaaaatttctgttcagaggcctctgaaacttggctttcttacatgtggttggtttatgtgacaatccctatgaaatgagtggacgtatgatttttgaattaaatgacttttccatttggtggtatttt

SEQ ID NO: 175739 - DNA, 564 bp, Homo sapiens
  Payload ID: 14514
  Gene Symbol: ARHGAP26
  Gene Name: Rho GTPase activating protein 26
  ENST ID: ENST00000378013
  CDS Start-End: 65-564
agccagagatggagtccctgccagtgcagagctcttgacttctgccccatctcacttgcccggaatggaacctcttgcaccaagccctagaatttggacttgtgttttctattttggcattgaatctgaggaggatttgtcttcagcgaagcggaagtttgcagattccttaaatgaatttaaatttcagtgcataggagatgcagaaacagatgatgagatgtgtatagcaagatctttgcaggagtttgccactgtcctcaggaatcttgaagatgaacggatacggatgattgagaatgccagcgaggtgctcatcactcccttggagaagtttcgaaaggaacagatcggggctgccaaggaagccaaaaagaagtatgacaaagagacagaaaagtattgtggcatcttagaaaaacacttgaatttgtcttccaaaaagaaagaatctcagcttcaggaggcagacagccaagtggacctggtccggcagcatttctatgaagtatccctggaatatgtcttcaaggtgcaggaagtccaagagagaaagatgtttga

SEQ ID NO: 175740 - DNA, 783 bp, Homo sapiens
  Payload ID: 14514
  Gene Symbol: ARHGAP26
  Gene Name: Rho GTPase activating protein 26
  ENST ID: ENST00000421521
  CDS Start-End: 1-463
ccccccgaatccaagcccaacttcacccctctcgccatcttggcccatgttctcggcgccatccagccctatgcccacctcatccacgtccagcgactcatcccccgtcaggtctgttgcagggtttgtttggttttctgttgctgccgttgttctctcattggctcggtcctctcttcatgcagtgttcagcctcctcgtcaactttgttccctgccatccaaacctgcacttgctttttgacaggccagaagaagcggtacatgaagactccagcacaccgttccggaaggcaaaagccttgtatgcctgcaaagctgaacatgactcagaactttcgttcacagcaggcacggtcttcgataacgcagagtgtccttcagcttccacagccatcttcactgccacaccgaagctccgggcacctccacctctcacctgggcacttccactggccgcctgacacatcttctcacatctgctcttgctgccataaccccctctttacagagcagcgagagtgatctttgaaaaacggaaatggcattaaagcccttcagtggcctcccattgctctgagaattacttacaaggccctccagggcccagttcctgcccctctgacctcacgccctcacttgacatactacagcctcatgccttcttcatgttctcaagcaaggtcggcaaactatgacctgcccgtcaaatccaacctgccacctgtcacctaacaattctgtaactgctcccacatacaacatggtcgtcatcataaatcct

SEQ ID NO: 175741 - DNA, 412 bp, Homo sapiens
  Payload ID: 14514
  Gene Symbol: ARHGAP26
  Gene Name: Rho GTPase activating protein 26
  ENST ID: ENST00000443045
  CDS Start-End: 1-294
gcaaaactggagaaccaggagtctcgggtctctgaaatccacagccttgttcatcggctcccagagaaaaatcggcagatgttacagctgctcatgaaccacttggcaaagtatgctggaggcttaggaaagaaatgtgtgaaatgttcattgcagtggagaacagcagcaaatgccagatggccttcccagaggatgctggggaagtgctcatgcaaccaggccaccaagcagagttttcagggggattttacctatggtgatcaagggcaaattggagtgtgttgtccatgataccaggtcaccacacagaattttgtgggattatatgttcttatgctcatcaagaacaaacaaaaatatgttgtgggtttacagaatttgggtttttagtaaagaggactggattcta

SEQ ID NO: 175742 - DNA, 2870 bp, Homo sapiens
  Payload ID: 14514
  Gene Symbol: ARHGAP26
  Gene Name: Rho GTPase activating protein 26
  ENST ID: ENST00000443674
  CDS Start-End: 1-1166
ctgcgcagttggacagcattggcttcagcataatcaggaaatgcatccatgctgtggaaaccagagggatcaacgagcaagggctgtatcgaattgtgggtgtcaactccagagtgcagaagttgctgagtgtcctgatggaccccaagactgcttctgagacagaaacagatatctgtgctgaatgggagataaagaccatcactagtgctctgaagacctacctaagaatgcttccaggaccactcatgatgtaccagtttcaaagaagtttcatcaaagcagcaaaactggagaaccaggagtctcgggtctctgaaatccacagccttgttcatcggctcccagagaaaaatcggcagatgttacagctgctcatgaaccacttggcaaatgttgctaacaaccacaagcagaatttgatgacggtggcaaaccttggtgtggtgtttggacccactctgctgaggcctcaggaagaaacagtagcagccatcatggacatcaaatttcagaacattgtcattgagatcctaatagaaaaccacgaaaagatatttaacaccgtgcccgatatgcctctcaccaatgcccagctgcacctgtctcggaagaagagcagtgactccaagcccccgtcctgcagcgagaggcccctgacgctcttccacaccgttcagtcaacagagaaacaggaacaaaggaacagcatcatcaactccagtttggaatctgtctcatcaaatccaaacagcatccttaattccagcagcagcttacagcccaacatgaactccagtgacccagacctggctgtggtcaaacccacccggcccaactcactccccccgaatccaagcccaacttcacccctctcgccatcttggcccatgttctcggcgccatccagccctatgcccacctcatccacgtccagcgactcatcccccgtcaggccagaagaagcggtacatgaagactccagcacaccgttccggaaggcaaaagccttgtatgcctgcaaagctgaacatgactcagaactttcgttcacagcaggcacggtcttcgataacgttcacccatctcaggagcctggctggttggaggggactctgaacggaaagactggcctcatccctgagaattacgtggagttcctctaaccgtgggccccagcagaactgctgagctttacatggtatccatgacaactgctgattccagtgtcgaggccatttctctttgccactgagaaatgcagcgtgactgactctgttgctacctgtcaacatgaatgtttctgtgagctctggtgtcactcatctccatgatcatctcagccaacatgcatcagtactgcaagaaaagaagtcaatcagcagaggagagcatttgataactaagaggaagacttgcaaagccgttttctcatgagtaccctgaatagggggcactcattttgtttcaacggtccaaacgcccaaccttcagaaagaggaagtcagatagaaatagtccctgagagcacactgtgtagctaagcctgctggggctgggtgaagaaattggcgctgagatccaggctggatccattgcttttgtttacaataggcactctctctaccccacctctcagtacttgagacttaaagtgctacaggcagctggatctgtttgcatgcaggatgaagagggttaaaacactgtttatataagatccaatctctcaccatctctaaagcagccgttggcctgtcatcagtgagatacaatccagtcttctcatgcacgggaacacacacaccctgcgtttctccctcccaggctaggaacctctctgccaccaagggctgccatccatcgcctagtaaccacggcaacccaacctactctaaaaccaaaccaaaaaaataaaataacacatcctctttgcatgacacattttttttctcccctttttggtacactttttttgaatggttttctaacaacttgaagcacaggatcaaggaattagggtggtctacttgaggcagatgggatagtagctgggaactgttccctttctgattaatttcagcagcatcggaatatatttggagcacaccctagtaacctcttgagattaaattacatagtcttaatatttctgttcctccatgcaactgatgtttgttttttaaagggtaagatgctgcctcccaatgggtgatgccatctgactggtttccccatgtcctcccattcacccatctctgctcccacccttgcctgcctctaacccaccactggccagcccccttgccctactctgggctgctgaacactggtgctgtggtggttttcaaggttaattcctaggctaaccgtatggcctatagtttaaaagcacatctatgttcactgccactctgaaaaagggaattatttctcagtctttcaaggcttgagactaatataggccattgtgattcaggaagaaacccaaggttggagggtgggatgagtaccctctgaaaaagggaatttgctggtgaaaagaggctggatcttgtggaagactgtcttggatggggaagtactacctggagatttcaaattcacttggcctgcaaacaacagagttatccgtatcttccacatgtgaatgtcattgcaagggtgactctagacaaactacaaaccgatggaccgtcaagctccccaggagccccttggatggcagcgttgcttcagagtgtttcctgtttctggaattccttgttagggaactttaaagaagaaaagaaaaacttgaattgtgttgaattactgtatcttttacttttttttttttgaaaagataaacttgtaaatagagtgatttg

SEQ ID NO: 175743 - DNA, 559 bp, Homo sapiens
  Payload ID: 14514
  Gene Symbol: ARHGAP26
  Gene Name: Rho GTPase activating protein 26
  ENST ID: ENST00000424007
  CDS Start-End: 1-384
gtcattgagatcctaatagaaaaccacgaaaagatatttaacaccgtgcccgatatgcctctcaccaatgcccagctgcacctgtctcggaagaagagcagtgactccaagcccccgtcctgcagcgagaggcccctgacgctcttccacaccgttcagtcaacagagaaacaggaacaaaggaacagcatcatcaactccagtttggaatctgtctcatcaaatccaaacagcatccttaattccagcagcagcttacagcccaacatgaactccagtgacccagacctggctgtggtcaaacccacccggcccaactcactgcactggggatttggaatgtgtttggagggttgtactgaggtgcagagtcctgcttcgtgatgggcacaagggttcatgcgagttcagcaagcagttaccatgtctacggcatgccaggatactgttgggaaggtagtattccgttgttcagcctcctcgtcaactttgttccctgccatccaaacctgcacttgctttttgacaggccagaagaagcggtacatgaagactccag

SEQ ID NO: 175744 - DNA, 785 bp, Homo sapiens
  Payload ID: 14514
  Gene Symbol: ARHGAP26
  Gene Name: Rho GTPase activating protein 26
  ENST ID: ENST00000425417
  CDS Start-End: 1-296
ccccgaatccaagcccaacttcacccctctcgccatcttggcccatgttctcggcgccatccagccctatgcccacctcatccacgtccagcgactcatcccccgtcagcacaccgttccggaaggcaaaagccttgtatgcctgcaaagctgaacatgactcagaactttcgttcacagcaggcacggtcttcgataacgcagagtgtccttcagcttccacagccatcttcactgccacaccgaagctccgggcacctccacctctcacctgggcacttccactggccgcctgacacatcttctcacatctgctcttgctgccataaccccctctttacagagcagcgagagtgatctttgaaaaacggaaatggcattaaagcccttcagtggcctcccattgctctgagaattacttacaaggccctccagggcccagttcctgcccctctgacctcacgccctcacttgacatactacagcctcatgccttcttcatgttctcaagcaaggtcggcaaactatgacctgcccgtcaaatccaacctgccacctgtcacctaacaattctgtaactgctcccacatacaacatggtcgtcatcataaatcctataggtattgttgagagcaggaggaaagtttggttgagtgagtgagagaccttacccaagccttcctgtggtctctaggagtcatggcagagttcgctgacactggtctgcttttaaccagccttgccagtgacctttcaaattccctgaggagcaaaaggccaaattg

SEQ ID NO: 175745 - DNA, 527 bp, Homo sapiens
  Payload ID: 14514
  Gene Symbol: ARHGAP26
  Gene Name: Rho GTPase activating protein 26
  ENST ID: ENST00000451259
  CDS Start-End: 253-527
tttctgcgttctctcctcaatcatcttactcctgtcagtgaagagagtggaaacttcagttggggcttgatgatgggaacggggattagtttccccagggaacctttacttccgttgtattttaagacccactggatgtagcatcaatgggaaacagtcttctttggtccctgggggaaatcccggggtcactttggaacttcttgggtgaagcactactgtacatatcaacgggattccaaacaaatcaccatggtaccatttgaccaaaagtcaggaggaaaagggggagaagatgaatcagttatcctcaaatcctgcacacggcggaaaacagactccattgagaagaggttttgctttgatgtggaagcagtagacaggccaggggttatcaccatgcaagctttgtcggaagaggaccggaggctctggatggaagccatggatggccgggaacctgtctacaactcgaacaaagacagccagagtgaagggactgcgcagttggacagcattggcttcag

SEQ ID NO: 175746 - DNA, 565 bp, Homo sapiens
  Payload ID: 14514
  Gene Symbol: ARHGAP26
  Gene Name: Rho GTPase activating protein 26
  ENST ID: ENST00000419676
  CDS Start-End: 1-384
attgtcattgagatcctaatagaaaaccacgaaaagatatttaacaccgtgcccgatatgcctctcaccaatgcccagctgcacctgtctcggaagaagagcagtgactccaagcccccgtcctgcagcgagaggcccctgacgctcttccacaccgttcagtcaacagagaaacaggaacaaaggaacagcatcatcaactccagtttggaatctgtctcatcaaatccaaacagcatccttaattccagcagcagcttacagcccaacatgaactccagtgacccagacctggctgtggtcaaacccacccggcccaactcacttgttcagcctcctcgtcaactttgttccctgccatccaaacctgcacttgctttttgacaggccagaagaagcggtacatgaagactccagcacaccgttccggaaggcaaaagccttgtatgcctgcaaagctgaacatgactcagaactttcgttcacagcaggcacggtcttcgataacgttcacccatctcaggagcctggctggttggaggggactctgaacggaaagactggc

SEQ ID NO: 175747 - DNA, 1632 bp, Homo sapiens
  Payload ID: 14514
  Gene Symbol: ARHGAP26
  Gene Name: Rho GTPase activating protein 26
  ENST ID: ENST00000418236
  CDS Start-End: 1-884
accccaagactgcttctgagacagaaacagatatctgtgctgaatgggagataaagaccatcactagtgctctgaagacctacctaagaatgcttccaggaccactcatgatgtaccagtttcaaagaagtttcatcaaagcagcaaaactggagaaccaggagtctcgggtctctgaaatccacagccttgttcatcggctcccagagaaaaatcggcagatgttacagctgctcatgaaccacttggcaaatgttgctaacaaccacaagcagaatttgatgacggtggcaaaccttggtgtggtgtttggacccactctgctgaggcctcaggaagaaacagtagcagccatcatggacatcaaatttcagaacattgtcattgagatcctaatagaaaaccacgaaaagatatttaacaccgtgcccgatatgcctctcaccaatgcccagctgcacctgtctcggaagaagagcagtgactccaagcccccgtcctgcagcgagaggcccctgacgctcttccacaccgttcagtcaacagagaaacaggaacaaaggaacagcatcatcaactccagtttggaatctgtctcatcaaatccaaacagcatccttaattccagcagcagcttacagcccaacatgaactccagtgacccagacctggctgtggtcaaacccacccggcccaactcactcacaccgttccggaaggcaaaagccttgtatgcctgcaaagctgaacatgactcagaactttcgttcacagcaggcacggtcttcgataacgttcacccatctcaggagcctggctggttggaggggactctgaacggaaagactggcctcatccctgagaattacgtggagttcctctaaccgtgggccccagcagaactgctgagctttacatggtatccatgacaactgctgattccagtgtcgaggccatttctctttgccactgagaaatgcagcgtgactgactctgttgctacctgtcaacatgaatgtttctgtgagctctggtgtcactcatctccatgatcatctcagccaacatgcatcagtactgcaagaaaagaagtcaatcagcagaggagagcatttgataactaagaggaagacttgcaaagccgttttctcatgagtaccctgaatagggggcactcattttgtttcaacggtccaaacgcccaaccttcagaaagaggaagtcagatagaaatagtccctgagagcacactgtgtagctaagcctgctggggctgggtgaagaaattggcgctgagatccaggctggatccattgcttttgtttacaataggcactctctctaccccacctctcagtacttgagacttaaagtgctacaggcagctggatctgtttgcatgcaggatgaagagggttaaaacactgtttatataagatccaatctctcaccatctctaaagcagccgttggcctgtcatcagtgagatacaatccagtcttctcatgcacgggaacacacacaccctgcgtttctccctcccaggctaggaacctctctgccaccaagggctgccatccatcgcctagtaaccacggcaacccaacctactctaaaaccaaaccaaaaaaa

SEQ ID NO: 175748 - DNA, 1376 bp, Homo sapiens
  Payload ID: 14515
  Gene Symbol: ARHGAP27
  Gene Name: Rho GTPase activating protein 27
  Uniprot ID: Q6ZUM4
  ENST ID: ENST00000290470
  CDS Start-End: 450-1241
ggaagttctgcccggcgctctccgccggtgcctccctggttatattgttgaacaggaaacccggcagcgcgggagccgcacagtcgaggagggagcgcgggacgccgagcccacgcgcgcctgccggggcaagtggaggcgaagccggcgagcggacgccccgagggtcggggaaggaaccgaggtccggtccccttcttatccagcccgagacatcgagctccggtgggcgtccctgcgctgggaatcccgctcggagtttttccaggcccggccgggctgctccgggaaaggccctgctcctgttccgcgcagcctctccggcctcgcccctggaaaccccgcccagggcgatggtaggggcctaacctgcagccaccgccggctccgcccacccagcccatgggctccctgaggcccgcccagccgacgaaaacgccgcggctgcgatggcggcggacgtggtgggggacgtgtacgtgctggtggagcaccccttcgagtacaccggcaaggacgggcgccgcgtggccatccggccgaatgagcgctaccggctgctgcggcgcagcaccgagcactggtggcacgtgcggcgtgagcccggcggccgccccttctacctgcctgcgcagtacgtgcgcgagctgcccgcgctgggcaaccctgccgccgccgcgccgccaggtccccacccgagccccgcggcccctgagccgctcgcctacgactaccggtttgtgagcgcggcggcgaccgcgggccccgacggcgcccccgaggagtccggaggccgagccagctccctgtgcggccctgcgcaacgcggcgccgcgacccagcgcagcagcctggcgcccggcctgccagcctgcctgtacctgcggcccgcggcgcccgtgcggcccgcgcagtccctgaacgacctggcctgcgccgccgtctcgcctcccgccggcctcctaggaagcagcggcagcttcaaggcctgcagcgtggcgggctcctgggtgtgcccgcggcctctggcgcgcagcgactcagagaacgtctacgaggtcatccaggacttgcacgtcccgccgccggaggagagcgcagagcaggtacctccccgggcgctggggcgcggaggcgggtggcgcgctagggaccgcgcccgcacggagccggggcgcaaggagacccgctccgctcagcgtcgggcacgacgcccacctctgtccgaagacttcggatgagctccctctccccaaccgcgaaacgtgaggggtgcacgcccgcagtccctcatcagcaattcccaagctccaaagctccctggaagcccagaggcttttcgtaatccaattggtggcaaaattgcgcttgaactg

SEQ ID NO: 175749 - DNA, 3628 bp, Homo sapiens
  Payload ID: 14515
  Gene Symbol: ARHGAP27
  Gene Name: Rho GTPase activating protein 27
  Uniprot ID: Q6ZUM4
  ENST ID: ENST00000376922
  CDS Start-End: 435-2081
acatgagcaggcagccccgactggaaggagcccggggccctcattccttctcctccactgggaactgagtggacgacccaccggagcccgtgtacgcgaacatagagaggcagccccgggccacttcaccgggcgccgctgcagccccccttcccagcccggtgtgggagacgcacacggacgcgggcaccgggcgcccctactactacaacccagacacgggagttaccacctgggagtcgccctttgaggctgccgagggtgccgccagcccagccacctcccctgcctcggtggacagccacgtgagccttgagaccgagtggggccagtactgggatgaggagagccgcagggtgttcttctacaacccgctgacgggcgagacggcctgggaggacgaggccgagaacgagcccgaggaggagttggagatgcagccgggcctgagccctggcagcccaggggacccgcggccccccactcccgagacggactaccccgagtcgctgaccagttaccccgaggaggactattctcccgtgggctctttcggtgagcccggccctacctctcccttgaccacaccccccggctggtcttgtcatgtcagccaggacaagcagatgctctacaccaaccacttcactcaggagcagtgggtgaggctggaggacccccacgggaagccatacttctacaatccagaggactcctctgttcgatgggagctgccccaggtccctgtccctgcccctcgaagcatccataaatccagccaggatggtgacaccccagcccaggccagccctccagaggagaaggtcccagcagagctggatgaggttgggagctgggaggaagtctctcctgccacagctgctgtgaggaccaagaccttggacaaggcaggggtgctccatcgcaccaagacggcagacaagggaaagcggctccggaagaagcactggagtgcctcctggactgtgctggagggtggcgtcctgacattcttcaaggactcaaagacctcggctgcaggcggcctgaggcagccttccaagttttccacccctgagtacacagtggagctgaggggggccactctctcctgggcccccaaagacaaatccagtaggaagaatgtgctggagctacggagccgagatggctctgagtacctgatccagcacgactcggaggccatcatcagcacctggcataaggccattgctcagggcatccaggagctgtccgcagagctgcccccagaggagagcgagagcagcagagtggacttcgggtcgagcgagcgcttgggaagctggcaggagaaagaggaggacgcgcgaccgaatgcagccgcgcccgccctgggccccgtgggcctggagagcgacttgagcaaggtccggcacaagctccgcaagttcctccagaggcggcccacactgcagtcgctgcgggagaagggctacatcaaagaccaggtgttcggctgcgcgctggccgcgctgtgtgagcgcgagaggagccgggtgccacgcttcgtgcagcagtgcatccgcgccgtcgaggcccgcgggctggacatcgacgggctgtaccgcatcagtggaaacctggccaccatccagaagctacgctataaggtggaccacgatgagcgccttgacctggatgacgggcgctgggaggacgtccacgttatcaccggagccctgaagctcttctttcgggagctgcccgagcccctcttccccttctcgcacttccgccagttcattgcggccatcaagttgcaggaccaggcccggcgcagccgctgtgtgcgtgacttggtgcgctcgctgcccgctcccaaccacgacactctgcggatgctcttccagcacctctgccgggtgatcgagcacggcgagcagaaccgcatgtcggtgcagagcgtggccattgtgttcgggcccacgctgctgcggcccgaggtggaagagaccagcatgcccatgaccatggtgttccagaaccaggtggtggagctcatcctgcagcagtgcgcggacatcttcccgccgcactgactgctggcctgtgactggggcggcggccgcggtcctgccacacaagctgggcggcggaggccacgcagccgggccttcttctctctgggaccctccgccagcgcatagccgcaggccggtgtgacttctgcaccctcggttctgagggtacggtgacccctagtgggcagtttgcaaaatgtgattccttcttcccaactccccatccccccttcccttcccgtcacgtcctgtttgggggttaattcggttttttctctgttgcatcgcgcctactgtgcgtgtgcgatagcgtgtgtgggggtgagagtttgttttctggaatggtaggtgctgggaggaggagtttgatggagggcttcctggctgcttctggccctcacctcgtggaggccttcacagagaccctgtgggccctggccctgtgctggcactgtgccagtcatgaggcagctctgatcacttccccactgtggaaacaggactgacccagccttcagtgtgggctgctgaagctatcctcctcaggcctcagggatgacctcctgcctgagcctctcacaggctggctgtgggccagtttcatctgctttcctgttgggggtcccgggcctctgctgtccttgacccactggtgttctgtgcaaggcttcttcccattcaccaagtgcacaccttgcatctgccgctcggcatgcaccagttccacacaccatcccattttacagacaaggacgctgaggcctgcagcagcagtgtgacttgctcaaggtccagtgagtgacctcattccccagaaaaggctcctcccacaccagagtacagcctgggtagggggaaaatcagttctttcagctaccacccatccaacctttgggcctatgtgaaaagaaaggaactaagctgggtgtgttctgtctggacctggggaggcccctgaaggcaaagagggaaactgtcccagctgttctgtcctaggggagggggacatagccctagcaggagctcccagcccctcttggcactctgacacacaagtacacccatctggggcccgctttgccacgaagagctgggcaggcctgcagggtgtggggaaggaggacacaacctcaagaaaggaagcgtgaaccccagggaacagcgggtcccttccctcctcagacacaagccacctcagcttgtggctcttggcccccagccccaccaacccacctgttcatttattcaacagacaatgacagctgatatttattggacatttgcaccatgccaagcattcggcttggattatcccatttgtttctcacagccggtatttattgtctgctcctctgtgccaggtgctgtgctctgggcaggggcactgcatgggctgcctgccctggtggagcttgtggtctgatgggtgaggctgacccaagcccaccccattgccaacagggccagggcaagagtacacacaggggcctcataccatatgtctaaatatttaaaagttatcaatcaagctaacaactgttaaataaaatatgttctattctcct

SEQ ID NO: 175750 - DNA, 4242 bp, Homo sapiens
  Payload ID: 14515
  Gene Symbol: ARHGAP27
  Gene Name: Rho GTPase activating protein 27
  Uniprot ID: Q6ZUM4
  ENST ID: ENST00000428638
  CDS Start-End: 19-2688
gaaaacgccgcggctgcgatggcggcggacgtggtgggggacgtgtacgtgctggtggagcaccccttcgagtacaccggcaaggacgggcgccgcgtggccatccggccgaatgagcgctaccggctgctgcggcgcagcaccgagcactggtggcacgtgcggcgtgagcccggcggccgccccttctacctgcctgcgcagtacgtgcgcgagctgcccgcgctgggcaaccctgccgccgccgcgccgccaggtccccacccgagccccgcggcccctgagccgctcgcctacgactaccggtttgtgagcgcggcggcgaccgcgggccccgacggcgcccccgaggagtccggaggccgagccagctccctgtgcggccctgcgcaacgcggcgccgcgacccagcgcagcagcctggcgcccggcctgccagcctgcctgtacctgcggcccgcggcgcccgtgcggcccgcgcagtccctgaacgacctggcctgcgccgccgtctcgcctcccgccggcctcctaggaagcagcggcagcttcaaggcctgcagcgtggcgggctcctgggtgtgcccgcggcctctggcgcgcagcgactcagagaacgtctacgaggtcatccaggacttgcacgtcccgccgccggaggagagcgcagagcaggtggacgacccaccggagcccgtgtacgcgaacatagagaggcagccccgggccacttcaccgggcgccgctgcagccccccttcccagcccggtgtgggagacgcacacggacgcgggcaccgggcgcccctactactacaacccagacacgggagttaccacctgggagtcgccctttgaggctgccgagggtgccgccagcccagccacctcccctgcctcggtggacagccacgtgagccttgagaccgagtggggccagtactgggatgaggagagccgcagggtgttcttctacaacccgctgacgggcgagacggcctgggaggacgaggccgagaacgagcccgaggaggagttggagatgcagccgggcctgagccctggcagcccaggggacccgcggccccccactcccgagacggactaccccgagtcgctgaccagttaccccgaggaggactattctcccgtgggctctttcggtgagcccggccctacctctcccttgaccacaccccccggctggtcttgtcatgtcagccaggacaagcagatgctctacaccaaccacttcactcaggagcagtgggtgaggctggaggacccccacgggaagccatacttctacaatccagaggactcctctgttcgatgggagctgccccaggtccctgtccctgcccctcgaagcatccataaatccagccaggatggtgacaccccagcccaggccagccctccagaggagaaggtcccagcagagctggatgaggttgggagctgggaggaagtctctcctgccacagctgctgtgaggaccaagaccttggacaaggcaggggtgctccatcgcaccaagacggcagacaagggaaagcggctccggaagaagcactggagtgcctcctggactgtgctggagggtggcgtcctgacattcttcaaggactcaaagacctcggctgcaggcggcctgaggcagccttccaagttttccacccctgagtacacagtggagctgaggggggccactctctcctgggcccccaaagacaaatccagtaggaagaatgtgctggagctacggagccgagatggctctgagtacctgatccagcacgactcggaggccatcatcagcacctggcataaggccattgctcagggcatccaggagctgtccgcagagctgcccccagaggagagcgagagcagcagagtggacttcgggtcgagcgagcgcttgggaagctggcaggagaaagaggaggacgcgcgaccgaatgcagccgcgcccgccctgggccccgtgggcctggagagcgacttgagcaaggtccggcacaagctccgcaagttcctccagaggcggcccacactgcagtcgctgcgggagaagggctacatcaaagaccaggtgttcggctgcgcgctggccgcgctgtgtgagcgcgagaggagccgggtgccacgcttcgtgcagcagtgcatccgcgccgtcgaggcccgcgggctggacatcgacgggctgtaccgcatcagtggaaacctggccaccatccagaagctacgctataaggtggaccacgatgagcgccttgacctggatgacgggcgctgggaggacgtccacgttatcaccggagccctgaagctcttctttcgggagctgcccgagcccctcttccccttctcgcacttccgccagttcattgcggccatcaagttgcaggaccaggcccggcgcagccgctgtgtgcgtgacttggtgcgctcgctgcccgctcccaaccacgacactctgcggatgctcttccagcacctctgccgggtgatcgagcacggcgagcagaaccgcatgtcggtgcagagcgtggccattgtgttcgggcccacgctgctgcggcccgaggtggaagagaccagcatgcccatgaccatggtgttccagaaccaggtggtggagctcatcctgcagcagtgcgcggacatcttcccgccgcactgactgctggcctgtgactggggcggcggccgcggtcctgccacacaagctgggcggcggaggccacgcagccgggccttcttctctctgggaccctccgccagcgcatagccgcaggccggtgtgacttctgcaccctcggttctgagggtacggtgacccctagtgggcagtttgcaaaatgtgattccttcttcccaactccccatccccccttcccttcccgtcacgtcctgtttgggggttaattcggttttttctctgttgcatcgcgcctactgtgcgtgtgcgatagcgtgtgtgggggtgagagtttgttttctggaatggtaggtgctgggaggaggagtttgatggagggcttcctggctgcttctggccctcacctcgtggaggccttcacagagaccctgtgggccctggccctgtgctggcactgtgccagtcatgaggcagctctgatcacttccccactgtggaaacaggactgacccagccttcagtgtgggctgctgaagctatcctcctcaggcctcagggatgacctcctgcctgagcctctcacaggctggctgtgggccagtttcatctgctttcctgttgggggtcccgggcctctgctgtccttgacccactggtgttctgtgcaaggcttcttcccattcaccaagtgcacaccttgcatctgccgctcggcatgcaccagttccacacaccatcccattttacagacaaggacgctgaggcctgcagcagcagtgtgacttgctcaaggtccagtgagtgacctcattccccagaaaaggctcctcccacaccagagtacagcctgggtagggggaaaatcagttctttcagctaccacccatccaacctttgggcctatgtgaaaagaaaggaactaagctgggtgtgttctgtctggacctggggaggcccctgaaggcaaagagggaaactgtcccagctgttctgtcctaggggagggggacatagccctagcaggagctcccagcccctcttggcactctgacacacaagtacacccatctggggcccgctttgccacgaagagctgggcaggcctgcagggtgtggggaaggaggacacaacctcaagaaaggaagcgtgaaccccagggaacagcgggtcccttccctcctcagacacaagccacctcagcttgtggctcttggcccccagccccaccaacccacctgttcatttattcaacagacaatgacagctgatatttattggacatttgcaccatgccaagcattcggcttggattatcccatttgtttctcacagccggtatttattgtctgctcctctgtgccaggtgctgtgctctgggcaggggcactgcatgggctgcctgccctggtggagcttgtggtctgatgggtgaggctgacccaagcccaccccattgccaacagggccagggcaagagtacacacaggggcctcataccatatgtctaaatatttaaaagttatcaatcaagctaacaactgttaaataaaatatgttctattctcctactttga

SEQ ID NO: 175751 - DNA, 2296 bp, Homo sapiens
  Payload ID: 14515
  Gene Symbol: ARHGAP27
  Gene Name: Rho GTPase activating protein 27
  ENST ID: ENST00000528384
  CDS Start-End: 218-1783
cacgggagttaccacctgggagtcgccctttgaggctgccgagggtgccgccagcccagccacctcccctgcctcggtggacagccacgtgagccttgagaccgagtggggccagtactgggatgaggagagccgcagggtgttcttctacaacccgctgacgggcgagacggcctgggaggacgaggccgagaacgagcccgaggaggagttggagatgcagccgggcctgagccctggcagcccaggggacccgcggccccccactcccgagacggactaccccgagtcgctgaccagttaccccgaggaggactattctcccgtgggctctttcggtgagcccggccctacctctcccttgaccacaccccccggctggtcttgtcatgtcagccaggacaagcagatgctctacaccaaccacttcactcaggagcaggtccctgtccctgcccctcgaagcatccataaatccagccaggatggtgacaccccagcccaggccagccctccagaggagaaggtcccagcagagctggatgaggttgggagctgggaggaagtctctcctgccacagctgctgtgaggaccaagaccttggacaaggcaggggtgctccatcgcaccaagacggcagacaagggaaagcggctccggaagaagcactggagtgcctcctggactgtgctggagggtggcgtcctgacattcttcaaggactcaaagacctcggctgcaggcggcctgaggcagccttccaagttttccacccctgagtacacagtggagctgaggggggccactctctcctgggcccccaaagacaaatccagtaggaagaatgtgctggagctacggagccgagatggctctgagtacctgatccagcacgactcggaggccatcatcagcacctggcataaggccattgctcagggcatccaggagctgtccgcagagctgcccccagaggagagcgagagcagcagagtggacttcgggtcgagcgagcgcttgggaagctggcaggagaaagaggaggacgcgcgaccgaatgcagccgcgcccgccctgggccccgtgggcctggagagcgacttgagcaaggtccggcacaagctccgcaagttcctccagaggcggcccacactgcagtcgctgcgggagaagggctacatcaaagaccaggtgttcggctgcgcgctggccgcgctgtgtgagcgcgagaggagccgggtgccacgcttcgtgcagcagtgcatccgcgccgtcgaggcccgcgggctggacatcgacgggctgtaccgcatcagtggaaacctggccaccatccagaagctacgctataaggtggaccacgatgagcgccttgacctggatgacgggcgctgggaggacgtccacgttatcaccggagccctgaagctcttctttcgggagctgcccgagcccctcttccccttctcgcacttccgccagttcattgcggccatcaagttgcaggaccaggcccggcgcagccgctgtgtgcgtgacttggtgcgctcgctgcccgctcccaaccacgacactctgcggatgctcttccagcacctctgccgggtgatcgagcacggcgagcagaaccgcatgtcggtgcagagcgtggccattgtgttcgggcccacgctgctgcggcccgaggtggaagagaccagcatgcccatgaccatggtgttccagaaccaggtggtggagctcatcctgcagcagtgcgcggacatcttcccgccgcactgactgctggcctgtgactggggcggcggccgcggtcctgccacacaagctgggcggcggaggccacgcagccgggccttcttctctctgggaccctccgccagcgcatagccgcaggccggtgtgacttctgcaccctcggttctgagggtacggtgacccctagtgggcagtttgcaaaatgtgattccttcttcccaactccccatccccccttcccttcccgtcacgtcctgtttgggggttaattcggttttttctctgttgcatcgcgcctactgtgcgtgtgcgatagcgtgtgtgggggtgagagtttgttttctggaatggtaggtgctgggaggaggagtttgatggagggcttcctggctgcttctggccctcacctcgtggaggccttcacagagaccctgtgggccctggccctgtgctggcactgtgccagtcatgaggcagctctgatcacttccccactgtggaaacaggactgacccagccttcagtgtgggctgctga

SEQ ID NO: 175752 - DNA, 969 bp, Homo sapiens
  Payload ID: 14515
  Gene Symbol: ARHGAP27
  Gene Name: Rho GTPase activating protein 27
  ENST ID: ENST00000524404
  CDS Start-End: 420-653
cccgactggaaggagcccggggccctcattccttctcctccactgggaactgagtggacgacccaccggagcccgtgtacgcgaacatagagaggcagccccgggccacttcaccgggcgccgctgcagccccccttcccagcccggtgtgggagacgcacacggacgcgggcaccgggcgcccctactactacaacccagacacgggagttaccacctgggagtcgccctttgaggctgccgagggtgccgccagcccagccacctcccctgcctcggtggacagccacgtgagccttgagaccgagtggggccagtactgggatgaggagagccgcagggtgttcttctacaacccgctgacgggcgagacggcctgggaggacgaggccgagaacgagcccgaggaggagttggagatgcagccgggcctgagccctggcagcccaggggacccgcggccccccactcccgagacggactaccccgagtcgctgaccagttaccccgaggaggactattctcccgtgggctctttcgtgggtgaggctggaggacccccacgggaagccatacttctacaatccagaggactcctctgttcgatgggagctgccccaggtccctgtccctgcccctcgaagcatccataaatccagccaggatggtgacaccccagcccaggccagccctccagaggagaagaccaagaccttggacaaggcaggggtgctccatcgcaccaagacggcagacaagggaaagcggctccggaagaagcactggagtgcctcctggactgtgctggagggtggcgtcctgacattcttcaaggactcaaagacctcggctgcaggcggcctgaggcagccttccaagttttccacccctgagtacacagtggagctgaggggggccactctctcctgggcccccaaagacaaatccagtaggaagaatgtgctggag

SEQ ID NO: 175753 - DNA, 3694 bp, Homo sapiens
  Payload ID: 14515
  Gene Symbol: ARHGAP27
  Gene Name: Rho GTPase activating protein 27
  ENST ID: ENST00000532038
  CDS Start-End: 137-2140
gctggagtctcagcctcccgccatctcggcaacttcttgtttccctgttgccctgtgccagcactggggtagtgcccctgggctctacccccaaaaccttcccagggctctgtcccggcagttcagaggggccaggatggtggacataatcgccaaagtgaccaggaggcagagtcgagccttgccggcacaggtggacgacccaccggagcccgtgtacgcgaacatagagaggcagccccgggccacttcaccgggcgccgctgcagccccccttcccagcccggtgtgggagacgcacacggacgcgggcaccgggcgcccctactactacaacccagacacgggagttaccacctgggagtcgccctttgaggctgccgagggtgccgccagcccagccacctcccctgcctcggtggacagccacgtgagccttgagaccgagtggggccagtactgggatgaggagagccgcagggtgttcttctacaacccgctgacgggcgagacggcctgggaggacgaggccgagaacgagcccgaggaggagttggagatgcagccgggcctgagccctggcagcccaggggacccgcggccccccactcccgagacggactaccccgagtcgctgaccagttaccccgaggaggactattctcccgtgggctctttcggtgagcccggccctacctctcccttgaccacaccccccggctggtcttgtcatgtcagccaggacaagcagatgctctacaccaaccacttcactcaggagcagtgggtgaggctggaggacccccacgggaagccatacttctacaatccagaggactcctctgttcgatgggagctgccccaggtccctgtccctgcccctcgaagcatccataaatccagccaggatggtgacaccccagcccaggccagccctccagaggagaagaccaagaccttggacaaggcaggggtgctccatcgcaccaagacggcagacaagggaaagcggctccggaagaagcactggagtgcctcctggactgtgctggagggtggcgtcctgacattcttcaaggactcaaagacctcggctgcaggcggcctgaggcagccttccaagttttccacccctgagtacacagtggagctgaggggggccactctctcctgggcccccaaagacaaatccagtaggaagaatgtgctggagctacggagccgagatggctctgagtacctgatccagcacgactcggaggccatcatcagcacctggcataaggccattgctcagggcatccaggagctgtccgcagagctgcccccagaggagagcgagagcagcagagtggacttcgggtcgagcgagcgcttgggaagctggcaggagaaagaggaggacgcgcgaccgaatgcagccgcgcccgccctgggccccgtgggcctggagagcgacttgagcaaggtccggcacaagctccgcaagttcctccagaggcggcccacactgcagtcgctgcgggagaagggctacatcaaagaccaggtgttcggctgcgcgctggccgcgctgtgtgagcgcgagaggagccgggtgccacgcttcgtgcagcagtgcatccgcgccgtcgaggcccgcgggctggacatcgacgggctgtaccgcatcagtggaaacctggccaccatccagaagctacgctataaggtggaccacgatgagcgccttgacctggatgacgggcgctgggaggacgtccacgttatcaccggagccctgaagctcttctttcgggagctgcccgagcccctcttccccttctcgcacttccgccagttcattgcggccatcaagttgcaggaccaggcccggcgcagccgctgtgtgcgtgacttggtgcgctcgctgcccgctcccaaccacgacactctgcggatgctcttccagcacctctgccgggtgatcgagcacggcgagcagaaccgcatgtcggtgcagagcgtggccattgtgttcgggcccacgctgctgcggcccgaggtggaagagaccagcatgcccatgaccatggtgttccagaaccaggtggtggagctcatcctgcagcagtgcgcggacatcttcccgccgcactgactgctggcctgtgactggggcggcggccgcggtcctgccacacaagctgggcggcggaggccacgcagccgggccttcttctctctgggaccctccgccagcgcatagccgcaggccggtgtgacttctgcaccctcggttctgagggtacggtgacccctagtgggcagtttgcaaaatgtgattccttcttcccaactccccatccccccttcccttcccgtcacgtcctgtttgggggttaattcggttttttctctgttgcatcgcgcctactgtgcgtgtgcgatagcgtgtgtgggggtgagagtttgttttctggaatggtaggtgctgggaggaggagtttgatggagggcttcctggctgcttctggccctcacctcgtggaggccttcacagagaccctgtgggccctggccctgtgctggcactgtgccagtcatgaggcagctctgatcacttccccactgtggaaacaggactgacccagccttcagtgtgggctgctgaagctatcctcctcaggcctcagggatgacctcctgcctgagcctctcacaggctggctgtgggccagtttcatctgctttcctgttgggggtcccgggcctctgctgtccttgacccactggtgttctgtgcaaggcttcttcccattcaccaagtgcacaccttgcatctgccgctcggcatgcaccagttccacacaccatcccattttacagacaaggacgctgaggcctgcagcagcagtgtgacttgctcaaggtccagtgagtgacctcattccccagaaaaggctcctcccacaccagagtacagcctgggtagggggaaaatcagttctttcagctaccacccatccaacctttgggcctatgtgaaaagaaaggaactaagctgggtgtgttctgtctggacctggggaggcccctgaaggcaaagagggaaactgtcccagctgttctgtcctaggggagggggacatagccctagcaggagctcccagcccctcttggcactctgacacacaagtacacccatctggggcccgctttgccacgaagagctgggcaggcctgcagggtgtggggaaggaggacacaacctcaagaaaggaagcgtgaaccccagggaacagcgggtcccttccctcctcagacacaagccacctcagcttgtggctcttggcccccagccccaccaacccacctgttcatttattcaacagacaatgacagctgatatttattggacatttgcaccatgccaagcattcggcttggattatcccatttgtttctcacagccggtatttattgtctgctcctctgtgccaggtgctgtgctctgggcaggggcactgcatgggctgcctgccctggtggagcttgtggtctgatgggtgaggctgacccaagcccaccccattgccaacagggccagggcaagagtacacacaggggcctcataccatatgtctaaatatttaaaagttatcaatcaagctaacaactgttaaataaaatatgttctattctcctactttga

SEQ ID NO: 175754 - DNA, 2604 bp, Homo sapiens
  Payload ID: 14515
  Gene Symbol: ARHGAP27
  Gene Name: Rho GTPase activating protein 27
  ENST ID: ENST00000532891
  CDS Start-End: 1-2604
atggcggcggacgtggtgggggacgtgtacgtgctggtggagcaccccttcgagtacaccggcaaggacgggcgccgcgtggccatccggccgaatgagcgctaccggctgctgcggcgcagcaccgagcactggtggcacgtgcggcgtgagcccggcggccgccccttctacctgcctgcgcagtacgtgcgcgagctgcccgcgctgggcaaccctgccgccgccgcgccgccaggtccccacccgagccccgcggcccctgagccgctcgcctacgactaccggtttgtgagcgcggcggcgaccgcgggccccgacggcgcccccgaggagtccggaggccgagccagctccctgtgcggccctgcgcaacgcggcgccgcgacccagcgcagcagcctggcgcccggcctgccagcctgcctgtacctgcggcccgcggcgcccgtgcggcccgcgcagtccctgaacgacctggcctgcgccgccgtctcgcctcccgccggcctcctaggaagcagcggcagcttcaaggcctgcagcgtggcgggctcctgggtgtgcccgcggcctctggcgcgcagcgactcagagaacgtctacgaggtcatccaggacttgcacgtcccgccgccggaggagagcgcagagcaggtggacgacccaccggagcccgtgtacgcgaacatagagaggcagccccgggccacttcaccgggcgccgctgcagccccccttcccagcccggtgtgggagacgcacacggacgcgggcaccgggcgcccctactactacaacccagacacgggagttaccacctgggagtcgccctttgaggctgccgagggtgccgccagcccagccacctcccctgcctcggtggacagccacgtgagccttgagaccgagtggggccagtactgggatgaggagagccgcagggtgttcttctacaacccgctgacgggcgagacggcctgggaggacgaggccgagaacgagcccgaggaggagttggagatgcagccgggcctgagccctggcagcccaggggacccgcggccccccactcccgagacggactaccccgagtcgctgaccagttaccccgaggaggactattctcccgtgggctctttcggtgagcccggccctacctctcccttgaccacaccccccggctggtcttgtcatgtcagccaggacaagcagatgctctacaccaaccacttcactcaggagcagtgggtgaggctggaggacccccacgggaagccatacttctacaatccagaggactcctctgttcgatgggagctgccccaggtccctgtccctgcccctcgaagcatccataaatccagccaggatggtgacaccccagcccaggccagccctccagaggagaagaccaagaccttggacaaggcaggggtgctccatcgcaccaagacggcagacaagggaaagcggctccggaagaagcactggagtgcctcctggactgtgctggagggtggcgtcctgacattcttcaaggactcaaagacctcggctgcaggcggcctgaggcagccttccaagttttccacccctgagtacacagtggagctgaggggggccactctctcctgggcccccaaagacaaatccagtaggaagaatgtgctggagctacggagccgagatggctctgagtacctgatccagcacgactcggaggccatcatcagcacctggcataaggccattgctcagggcatccaggagctgtccgcagagctgcccccagaggagagcgagagcagcagagtggacttcgggtcgagcgagcgcttgggaagctggcaggagaaagaggaggacgcgcgaccgaatgcagccgcgcccgccctgggccccgtgggcctggagagcgacttgagcaaggtccggcacaagctccgcaagttcctccagaggcggcccacactgcagtcgctgcgggagaagggctacatcaaagaccaggtgttcggctgcgcgctggccgcgctgtgtgagcgcgagaggagccgggtgccacgcttcgtgcagcagtgcatccgcgccgtcgaggcccgcgggctggacatcgacgggctgtaccgcatcagtggaaacctggccaccatccagaagctacgctataaggtggaccacgatgagcgccttgacctggatgacgggcgctgggaggacgtccacgttatcaccggagccctgaagctcttctttcgggagctgcccgagcccctcttccccttctcgcacttccgccagttcattgcggccatcaagttgcaggaccaggcccggcgcagccgctgtgtgcgtgacttggtgcgctcgctgcccgctcccaaccacgacactctgcggatgctcttccagcacctctgccgggtgatcgagcacggcgagcagaaccgcatgtcggtgcagagcgtggccattgtgttcgggcccacgctgctgcggcccgaggtggaagagaccagcatgcccatgaccatggtgttccagaaccaggtggtggagctcatcctgcagcagtgcgcggacatcttcccgccgcactga

SEQ ID NO: 175755 - DNA, 2319 bp, Homo sapiens
  Payload ID: 14515
  Gene Symbol: ARHGAP27
  Gene Name: Rho GTPase activating protein 27
  Uniprot ID: Q6ZUM4
  ENST ID: ENST00000528273
  CDS Start-End: 1392-2183
gcactgcttagtggacctcatttaatcttcccaataatccagtgaagtgggtgttactatcccattgacaggaaagaaatctgagctgcagagataaggcagaactcccaaggtgccaccaaggctcagacacacagattctcagaggaagtgtggactcacaggtgggcaatgcctagcagaggcaaagatatagaggtaagggagttccttacttactatatcttacaaagatatagaggtaagggagttccttacttactatatcttacaaagatatagaggtaagggagttcctctgaatctgggtggccagattcagcttcccacccaaccctgggtccccaggaggtggtgtcaagagaggccatggcctgggatgcgggcccttcttcctcccagaacactggcctgaatcagccagctcttggcacacacagccaggtccacaggcacaactgttccttggggcccctgagggcagggggtgtgctggggctgtggcttgtaatgtctggagtgagtgcaggctcagatcagggcgaggctgcttgtccagagaggcagaaaattctccaacagaagacccccaaggcggagggccctggggctggactcctggaggttgttctgagcttaccctgtggacggattggagggtggccctccttccccacaaggatcaagagggggtgggggatggtgggagggcaatctggccaggcgaacctgcgggggaggctcccgccctccccagtcccaccatctcagccccgcagcctctttctccctggagacagccaggtgcggcccaggatcccgggaaaggcaggggagggggtggcgtcttcgctcctcaggcgctggcccggcccagaggggacaggaagccaggacaccggggattgtctctcgcaaccgcagcccagccccagtccgggaggaagttctgcccggcgctctccgccggtgcctccctggttatattgttgaacaggaaacccggcagcgcgggagccgcacagtcgaggagggagcgcgggacgccgagcccacgcgcgcctgccggggcaagtggaggcgaagccggcgagcggacgccccgagggtcggggaaggaaccgaggtccggtccccttcttatccagcccgagacatcgagctccggtgggcgtccctgcgctgggaatcccgctcggagtttttccaggcccggccgggctgctccgggaaaggccctgctcctgttccgcgcagcctctccggcctcgcccctggaaaccccgcccagggcgatggtaggggcctaacctgcagccaccgccggctccgcccacccagcccatgggctccctgaggcccgcccagccgacgaaaacgccgcggctgcgatggcggcggacgtggtgggggacgtgtacgtgctggtggagcaccccttcgagtacaccggcaaggacgggcgccgcgtggccatccggccgaatgagcgctaccggctgctgcggcgcagcaccgagcactggtggcacgtgcggcgtgagcccggcggccgccccttctacctgcctgcgcagtacgtgcgcgagctgcccgcgctgggcaaccctgccgccgccgcgccgccaggtccccacccgagccccgcggcccctgagccgctcgcctacgactaccggtttgtgagcgcggcggcgaccgcgggccccgacggcgcccccgaggagtccggaggccgagccagctccctgtgcggccctgcgcaacgcggcgccgcgacccagcgcagcagcctggcgcccggcctgccagcctgcctgtacctgcggcccgcggcgcccgtgcggcccgcgcagtccctgaacgacctggcctgcgccgccgtctcgcctcccgccggcctcctaggaagcagcggcagcttcaaggcctgcagcgtggcgggctcctgggtgtgcccgcggcctctggcgcgcagcgactcagagaacgtctacgaggtcatccaggacttgcacgtcccgccgccggaggagagcgcagagcaggtacctccccgggcgctggggcgcggaggcgggtggcgcgctagggaccgcgcccgcacggagccggggcgcaaggagacccgctccgctcagcgtcgggcacgacgcccacctctgtccgaagacttcggatgagctccctctccccaaccgcgaaacgtgaggggtgcacgcccgcagtccctcatcagcaattcccaagctccaaagctccctggaagcccagaggcttttcgtaatccaattggtggcaaaattgcgcttgaactga

SEQ ID NO: 175756 - DNA, 780 bp, Homo sapiens
  Payload ID: 14515
  Gene Symbol: ARHGAP27
  Gene Name: Rho GTPase activating protein 27
  ENST ID: ENST00000528677
  CDS Start-End: 139-780
gggctggagtctcagcctcccgccatctcggcaacttcttgtttccctgttgccctgtgccagcactggggtagtgcccctgggctctacccccaaaaccttcccagggctctgtcccggcagttcagaggggccaggatggtggacataatcgccaaagtgaccaggaggcagagtcgagccttgccggcacaggtggacgacccaccggagcccgtgtacgcgaacatagagaggcagccccgggccacttcaccgggcgccgctgcagccccccttcccagcccggtgtgggagacgcacacggacgcgggcaccgggcgcccctactactacaacccagacacgggagttaccacctgggagtcgccctttgaggctgccgagggtgccgccagcccagccacctcccctgcctcggtggacagccacccccccactcccgagacggactaccccgagtcgctgaccagttaccccgaggaggactattctcccgtgggctctttcggtgagcccggccctacctctcccttgaccacaccccccggctggtcttgtcatgtcagccaggacaagcagatgctctacaccaaccacttcactcaggagcagtgggtgaggctggaggacccccacgggaagccatacttctacaatccagaggactcctctgttcgatgggagctgccccaggtccctgtccctgcccctcgaagcatccataaatccagccaggatggtgacaccccagcccaggccagccctccagaggagaag

SEQ ID NO: 175757 - DNA, 4242 bp, Homo sapiens; identical to SEQ ID NO: 175750
  Payload ID: 14515
  Gene Symbol: ARHGAP27
  Gene Name: Rho GTPase activating protein 27
  Uniprot ID: Q6ZUM4
  ENST ID: ENST00000610792
  CDS Start-End: 19-2688

SEQ ID NO: 175758 - DNA, 3628 bp, Homo sapiens; identical to SEQ ID NO: 175749
  Payload ID: 14515
  Gene Symbol: ARHGAP27
  Gene Name: Rho GTPase activating protein 27
  Uniprot ID: Q6ZUM4
  ENST ID: ENST00000616021
  CDS Start-End: 435-2081

SEQ ID NO: 175759 - DNA, 3628 bp, Homo sapiens
  Payload ID: 14515
  Gene Symbol: ARHGAP27
  Gene Name: Rho GTPase activating protein 27
  Uniprot ID: Q6ZUM4
  ENST ID: ENST00000612916
  CDS Start-End: 435-2081
acatgagcaggcagccccgactggaaggagcccggggccctcattccttctcctccactgggaactgagtggacgacccaccggagcccgtgtacgcgaacatagagaggcagccccgggccacttcaccgggcgccgctgcagccccccttcccagcccggtgtgggagacgcacacggacgcgggcaccgggcgcccctactactacaacccagacacgggagttaccacctgggagtcgccctttgaggctgccgagggtgccgccagcccagccacctcccctgcctcggtggacagccacgtgagccttgagaccgagtggggccagtactgggatgaggagagccgcagggtgttcttctacaacccgctgacgggcgagacggcctgggaggacgaggccgagaacgagcccgaggaggagttggagatgcagccgggcctgagccctggcagcccaggggacccgcggccccccactcccgagacggactaccccgagtcgctgaccagttaccccgaggaggactattctcccgtgggctctttcggtgagcccggccctacctctcccttgaccacaccccccggctggtcttgtcatgtcagccaggacaagcagatgctctacaccaaccacttcactcaggagcagtgggtgaggctggaggacccccacgggaagccatacttctacaatccagaggactcctctgttcgatgggagctgccccaggtccctgtccctgcccctcgaagcatccataaatccagccaggatggtgacaccccagcccaggccagccctccagaggagaaggtcccagcagagctggatgaggttgggagctgggaggaagtctctcctgccacagctgctgtgaggaccaagaccttggacaaggcaggggtgctccatcgcaccaagacggcagacaagggaaagcggctccggaagaagcactggagtgcctcctggactgtgctggagggtggcgtcctgacattcttcaaggactcaaagacctcggctgcaggcggcctgaggcagccttccaagttttccacccctgagtacacagtggagctgaggggggccactctctcctgggcccccaaagacaaatccagtaggaagaatgtgctggagctacggagccgagatggctctgagtacctgatccagcacgactcggaggccatcatcagcacctggcataaggccattgctcagggcatccaggagctgtccgcagagctgcccccagaggagagcgagagcagcagagtggacttcgggtcgagcgagcgcttgggaagctggcaggagaaagaggaggacgcgcgaccgaatgcagccgcgcccgccctgggccccgtgggcctggagagcgacttgagcaaggtccggcacaagctccgcaagttcctccagaggcggcccacactgcagtcgctgcgggagaagggctacatcaaagaccaggtgttcggctgcgcgctggccgcgctgtgtgagcgcgagaggagccgggtgccacgcttcgtgcagcagtgcatccgcgccgtcgaggcccgcgggctggacatcgacgggctgtaccgcatcagtggaaacctggccaccatccagaagctacgctataaggtggaccacgatgagcgccttgacctggatgacgggcgctgggaggacgtccacgttatcaccggagccctgaagctcttctttcgggagctgcccgagcccctcttccccttctcgcacttccgccagttcattgcggccatcaagttgcaggaccaggcccggcgcagccgctgtgtgcgtgacttggtgcgctcgctgcccgctcccaaccacgacactctgcggatgctcttccagcacctctgccgggtgatcgagcacggcgagcagaaccgcatgtcggtgcagagcgtggccattgtgttcgggcccacgctgctgcggcccgaggtggaagagaccagcatgcccatgaccatggtgttccagaaccaggtggtggagctcatcctgcagcagtgcgcggacatcttcccgccgcactgactgctggcctgtgactggggcggcggccgcggtcctgccacacaagctgggcggcggaggccacgcagccgggccttcttctctctgggaccctccgccagcgcatagccgcaggccggtgtgacttctgcaccctcggttctgagggtacggtgacccctagtgggcagtttgcaaaatgtgattccttcttcccaactccccatccccccttcccttcccgtcacgtcctgtttgggggttaattcggttttttctctgttgcatcgcgcctactgtgcgtgtgcgatagcgtgtgtgggggtgagagtttgttttctggaatggtaggtgctgggaggaggagtttgatggagggcttcctggctgcttctggccctcacctcgtggaggccttcacagagaccctgtgggccctggccctgtgctggcactgtgccagtcatgaggcagctctgatcacttccccactgtggaaacaggactgacccagccttcagcgtgggctgctgaagctatcctcctcaggcctcagggatgacctcctgcctgagcctctcacaggctggctgtgggccagtttcatctgctttcctgttgggggtcccgggcctctgctgtccttgacccactggtgttctgtgcaaggcttcttcccattcaccaagtgcacaccttgcatctgccgctcggcatgcaccagttccacacaccatcccattttacagacaaggacgctgaggcctgcagcagcagtgtgacttgctcaaggtccagtgagtgacctcattccccagaaaaggctcctcccacaccagagtacagcctgggtagggggaaaatcagttctttcagctaccacccatccaacctttgggcctatgtgaaaagaaaggaactaagctgggtgtgttctgtctggacctggggaggcccctgaaggcaaagagggaaactgtcccagctgttctgtcctaggggagggggacatagccctagcaggagctcccagcccctcttggcactctgacacacaagtacacccatctggggcccgctttgccacgaagagctgggcaggcctgcagggtgtggggaaggaggacacaacctcaagaaaggaagcgtgaaccccagggaacagcgggtcccttccctcctcagacacaagccacctcagcttgtggctcttggcccccagccccaccaacccacctgttcatttattcaacagacaatgacagctgatatttattggacatttgcaccatgccaagcattcggcttggattatcccatttgtttctcacagccggtatttattgtctgctcttctgtgccaggtgctgtgctctgggcaggggcactgcatgggctgcctgccctggtggagcttgtggtctgatgggtgaggctgacccaagcccaccccattgccaacagggccagggcaagagtacacacaggggcctcataccatatgtctaaatatttaaaagttatcaatcaagctaacaactgttaaataaaatatgttctattctcct

SEQ ID NO: 175760 - DNA, 1376 bp, Homo sapiens; identical to SEQ ID NO: 175748
  Payload ID: 14515
  Gene Symbol: ARHGAP27
  Gene Name: Rho GTPase activating protein 27
  Uniprot ID: Q6ZUM4
  ENST ID: ENST00000611188
  CDS Start-End: 450-1241

SEQ ID NO: 175761 - DNA, 4242 bp, Homo sapiens
  Payload ID: 14515
  Gene Symbol: ARHGAP27
  Gene Name: Rho GTPase activating protein 27
  ENST ID: ENST00000618949
  CDS Start-End: 19-2688
gaaaacgccgcggccgcgatggcggcggacgtggtgggggacgtgtacgtgctggtggagcaccccttcgagtacaccggcaaggacgggcgccgcgtggccatccggccgaatgagcgctaccggctgctgcggcgcagcaccgagcactggtggcacgtgcggcgtgagcccggcggccgccccttctacctgcctgcgcagtacgtgcgcgagctgcccgcgctgggcaaccctgccgccgccgcgccgccaggtcctcacccgagccccgcggcccctgagccgctcgcctacgactaccggtttgtgagcgcggcggcgaccgcgggccccgacggcgcccccgaggagtccggaggccgaaccagctccctgtgcggccctgcgcaacgcggcgccgcgacccagcgcagcagcctggcgcccggcctgccagcctgcctgtacctgcggcccgcggcgcccgtgcggcccgcgcagtccctgaacgacctggcctgcgccgccgtctcgcctcccgccggcctcctaggaagcagcggcagcttcaaggcctgcagcgtggcgggctcctgggtgtgcccgcggcctctggcgcgcagcgactcagagaacgtctacgaggtcatccaggacttgcacgtcccgccgcgggaggagagcgcagagcaggtggacgacccaccggagcccgtgtacgcgaacatagagaggcagccccgggccacttcaccgggcgccgctgcagccccccttcccagcccggtgtgggagacgcacacggacgcgggcaccgggcgcccctactactacaacccagacacgggagttaccacctgggagtcgccctttgaggctgccgagggtgccgccagcccagccacctcccctgcctcggtggacagccacgtgagccttgagaccgagtggggccagtactgggatgaggagagccgcagggtgttcttctacaacccgctgacgggcgagacggcctgggaggacgaggccgagaacgagcccgaggaggagttggagatgcagccgggcctgagccctggcagcccaggggacccgcggccccccactcccgagacggactaccccgagtcgctgaccagttaccccgaggaggactattctcccgtgggctctttcggtgagcccggccctacctctcccttgaccacaccccccggctggtcttgtcatgtcagccaggacaagcagatgctctacaccaaccacttcactcaggagcagtgggtgaggctggaggacccccacgggaagccatacttctacaatccagaggactcctctgttcgatgggagctgccccaggtccctgtccctgcccctcgaagcatccataaatccagccaggatggtgacaccccagcccaggccagccctccagaggagaaggtcccagcagagctggatgaggttgggagctgggaggaagtctctcctgccacagctgctgtgaggaccaagaccttggacaaggcaggggtgctccatcgcaccaagacggcagacaagggaaagcggctccggaagaagcactggagtgcctcctggactgtgctggagggtggcgtcctgacattcttcaaggactcaaagacctcggctgcaggcggcctgaggcagccttccaagttttccacccctgagtacacagtggagctgaggggggccactctctcctgggcccccaaagacaaatccagtaggaagaatgtgctggagctacggagccgagatggctctgagtacctgatccagcacgactcggaggccatcatcagcacctggcataaggccattgctcagggcatccaggagctgtccgcagagctgcccccagaggagagcgagagcagcagagtggacttcgggtcgagcgagcgcttgggaagctggcaggagaaagaggaggacgcgcgaccgaatgcagccgcgcccgccctgggccccgtgggcctggagagcgacttgagcaaggtccggcacaagctccgcaagttcctccagaggcggcccacactgcagtcgctgcgggagaagggctacatcaaagaccaggtgttcggctgcgcgctggccgcgctgtgtgagcgcgagaggagccgggtgccacgcttcgtgcagcagtgcatccgcgccgtcgaggcccgcgggctggacatcgacgggctgtaccgcatcagtggaaacctggccaccatccagaagctacgctataaggtggaccacgatgagcgccttgacctggatgacgggcgctgggaggacgtccacgttatcaccggagccctgaagctcttctttcgggagctgcccgagcccctcttccccttctcgcacttccgccagttcattgcggccatcaagttgcaggaccaggcccggcgcagccgctgtgtgcgtgacttggtgcgctcgctgcccgctcccaaccacgacactctgcggatgctcttccagcacctctgccgggtgatcgagcacggcgagcagaaccgcatgtcggtgcagagcgtggccattgtgttcgggcccacgctgctgcggcccgaggtggaagagaccagcatgcccatgaccatggtgttccagaaccaggtggtggagctcatcctgcagcagtgcgcggacatcttcccgccgcactgactgctggcctgtgactggggcggcggccgcggtcctgccacacaagctgggcggcggaggccacgcagccgggccttcttctctctgggaccctccgccagcgcatagccgcaggccggtgtgacttctgcaccctcggttctgagggtacggtgacccctagtgggcagtttgcaaaatgtgattccttcttcccaactccccatccccccttcccttcccgtcacgtcctgtttgggggttaattcggttttttctctgttgcatcgcgcctactgtgcgtgtgcgatagcgtgtgtgggggtgagagtttgttttctggaatggtaggtgctgggaggaggagtttgatggagggcttcctggctgcttctggccctcacctcgtggaggccttcacagagaccctgtgggccctggccctgtgctggcactgtgccagtcatgaggcagctctgatcacttccccactgtggaaacaggactgacccagccttcagcgtgggctgctgaagctatcctcctcaggcctcagggatgacctcctgcctgagcctctcacaggctggctgtgggccagtttcatctgctttcctgttgggggtcccgggcctctgctgtccttgacccactggtgttctgtgcaaggcttcttcccattcaccaagtgcacaccttgcatctgccgctcggcatgcaccagttccacacaccatcccattttacagacaaggacgctgaggcctgcagcagcagtgtgacttgctcaaggtccagtgagtgacctcattccccagaaaaggctcctcccacaccagagtacagcctgggtagggggaaaatcagttctttcagctaccacccatccaacctttgggcctatgtgaaaagaaaggaactaagctgggtgtgttctgtctggacctggggaggcccctgaaggcaaagagggaaactgtcccagctgttctgtcctaggggagggggacatagccctagcaggagctcccagcccctcttggcactctgacacacaagtacacccatctggggcccgctttgccacgaagagctgggcaggcctgcagggtgtggggaaggaggacacaacctcaagaaaggaagcgtgaaccccagggaacagcgggtcccttccctcctcagacacaagccacctcagcttgtggctcttggcccccagccccaccaacccacctgttcatttattcaacagacaatgacagctgatatttattggacatttgcaccatgccaagcattcggcttggattatcccatttgtttctcacagccggtatttattgtctgctcttctgtgccaggtgctgtgctctgggcaggggcactgcatgggctgcctgccctggtggagcttgtggtctgatgggtgaggctgacccaagcccaccccattgccaacagggccagggcaagagtacacacaggggcctcataccatatgtctaaatatttaaaagttatcaatcaagctaacaactgttaaataaaatatgttctattctcctactttga

SEQ ID NO: 175762 - DNA, 1376 bp, Homo sapiens
  Payload ID: 14515
  Gene Symbol: ARHGAP27
  Gene Name: Rho GTPase activating protein 27
  ENST ID: ENST00000615350
  CDS Start-End: 450-1241
ggaagttctgcccggcgctctccgccggtgcctccctggttatattgttgaacaggaaacccggcagcgcgggagccgcacagtcgaggagggagggcgggacgccgagcccacgcgcgcctgccggggcaagtggaggcgaagccggcgagcggacgccccgagggtcggggaaggaaccgaggtccggtccccttcttatccagcccgagacatcgagctccggtgggcgtccctgcgctgggaatcccgctcggagtttttccaggcccggccgggctgctccgggaaaggccctgctcctgttccgcgcagcctctccggcctcgcccctggaaaccccgcccagggcgatggtaggggcctaacctgcagccaccgccggctccgcccacccagcccatgggctccctgaggcccgcccagccgacgaaaacgccgcggccgcgatggcggcggacgtggtgggggacgtgtacgtgctggtggagcaccccttcgagtacaccggcaaggacgggcgccgcgtggccatccggccgaatgagcgctaccggctgctgcggcgcagcaccgagcactggtggcacgtgcggcgtgagcccggcggccgccccttctacctgcctgcgcagtacgtgcgcgagctgcccgcgctgggcaaccctgccgccgccgcgccgccaggtcctcacccgagccccgcggcccctgagccgctcgcctacgactaccggtttgtgagcgcggcggcgaccgcgggccccgacggcgcccccgaggagtccggaggccgaaccagctccctgtgcggccctgcgcaacgcggcgccgcgacccagcgcagcagcctggcgcccggcctgccagcctgcctgtacctgcggcccgcggcgcccgtgcggcccgcgcagtccctgaacgacctggcctgcgccgccgtctcgcctcccgccggcctcctaggaagcagcggcagcttcaaggcctgcagcgtggcgggctcctgggtgtgcccgcggcctctggcgcgcagcgactcagagaacgtctacgaggtcatccaggacttgcacgtcccgccgcgggaggagagcgcagagcaggtacctccccgggcgctggggcgcggaggcgggtggcgcgctagggaccgcgcccgcacggagccggggcgcaaggagacccgctccgctcagcgtcgggcacgacgcccacctctgtccgaagacttcggatgagctccctctccccaaccgcgaaacgtgaggggtgcacgcccgcagtccctcatcagcaattcccaagctccaaagctccctggaagcccagaggcttttcgtaatccaattggtggcaaaattgcgcttgaactg

SEQ ID NO: 175763 - DNA, 3694 bp, Homo sapiens
  Payload ID: 14515
  Gene Symbol: ARHGAP27
  Gene Name: Rho GTPase activating protein 27
  ENST ID: ENST00000626761
  CDS Start-End: 137-2140
gctggagtctcagcctcccgccatctcggcaacttcttgtttccctgttgccctgtgccagcactggggtagtgcccctgggctctacccccaaaaccttcccagggctctgtcccggcagttcagaggggccaggatggtggacataatcgccaaagtgaccaggaggcagagtcgagccttgccggcacaggtggacgacccaccggagcccgtgtacgcgaacatagagaggcagccccgggccacttcaccgggcgccgctgcagccccccttcccagcccggtgtgggagacgcacacggacgcgggcaccgggcgcccctactactacaacccagacacgggagttaccacctgggagtcgccctttgaggctgccgagggtgccgccagcccagccacctcccctgcctcggtggacagccacgtgagccttgagaccgagtggggccagtactgggatgaggagagccgcagggtgttcttctacaacccgctgacgggcgagacggcctgggaggacgaggccgagaacgagcccgaggaggagttggagatgcagccgggcctgagccctggcagcccaggggacccgcggccccccactcccgagacggactaccccgagtcgctgaccagttaccccgaggaggactattctcccgtgggctctttcggtgagcccggccctacctctcccttgaccacaccccccggctggtcttgtcatgtcagccaggacaagcagatgctctacaccaaccacttcactcaggagcagtgggtgaggctggaggacccccacgggaagccatacttctacaatccagaggactcctctgttcgatgggagctgccccaggtccctgtccctgcccctcgaagcatccataaatccagccaggatggtgacaccccagcccaggccagccctccagaggagaagaccaagaccttggacaaggcaggggtgctccatcgcaccaagacggcagacaagggaaagcggctccggaagaagcactggagtgcctcctggactgtgctggagggtggcgtcctgacattcttcaaggactcaaagacctcggctgcaggcggcctgaggcagccttccaagttttccacccctgagtacacagtggagctgaggggggccactctctcctgggcccccaaagacaaatccagtaggaagaatgtgctggagctacggagccgagatggctctgagtacctgatccagcacgactcggaggccatcatcagcacctggcataaggccattgctcagggcatccaggagctgtccgcagagctgcccccagaggagagcgagagcagcagagtggacttcgggtcgagcgagcgcttgggaagctggcaggagaaagaggaggacgcgcgaccgaatgcagccgcgcccgccctgggccccgtgggcctggagagcgacttgagcaaggtccggcacaagctccgcaagttcctccagaggcggcccacactgcagtcgctgcgggagaagggctacatcaaagaccaggtgttcggctgcgcgctggccgcgctgtgtgagcgcgagaggagccgggtgccacgcttcgtgcagcagtgcatccgcgccgtcgaggcccgcgggctggacatcgacgggctgtaccgcatcagtggaaacctggccaccatccagaagctacgctataaggtggaccacgatgagcgccttgacctggatgacgggcgctgggaggacgtccacgttatcaccggagccctgaagctcttctttcgggagctgcccgagcccctcttccccttctcgcacttccgccagttcattgcggccatcaagttgcaggaccaggcccggcgcagccgctgtgtgcgtgacttggtgcgctcgctgcccgctcccaaccacgacactctgcggatgctcttccagcacctctgccgggtgatcgagcacggcgagcagaaccgcatgtcggtgcagagcgtggccattgtgttcgggcccacgctgctgcggcccgaggtggaagagaccagcatgcccatgaccatggtgttccagaaccaggtggtggagctcatcctgcagcagtgcgcggacatcttcccgccgcactgactgctggcctgtgactggggcggcggccgcggtcctgccacacaagctgggcggcggaggccacgcagccgggccttcttctctctgggaccctccgccagcgcatagccgcaggccggtgtgacttctgcaccctcggttctgagggtacggtgacccctagtgggcagtttgcaaaatgtgattccttcttcccaactccccatccccccttcccttcccgtcacgtcctgtttgggggttaattcggttttttctctgttgcatcgcgcctactgtgcgtgtgcgatagcgtgtgtgggggtgagagtttgttttctggaatggtaggtgctgggaggaggagtttgatggagggcttcctggctgcttctggccctcacctcgtggaggccttcacagagaccctgtgggccctggccctgtgctggcactgtgccagtcatgaggcagctctgatcacttccccactgtggaaacaggactgacccagccttcagcgtgggctgctgaagctatcctcctcaggcctcagggatgacctcctgcctgagcctctcacaggctggctgtgggccagtttcatctgctttcctgttgggggtcccgggcctctgctgtccttgacccactggtgttctgtgcaaggcttcttcccattcaccaagtgcacaccttgcatctgccgctcggcatgcaccagttccacacaccatcccattttacagacaaggacgctgaggcctgcagcagcagtgtgacttgctcaaggtccagtgagtgacctcattccccagaaaaggctcctcccacaccagagtacagcctgggtagggggaaaatcagttctttcagctaccacccatccaacctttgggcctatgtgaaaagaaaggaactaagctgggtgtgttctgtctggacctggggaggcccctgaaggcaaagagggaaactgtcccagctgttctgtcctaggggagggggacatagccctagcaggagctcccagcccctcttggcactctgacacacaagtacacccatctggggcccgctttgccacgaagagctgggcaggcctgcagggtgtggggaaggaggacacaacctcaagaaaggaagcgtgaaccccagggaacagcgggtcccttccctcctcagacacaagccacctcagcttgtggctcttggcccccagccccaccaacccacctgttcatttattcaacagacaatgacagctgatatttattggacatttgcaccatgccaagcattcggcttggattatcccatttgtttctcacagccggtatttattgtctgctcttctgtgccaggtgctgtgctctgggcaggggcactgcatgggctgcctgccctggtggagcttgtggtctgatgggtgaggctgacccaagcccaccccattgccaacagggccagggcaagagtacacacaggggcctcataccatatgtctaaatatttaaaagttatcaatcaagctaacaactgttaaataaaatatgttctattctcctactttga

SEQ ID NO: 175764 - DNA, 969 bp, Homo sapiens; identical to SEQ ID NO: 175752
  Payload ID: 14515
  Gene Symbol: ARHGAP27
  Gene Name: Rho GTPase activating protein 27
  ENST ID: ENST00000630485
  CDS Start-End: 420-653

SEQ ID NO: 175765 - DNA, 780 bp, Homo sapiens; identical to SEQ ID NO: 175756
  Payload ID: 14515
  Gene Symbol: ARHGAP27
  Gene Name: Rho GTPase activating protein 27
  ENST ID: ENST00000630545
  CDS Start-End: 139-780

SEQ ID NO: 175766 - DNA, 2604 bp, Homo sapiens
  Payload ID: 14515
  Gene Symbol: ARHGAP27
  Gene Name: Rho GTPase activating protein 27
  ENST ID: ENST00000627233
  CDS Start-End: 1-2604
atggcggcggacgtggtgggggacgtgtacgtgctggtggagcaccccttcgagtacaccggcaaggacgggcgccgcgtggccatccggccgaatgagcgctaccggctgctgcggcgcagcaccgagcactggtggcacgtgcggcgtgagcccggcggccgccccttctacctgcctgcgcagtacgtgcgcgagctgcccgcgctgggcaaccctgccgccgccgcgccgccaggtcctcacccgagccccgcggcccctgagccgctcgcctacgactaccggtttgtgagcgcggcggcgaccgcgggccccgacggcgcccccgaggagtccggaggccgaaccagctccctgtgcggccctgcgcaacgcggcgccgcgacccagcgcagcagcctggcgcccggcctgccagcctgcctgtacctgcggcccgcggcgcccgtgcggcccgcgcagtccctgaacgacctggcctgcgccgccgtctcgcctcccgccggcctcctaggaagcagcggcagcttcaaggcctgcagcgtggcgggctcctgggtgtgcccgcggcctctggcgcgcagcgactcagagaacgtctacgaggtcatccaggacttgcacgtcccgccgcgggaggagagcgcagagcaggtggacgacccaccggagcccgtgtacgcgaacatagagaggcagccccgggccacttcaccgggcgccgctgcagccccccttcccagcccggtgtgggagacgcacacggacgcgggcaccgggcgcccctactactacaacccagacacgggagttaccacctgggagtcgccctttgaggctgccgagggtgccgccagcccagccacctcccctgcctcggtggacagccacgtgagccttgagaccgagtggggccagtactgggatgaggagagccgcagggtgttcttctacaacccgctgacgggcgagacggcctgggaggacgaggccgagaacgagcccgaggaggagttggagatgcagccgggcctgagccctggcagcccaggggacccgcggccccccactcccgagacggactaccccgagtcgctgaccagttaccccgaggaggactattctcccgtgggctctttcggtgagcccggccctacctctcccttgaccacaccccccggctggtcttgtcatgtcagccaggacaagcagatgctctacaccaaccacttcactcaggagcagtgggtgaggctggaggacccccacgggaagccatacttctacaatccagaggactcctctgttcgatgggagctgccccaggtccctgtccctgcccctcgaagcatccataaatccagccaggatggtgacaccccagcccaggccagccctccagaggagaagaccaagaccttggacaaggcaggggtgctccatcgcaccaagacggcagacaagggaaagcggctccggaagaagcactggagtgcctcctggactgtgctggagggtggcgtcctgacattcttcaaggactcaaagacctcggctgcaggcggcctgaggcagccttccaagttttccacccctgagtacacagtggagctgaggggggccactctctcctgggcccccaaagacaaatccagtaggaagaatgtgctggagctacggagccgagatggctctgagtacctgatccagcacgactcggaggccatcatcagcacctggcataaggccattgctcagggcatccaggagctgtccgcagagctgcccccagaggagagcgagagcagcagagtggacttcgggtcgagcgagcgcttgggaagctggcaggagaaagaggaggacgcgcgaccgaatgcagccgcgcccgccctgggccccgtgggcctggagagcgacttgagcaaggtccggcacaagctccgcaagttcctccagaggcggcccacactgcagtcgctgcgggagaagggctacatcaaagaccaggtgttcggctgcgcgctggccgcgctgtgtgagcgcgagaggagccgggtgccacgcttcgtgcagcagtgcatccgcgccgtcgaggcccgcgggctggacatcgacgggctgtaccgcatcagtggaaacctggccaccatccagaagctacgctataaggtggaccacgatgagcgccttgacctggatgacgggcgctgggaggacgtccacgttatcaccggagccctgaagctcttctttcgggagctgcccgagcccctcttccccttctcgcacttccgccagttcattgcggccatcaagttgcaggaccaggcccggcgcagccgctgtgtgcgtgacttggtgcgctcgctgcccgctcccaaccacgacactctgcggatgctcttccagcacctctgccgggtgatcgagcacggcgagcagaaccgcatgtcggtgcagagcgtggccattgtgttcgggcccacgctgctgcggcccgaggtggaagagaccagcatgcccatgaccatggtgttccagaaccaggtggtggagctcatcctgcagcagtgcgcggacatcttcccgccgcactga

SEQ ID NO: 175767 - DNA, 2296 bp, Homo sapiens
  Payload ID: 14515
  Gene Symbol: ARHGAP27
  Gene Name: Rho GTPase activating protein 27
  ENST ID: ENST00000630963
  CDS Start-End: 218-1783
cacgggagttaccacctgggagtcgccctttgaggctgccgagggtgccgccagcccagccacctcccctgcctcggtggacagccacgtgagccttgagaccgagtggggccagtactgggatgaggagagccgcagggtgttcttctacaacccgctgacgggcgagacggcctgggaggacgaggccgagaacgagcccgaggaggagttggagatgcagccgggcctgagccctggcagcccaggggacccgcggccccccactcccgagacggactaccccgagtcgctgaccagttaccccgaggaggactattctcccgtgggctctttcggtgagcccggccctacctctcccttgaccacaccccccggctggtcttgtcatgtcagccaggacaagcagatgctctacaccaaccacttcactcaggagcaggtccctgtccctgcccctcgaagcatccataaatccagccaggatggtgacaccccagcccaggccagccctccagaggagaaggtcccagcagagctggatgaggttgggagctgggaggaagtctctcctgccacagctgctgtgaggaccaagaccttggacaaggcaggggtgctccatcgcaccaagacggcagacaagggaaagcggctccggaagaagcactggagtgcctcctggactgtgctggagggtggcgtcctgacattcttcaaggactcaaagacctcggctgcaggcggcctgaggcagccttccaagttttccacccctgagtacacagtggagctgaggggggccactctctcctgggcccccaaagacaaatccagtaggaagaatgtgctggagctacggagccgagatggctctgagtacctgatccagcacgactcggaggccatcatcagcacctggcataaggccattgctcagggcatccaggagctgtccgcagagctgcccccagaggagagcgagagcagcagagtggacttcgggtcgagcgagcgcttgggaagctggcaggagaaagaggaggacgcgcgaccgaatgcagccgcgcccgccctgggccccgtgggcctggagagcgacttgagcaaggtccggcacaagctccgcaagttcctccagaggcggcccacactgcagtcgctgcgggagaagggctacatcaaagaccaggtgttcggctgcgcgctggccgcgctgtgtgagcgcgagaggagccgggtgccacgcttcgtgcagcagtgcatccgcgccgtcgaggcccgcgggctggacatcgacgggctgtaccgcatcagtggaaacctggccaccatccagaagctacgctataaggtggaccacgatgagcgccttgacctggatgacgggcgctgggaggacgtccacgttatcaccggagccctgaagctcttctttcgggagctgcccgagcccctcttccccttctcgcacttccgccagttcattgcggccatcaagttgcaggaccaggcccggcgcagccgctgtgtgcgtgacttggtgcgctcgctgcccgctcccaaccacgacactctgcggatgctcttccagcacctctgccgggtgatcgagcacggcgagcagaaccgcatgtcggtgcagagcgtggccattgtgttcgggcccacgctgctgcggcccgaggtggaagagaccagcatgcccatgaccatggtgttccagaaccaggtggtggagctcatcctgcagcagtgcgcggacatcttcccgccgcactgactgctggcctgtgactggggcggcggccgcggtcctgccacacaagctgggcggcggaggccacgcagccgggccttcttctctctgggaccctccgccagcgcatagccgcaggccggtgtgacttctgcaccctcggttctgagggtacggtgacccctagtgggcagtttgcaaaatgtgattccttcttcccaactccccatccccccttcccttcccgtcacgtcctgtttgggggttaattcggttttttctctgttgcatcgcgcctactgtgcgtgtgcgatagcgtgtgtgggggtgagagtttgttttctggaatggtaggtgctgggaggaggagtttgatggagggcttcctggctgcttctggccctcacctcgtggaggccttcacagagaccctgtgggccctggccctgtgctggcactgtgccagtcatgaggcagctctgatcacttccccactgtggaaacaggactgacccagccttcagcgtgggctgctga

SEQ ID NO: 175768 - DNA, 2276 bp, Homo sapiens
  Payload ID: 14515
  Gene Symbol: ARHGAP27
  Gene Name: Rho GTPase activating protein 27
  ENST ID: ENST00000628164
  CDS Start-End: 1349-2140
gcactgcttagtggacctcatttaatcttcccaataatccagtgaagtgggtgttactatcccattgacaggaaagaaatctgagctgcagagataaggcagaactcccaaggtgccaccaaggctcagacacacagattctcagaggaagtgtggactcacaggtgggcaatgcctagcagaggcaaagatatagaggtaagggagttccttacttactatatcttacaaagatatagaggtaagggagttcctctgaatctgggtggccagattcagcttcccacccaaccctgggtccccaggaggtggtgtcaagagaggccatggcctgggatgcgggcccttcttcctcccagaacactggcctgaatcagccagctcttggcacacacagccaggtccacaggcacaactgttccttggggcccctgagggcagggggtgtgctggggctgtggcttgtaatgtctggagtgagtgcaggctcagatcagggcgaggctgcttgtccagagaggcagaaaattccccaacagaagacccccaaggcggagggccctggggctggactcctggaggttgttctgagcttaccctgtggacggattggagggtggccctccttccccacaaggatcaagagggggtgggggatggtgggagggcaatctggccaggcgaacctgcgggggaggctcccgccctccccagtcccaccatctcagccccgcagcctctttctccctggagacagccaggtgcggcccaggatcccgggaaaggcaggggagggggtggcgtcttcgctcctcaggcgctggcccggcccagaggggacaggaagccaggacaccggggattgtctctcgcaaccgcagcccagccccagtccgggaggaagttctgcccggcgctctccgccggtgcctccctggttatattgttgaacaggaaacccggcagcgcgggagccgcacagtcgaggagggagggcgggacgccgagcccacgcgcgcctgccggggcaagtggaggcgaagccggcgagcggacgccccgagggtcggggaaggaaccgaggtccggtccccttcttatccagcccgagacatcgagctccggtgggcgtccctgcgctgggaatcccgctcggagtttttccaggcccggccgggctgctccgggaaaggccctgctcctgttccgcgcagcctctccggcctcgcccctggaaaccccgcccagggcgatggtaggggcctaacctgcagccaccgccggctccgcccacccagcccatgggctccctgaggcccgcccagccgacgaaaacgccgcggccgcgatggcggcggacgtggtgggggacgtgtacgtgctggtggagcaccccttcgagtacaccggcaaggacgggcgccgcgtggccatccggccgaatgagcgctaccggctgctgcggcgcagcaccgagcactggtggcacgtgcggcgtgagcccggcggccgccccttctacctgcctgcgcagtacgtgcgcgagctgcccgcgctgggcaaccctgccgccgccgcgccgccaggtcctcacccgagccccgcggcccctgagccgctcgcctacgactaccggtttgtgagcgcggcggcgaccgcgggccccgacggcgcccccgaggagtccggaggccgaaccagctccctgtgcggccctgcgcaacgcggcgccgcgacccagcgcagcagcctggcgcccggcctgccagcctgcctgtacctgcggcccgcggcgcccgtgcggcccgcgcagtccctgaacgacctggcctgcgccgccgtctcgcctcccgccggcctcctaggaagcagcggcagcttcaaggcctgcagcgtggcgggctcctgggtgtgcccgcggcctctggcgcgcagcgactcagagaacgtctacgaggtcatccaggacttgcacgtcccgccgcgggaggagagcgcagagcaggtacctccccgggcgctggggcgcggaggcgggtggcgcgctagggaccgcgcccgcacggagccggggcgcaaggagacccgctccgctcagcgtcgggcacgacgcccacctctgtccgaagacttcggatgagctccctctccccaaccgcgaaacgtgaggggtgcacgcccgcagtccctcatcagcaattcccaagctccaaagctccctggaagcccagaggcttttcgtaatccaattggtggcaaaattgcgcttgaactga

SEQ ID NO: 175769 - DNA, 969 bp, Homo sapiens; identical to SEQ ID NO: 175752
  Payload ID: 14515
  Gene Symbol: ARHGAP27
  Gene Name: Rho GTPase activating protein 27
  ENST ID: ENST00000631880
  CDS Start-End: 420-653

SEQ ID NO: 175770 - DNA, 2319 bp, Homo sapiens; identical to SEQ ID NO: 175755
  Payload ID: 14515
  Gene Symbol: ARHGAP27
  Gene Name: Rho GTPase activating protein 27
  Uniprot ID: Q6ZUM4
  ENST ID: ENST00000633003
  CDS Start-End: 1392-2183

SEQ ID NO: 175771 - DNA, 3694 bp, Homo sapiens; identical to SEQ ID NO: 175753
  Payload ID: 14515
  Gene Symbol: ARHGAP27
  Gene Name: Rho GTPase activating protein 27
  ENST ID: ENST00000631499
  CDS Start-End: 137-2140

SEQ ID NO: 175772 - DNA, 2604 bp, Homo sapiens; identical to SEQ ID NO: 175754
  Payload ID: 14515
  Gene Symbol: ARHGAP27
  Gene Name: Rho GTPase activating protein 27
  ENST ID: ENST00000632017
  CDS Start-End: 1-2604

SEQ ID NO: 175773 - DNA, 780 bp, Homo sapiens; identical to SEQ ID NO: 175756
  Payload ID: 14515
  Gene Symbol: ARHGAP27
  Gene Name: Rho GTPase activating protein 27
  ENST ID: ENST00000631510
  CDS Start-End: 139-780

SEQ ID NO: 175774 - DNA, 2296 bp, Homo sapiens; identical to SEQ ID NO: 175751
  Payload ID: 14515
  Gene Symbol: ARHGAP27
  Gene Name: Rho GTPase activating protein 27
  ENST ID: ENST00000632376
  CDS Start-End: 218-1783

SEQ ID NO: 175775 - DNA, 5369 bp, Homo sapiens
  Payload ID: 14516
  Gene Symbol: ARHGAP28
  Gene Name: Rho GTPase activating protein 28
  Uniprot ID: Q9P2N2
  ENST ID: ENST00000262227
  CDS Start-End: 3212-5224
ctctgtcgcccaggctggagtgcagtagagtgatctcggctcactgcaagctccacctcctgggttcacgccattctcctgcctcagccttccgagtagcttggactacaggcacccaccaccacacccagctaatttttttgtattttttttagtagagacggggttttaccatgttggccaggatggtcttgatctcctgacctcatgatccacctgcctcggcctcacaaagtgctgggattacaggtatgagccaccacgcccggccaggcatttctttatagcaatgccaggatggtgtgccagactgtatcagagacaagtgatacaaagatgaccaagatacagtacttgcccaggaagaagaattcctgtggccacctctgtcttatatcaagagataagtgtgaaacagagtatccacaacagtgtttgggaagacagtgtgagtggctcccaactctaccaacaaaggcttcaaaggagtaatgacatttgaattgagtcttaaaggataaatgtattacttggcctgacaacacagaagaaaaggtcatttttgtcaaagaaatcaaccttgaaaaaatgccgcagttcatgacttgtaccagtgaaggtagcaaggtctgtgtgttggtgatgaatttgcaggggatcaggctgaagaaacaagacttgggagagaggatgtgagacctttttatgacatgcatagagttggcacctcagcctttgcatggtagggagctagctgaaggctacctccatgacagatgtacactttgaaaagacaggccgggtgcggtggctcacgtctgtaatcccagcattttgggaggctgaggtgggcaaatcacttgaagtcaggagttagagatcagcctggccaacacagtgaaacctggtctctactaaaaaaaataaaataattagccaggcatggtggcgcacacctgtaatcccaactattcgggaggctgaggcagaagaattgcttgaacacgggaggcggaagttgcagtgagctgagatggcaccaccgcactccagcctgggcgacagatcaagactccatctcaaaataaaggaagatacagctaatctatatttctttcaccagagatcaccaccactaacaattcatactggtcgtttttccctgaatgttttacctatgtaggaaaattttacatcccaatttttaatttaacactatgaaaagcatttctttttataataaagacactctattagtatacttttgatggcttcaaaactacttttgtatagatgcaaaattaaaatatcaaattgtttcttttgtttgtttgtttttttgttttttttttgagacagagtctcactctgtcgcccaggctaaagcacagtggcatgatctcggctcactgcaagcttttcctcccaggttaaagtgattctcatgccgcagcctcccgagaagctgggactacaggtgtgcaccaccacccccggctaattttttgtatttttacaaaacacaaagagagacggggtttcaccatgttgggcaggctggtctcaaactcctgacctcaggtgatccgcctgcctcagcctcccaaagtgctgggattgcaggcgtgggccaccgtgccctgcctcaaattgtttctttaatggttgttcccaaattttcataaataactttttacgtaacatttttgggcataaagttgtctaaaattattttcataggctagataccttaagtacacttaatgatttaaatcatacttaacattaagactttaatgttgctatattgatatttagtaaaagtacaaaacttgtgctttagagtttagacatattcaggatataagatagttttgttggatttggcgaacacttgccctaggagaataaaaaatgatgaattagtccaaaatgttccagttttctaatttgtcagactcggtaaatggtatcatcaccaaccaagaaaaacagaagatacagggagagtagattttgcagaaaagataaggagttctgtttgggacttgctgcctttgatatactgcactgggagaaaatccaagtcgaacagagtggacaagtgagaatgtgctgtggaatcaacaagaggggtggggagtctacctacctagatttgagagcagtttggcaaataattgttagtaaatgtcatagaaattcgtgggagagagaagttgataagaacagaggggtaaaggatgaaacagaggaaacactgccgcttctcagggttgggtacaagagaagccagggaaatagactaagaaagagtgatcagggaaaccgggagacagtgttgtcacggaagcctggagtgtgagattttccagaaaagaaggaatgaaagaatgaatggtctgtagatccattactcagcactatcagacacattgtccccttttgatatcccataatgaaatttatagataatataatctacttgtgcacaaaattttagaaattaatataatgccccaactataatataaagtgtattagtcagggttctctagagggacagaactaataggatatatatatataaaggggagtttataaagtattaacttacactattacaaggtcccacaataggctgtctgcaagcttgaggagcagagagccaggctgagtctcaacactgaagaacttggagtccgatgttcgagggcaggaaaaatccagcacaggagaaagacgcaggctgggaggctaggccagtctctcctttccatgttcctctgcctgctttatattcactggcagctgattggattgtgcccaccagattaagggtggatctgccttccccagcccactgactcaagtattaatctcttttgacaacaccctcacagacacacccaggatcaatatttgtatccttcaatccaattaagctgacactcagaattaaccatcacataaaggaagaagtaaaaggaaagtatattttatataataagtatttaaatatgtaaacattgggacatgactaaaactgactgaacacattgaaggagtcacttggttggtctgatgtgcagaattaccatgcatgctacaaatggagaggggtctacatgagctgtattgcttgtggtgccgcagatgacttgaatttccagaatgaaaatccattcctcgctgccgaagaattaacaggatgctctccaatgaatccctccatcctcctgccttcagccgttccaactcagaagcctccgtagacagcgcctccatggaggatttctggcgggaaatagaaagtattaaagacagcagcatgggagggcaagaagagccaccgccagctgaggtcacacctgtggatgaaggagaacttgaagcagaatggctgcaagatgtgggtttatcaactctgatctcaggtgatgaagaggaagatggcaaagccttgctctccacattgactcgaacccaagcagctgccgtgcaaaagagataccatacctatacccaaaccatgaggaaaaaggataagcaatctatcagggatgtcagagacatttttggagtcagtgaatctcctcctcgtgatacctgtggcaaccacactaatcagctggatggcaccaaggaagaaagagagcttccaagagttatcaagacaagtggttccatgccagatgatgcttctctcaacagtactaccctgtctgacgcatcccaggataaagaagggagttttgcggttcccaggagtgactctgtggctatacttgagaccattccagttctaccagttcattccaatggatcaccggagcctggacagccagttcagaatgcgataagtgatgatgattttctggaaaagaacattccaccagaggctgaagagctgtcatttgaagtgtcttattcagaaatggttacggaggctctaaaaagaaataaacttaagaaatcagagattaagaaagaagactatgttttaactaaatttaatgttcagaaaaccagatttggcttaactgaagcaggagatctgtctgctgaagacatgaagaaaatccgccatctctctctgattgaattgactgccttttttgatgcctttggaattcaactgaaaaggaacaaaacagagaaagtaaaaggacgagacaatgggatttttggagttccacttacagtcctcctggacggtgaccgaaagaaagaccctggagtgaaagttcccctggtattacaaaaattttttgagaaagttgaggaatcaggtctggaatctgaaggaatttttcgactttcaggatgtactgctaaagtcaagcaataccgtgaagaacttgatgccaagtttaatgctgataaatttaaatgggacaaaatgtgccatagagaagctgcagtaatgttgaaagcgtttttcagagaactacccacctctctcttccctgtggaatatatacctgccttcatcagtctaatggaaagagggcctcacgtcaaagtacagtttcaagccttacacctcatggtcatggcgctgcctgatgccaacagagatgcagctcaggccctcatgacattcttcaataaagtgattgccaatgaatcaaaaaaccgaatgagtctgtggaacatttctacagtgatggcaccaaaccttttcttcagtagaagcaaacactctgattatgaagaattactgttagcaaacactgcggcccacatcatccgcctaatgcttaagtaccagaagattttgtggaaggttccatctttcttaatcactcaagtaagaagaatgaatgaagccacgatgctattgaagaagcagctcccaagtgtcaggaagctgctcaggaggaagaccctcgagcgggagactgcaagccccaagacttcaaaggtactgcaaaaatcaccctcggcaagacgaatgtctgacgtgccggaaggagtcatacgggtccatgctccacttctctccaaggtgtccatggccattcaactcaacaatcaaaccaaagccaaagacatattggcaaaatttcaatatgaaaacagaatactgcactggcagcgagctgcactttccttcctaaatggaaaatgggttaaaaaagaaagagaagagtcgacagagaccaacaggagccccaaacatgtattcctcttcactattggcctggacatctccacataggcagtcatatagagacttgaaatatcattcaagggatttgggtatccagtagacttttagttacatatactacaaaactgactttgtactctcaagtagacctttcgtagaaagaaaatgtttctaataaaaatgtattagaact

SEQ ID NO: 175776 - DNA, 5415 bp, Homo sapiens
  Payload ID: 14516
  Gene Symbol: ARHGAP28
  Gene Name: Rho GTPase activating protein 28
  Uniprot ID: Q9P2N2
  ENST ID: ENST00000314319
  CDS Start-End: 157-1869
acagaaggagaacttgaagcagaatggctgcaagatgtgggtttatcaactctgatctcaggtgatgaagaggaagatggcaaagccttgctctccacattgactcgaacccaagcagctgccgtgcaaaagagataccatacctatacccaaaccatgaggaaaaaggataagcaatctatcagggatgtcagagacatttttggagtcagtgaatctcctcctcgtgatacctgtggcaaccacactaatcagctggatggcaccaaggaagaaagagagcttccaagagttatcaagacaagtggttccatgccagatgatgcttctctcaacagtactaccctgtctgacgcatcccaggataaagaagggagttttgcggttcccaggagtgactctgtggctatacttgagaccattccagttctaccagttcattccaatggatcaccggagcctggacagccagttcagaatgcgataagtgatgatgattttctggaaaagaacattccaccagaggctgaagagctgtcatttgaagtgtcttattcagaaatggttacggaggctctaaaaagaaataaacttaagaaatcagagattaagaaagaagactatgttttaactaaatttaatgttcagaaaaccagatttggcttaactgaagcaggagatctgtctgctgaagacatgaagaaaatccgccatctctctctgattgaattgactgccttttttgatgcctttggaattcaactgaaaaggaacaaaacagagaaagtaaaaggacgagacaatgggatttttggagttccacttacagtcctcctggacggtgaccgaaagaaagaccctggagtgaaagttcccctggtattacaaaaattttttgagaaagttgaggaatcaggtctggaatctgaaggaatttttcgactttcaggatgtactgctaaagtcaagcaataccgtgaagaacttgatgccaagtttaatgctgataaatttaaatgggacaaaatgtgccatagagaagctgcagtaatgttgaaagcgtttttcagagaactacccacctctctcttccctgtggaatatatacctgccttcatcagtctaatggaaagagggcctcacgtcaaagtacagtttcaagccttacacctcatggtcatggcgctgcctgatgccaacagagatgcagctcaggccctcatgacattcttcaataaagtgattgccaatgaatcaaaaaaccgaatgagtctgtggaacatttctacagtgatggcaccaaaccttttcttcagtagaagcaaacactctgattatgaagaattactgttagcaaacactgcggcccacatcatccgcctaatgcttaagtaccagaagattttgtggaaggttccatctttcttaatcactcaagtaagaagaatgaatgaagccacgatgctattgaagaagcagctcccaagtgtcaggaagctgctcaggaggaagaccctcgagcgggagactgcaagccccaagacttcaaaggtactgcaaaaatcaccctcggcaagacgaatgtctgacgtgccggaaggagtcatacgggtccatgctccacttctctccaaggtgtccatggccattcaactcaacaatcaaaccaaagccaaagacatattggcaaaatttcaatatgaaaacagtcatggttcatcagaatgtattaagattcagaaccaaaggttatatgaaattggaggaaatataggagagcattgcttggatccagatgcttatatattggatgtatatcgtataaatcctcaagcagaatgggtgattaaaccccaacaaagttcttaaaatatcctcgagagagctgctatcatgtattatatgccaaaaagatcctacattttggtagggaaaaaacaacactgtgtttgacgtatttgttcctacagcattctcagtatttctggccctcagcagtgggcattgtaagcatgaactatggaagaggcgccggttcaccaattcaactgaagctttctcatgacttttttttttataaaagtaaaggaaagatgatgtggtccttccagaagaaagaccaatctagaatatggaactctaatcacttctagtatttcaacttcctagcagaaatgaacttggccctagacctagggataagcaatgttctttatgtagccaatgctacgaaacaaaagaggtgaaagagacccttttttatacttaatgtacatatattgactttttgagcaagaatgccagaaatagccttcatttctaccctgcaaaataatccagatctgctttctaaaatgaatcagtttctaaagtgaaacatgcaatatttatgctctgactgactcctgaattggaagaggaagaacttctgtttacagaaaactgtattgttatatatgtcaggctgtgtattgtgactatcagcattctggtgcaaatgaacttttctccatcatcgactgtggaaaattgatacttttaaagcatattcttctatgagcacaggtcctcctagtgaagcttagtttgacaaagggtgtcatatgctttcctaacctgatttgtagttaacattcacagagcctacattttctcattacggttatgatgctcagtatctttccaagtgccaggcacgggcttccttttctgatcaaacataccattttttatatttcacaactatagacagtcacttctgcagtcccaatttaaaaatgcagaactgctttatccaagaatgctgaaaaatactgttctatccaggtttcctaaactataaaagcagattttgcttttgtttgttaatcataggcatggccgagcattgtggattagcctgaggcttaaaatcagatgcatgtctggtaagatgaccactgtctcactatcaagagcctgcagagccattttccagacctgtgattgcccagaacacatagtccccacgtttctaatttggagcaaatctaaaaggtgctgagggattggacagctctgactttcctcgagactatggatatagtccttctcagattagctggaaatggggacagagttctcatttatcccagatatatacattggcttttttggaatctatagattgagattttgatgaatttatattggttttaatgagacccaaatgactctctcttaacaattcaagcagtagacaaagttgctcacaaatacagaaaacatctttttgtctacttcgcaagtctcaaaacgtgataatatttaagcccatttgtagaagaaatcttgtatatactattattacaccttgatatctatacaaaacatcacttgtattaaaatatatagataactttctggcatttagaattttgttccattcatttaatttgttcatctgagaatttttttttttgcctgaaaacccattaaaagaaaacgtgccttctgtataagtttatgtttattcctacattttattcatttttaatgtatgggtaattggtggcacatgactttacataatgactttctagactctgaaaaaaatgcttttatcatttttgcaattcagacaagggtaaacattttactttatgtaattgccacatcccaagatgtaaaacggcagtaatttatgaccacgtatggaagaaattcttcaaatagctaccttacatttctgcgtatatatgaaaactgaatgatatttctcagtgtatttccttgcatttgaatggttcaattctgttgtgtttatgtagaaaattcacaaatctgttcatttaattttttaatttgagaatttttatttcttttgactgaaaacacattagaacctatgagtaaattctgaaggttttaagatttacttcagcttgtcaccagtttcaaataaatccctaataggtaacaagtaaaatacaaattcttgtctactttcatgtggttttaaatggcagggacttcgctgagtcagtaagtataatcactctagtttattcaaggatgtgtggcaactttcaacttccatacgtatatatgtatgtatggaaggccatgtcaatactagtatcattggatataactttgattcttaatcagagggcaaattcattagagaagaatttttagtagatacacagactaatatttgtgtggaggttcttttgaccaattttattcctaagaataaacaaacccctacagttaaaatgcaaagatgcctgtcatctaagtattgaaagaatttttgccttatcaagagttgttttttaaaaatttaataaattcataaaaaagactcatatctttgcaaacaaaagaagggcagatactgggcttctacatgctatccttaagagcttctccccctcacccattcctagtgctcttggtatacacttgggaaaataatgtcctccaggagaaagtgttagagggaactaacattttaggaatgcttattcagaaaaaaatcctagagttgattcattgttttcctccatcctgcaaaagaagatccctttgttaagcagctcacttggaaatatgattcttggagtcaatgatctctaaacaaactggattatcaactatttacaacgtctatacagtataaactacctcacttgcctttcttgggaaaaaaaaaatgaatggactttaacaattgttgttacaaactgtgcctgaatcttattatttaaatcacttcagttagctttcagtgtatgtttaataatatacatttaatgatgaaaaatattttcagcaaagctttaaaaccagaaatactgtgtaactgtgatctatgtggtatactctgagagaattctgtgtcctgctcattgtcttgagtttctaaccatgtgcagatgcaagcgttcaggagtaggaattaatgtccatcttttctttcaggcattttcatctgctgtccacgtatttcacttgactgaaagctcatatgagttaaaatgtcccttcttcctagcgagcatatttcaactgttcttcataaatgtttatgtgccttaaaagactttatgttaaaggattaaatagtttctctgacaggcagtttttaactgttttccacaaataaaaataatatgtcatgggattaaaatgtttgttttcaagcatttttaacagttttacacacttacatacaccttaattaaaaatttttttctgtcagacatttaccaactattttctaaaactaatttgacaaatcatgacactagaaaacgccaatgttttatgtctttgcccatctcaaaagctaatattgattcttctgttccatcagctttcattgttaagtagaatatgtatgttgcattttatccataagaaataaag

SEQ ID NO: 175777 - DNA, 2295 bp, Homo sapiens
  Payload ID: 14516
  Gene Symbol: ARHGAP28
  Gene Name: Rho GTPase activating protein 28
  Uniprot ID: Q9P2N2
  ENST ID: ENST00000383472
  CDS Start-End: 105-2294
acctcgggccgcgccgcccagctgctgacagcctcccggcgcgccggtccatgctggtcccggtctttgttctggggccggcgccgagacatgcgcggctgacgatggaggtggaggactcgggcggcgtggtgctgaccgcctaccactcgtacgcgcgcgcccagccccccaacgccgagtcgcgctgcgcgccccgcgccgcagccagccacccgctcagcagaaaatccattcctcgctgccgaagaattaacaggatgctctccaatgaatccctccatcctcctgccttcagccgttccaactcagaagcctccgtagacagcgcctccatggaggatttctggcgggaaatagaaagtattaaagacagcagcatgggagggcaagaagagccaccgccagctgaggtcacacctgtggatgaaggagaacttgaagcagaatggctgcaagatgtgggtttatcaactctgatctcaggtgatgaagaggaagatggcaaagccttgctctccacattgactcgaacccaagcagctgccgtgcaaaagagataccatacctatacccaaaccatgaggaaaaaggataagcaatctatcagggatgtcagagacatttttggagtcagtgaatctcctcctcgtgatacctgtggcaaccacactaatcagctggatggcaccaaggaagaaagagagcttccaagagttatcaagacaagtggttccatgccagatgatgcttctctcaacagtactaccctgtctgacgcatcccaggataaagaagggagttttgcggttcccaggagtgactctgtggctatacttgagaccattccagttctaccagttcattccaatggatcaccggagcctggacagccagttcagaatgcgataagtgatgatgattttctggaaaagaacattccaccagaggctgaagagctgtcatttgaagtgtcttattcagaaatggttacggaggctctaaaaagaaataaacttaagaaatcagagattaagaaagaagactatgttttaactaaatttaatgttcagaaaaccagatttggcttaactgaagcaggagatctgtctgctgaagacatgaagaaaatccgccatctctctctgattgaattgactgccttttttgatgcctttggaattcaactgaaaaggaacaaaacagagaaagtaaaaggacgagacaatgggatttttggagttccacttacagtcctcctggacggtgaccgaaagaaagaccctggagtgaaagttcccctggtattacaaaaattttttgagaaagttgaggaatcaggtctggaatctgaaggaatttttcgactttcaggatgtactgctaaagtcaagcaataccgtgaagaacttgatgccaagtttaatgctgataaatttaaatgggacaaaatgtgccatagagaagctgcagtaatgttgaaagcgtttttcagagaactacccacctctctcttccctgtggaatatatacctgccttcatcagtctaatggaaagagggcctcacgtcaaagtacagtttcaagccttacacctcatggtcatggcgctgcctgatgccaacagagatgcagctcaggccctcatgacattcttcaataaagtgattgccaatgaatcaaaaaaccgaatgagtctgtggaacatttctacagtgatggcaccaaaccttttcttcagtagaagcaaacactctgattatgaagaattactgttagcaaacactgcggcccacatcatccgcctaatgcttaagtaccagaagattttgtggaaggttccatctttcttaatcactcaagtaagaagaatgaatgaagccacgatgctattgaagaagcagctcccaagtgtcaggaagctgctcaggaggaagaccctcgagcgggagactgcaagccccaagacttcaaaggtactgcaaaaatcaccctcggcaagacgaatgtctgacgtgccggaaggagtcatacgggtccatgctccacttctctccaaggtgtccatggccattcaactcaacaatcaaaccaaagccaaagacatattggcaaaatttcaatatgaaaacagtcatggttcatcagaatgtattaagattcagaaccaaaggttatatgaaattggaggaaatataggagagcattgcttggatccagatgcttatatattggatgtatatcgtataaatcctcaagcagaatgggtgattaaaccccaacaaagttcttaaa

SEQ ID NO: 175778 - DNA, 5492 bp, Homo sapiens
  Payload ID: 14516
  Gene Symbol: ARHGAP28
  Gene Name: Rho GTPase activating protein 28
  Uniprot ID: Q9P2N2
  ENST ID: ENST00000419673
  CDS Start-End: 218-1930
aaagtaggccagtattgccagagaacaggagaggaggagagtatggtataagcatgtccagaaataaggagaacttgaagcagaatggctgcaagatgtgggtttatcaactctgatctcaggtgatgaagaggaagatggcaaagccttgctctccacattgactcgaacccaagcagctgccgtgcaaaagagataccatacctatacccaaaccatgaggaaaaaggataagcaatctatcagggatgtcagagacatttttggagtcagtgaatctcctcctcgtgatacctgtggcaaccacactaatcagctggatggcaccaaggaagaaagagagcttccaagagttatcaagacaagtggttccatgccagatgatgcttctctcaacagtactaccctgtctgacgcatcccaggataaagaagggagttttgcggttcccaggagtgactctgtggctatacttgagaccattccagttctaccagttcattccaatggatcaccggagcctggacagccagttcagaatgcgataagtgatgatgattttctggaaaagaacattccaccagaggctgaagagctgtcatttgaagtgtcttattcagaaatggttacggaggctctaaaaagaaataaacttaagaaatcagagattaagaaagaagactatgttttaactaaatttaatgttcagaaaaccagatttggcttaactgaagcaggagatctgtctgctgaagacatgaagaaaatccgccatctctctctgattgaattgactgccttttttgatgcctttggaattcaactgaaaaggaacaaaacagagaaagtaaaaggacgagacaatgggatttttggagttccacttacagtcctcctggacggtgaccgaaagaaagaccctggagtgaaagttcccctggtattacaaaaattttttgagaaagttgaggaatcaggtctggaatctgaaggaatttttcgactttcaggatgtactgctaaagtcaagcaataccgtgaagaacttgatgccaagtttaatgctgataaatttaaatgggacaaaatgtgccatagagaagctgcagtaatgttgaaagcgtttttcagagaactacccacctctctcttccctgtggaatatatacctgccttcatcagtctaatggaaagagggcctcacgtcaaagtacagtttcaagccttacacctcatggtcatggcgctgcctgatgccaacagagatgcagctcaggccctcatgacattcttcaataaagtgattgccaatgaatcaaaaaaccgaatgagtctgtggaacatttctacagtgatggcaccaaaccttttcttcagtagaagcaaacactctgattatgaagaattactgttagcaaacactgcggcccacatcatccgcctaatgcttaagtaccagaagattttgtggaaggttccatctttcttaatcactcaagtaagaagaatgaatgaagccacgatgctattgaagaagcagctcccaagtgtcaggaagctgctcaggaggaagaccctcgagcgggagactgcaagccccaagacttcaaaggtactgcaaaaatcaccctcggcaagacgaatgtctgacgtgccggaaggagtcatacgggtccatgctccacttctctccaaggtgtccatggccattcaactcaacaatcaaaccaaagccaaagacatattggcaaaatttcaatatgaaaacagtcatggttcatcagaatgtattaagattcagaaccaaaggttatatgaaattggaggaaatataggagagcattgcttggatccagatgcttatatattggatgtatatcgtataaatcctcaagcagaatgggtgattaaaccccaacaaagttcttaaaatatcctcgagagagctgctatcatgtattatatgccaaaaagatcctacattttggtagggaaaaaacaacactgtgtttgacgtatttgttcctacagcattctcagtatttctggccctcagcagtgggcattgtaagcatgaactatggaagaggcgccggttcaccaattcaactgaagctttctcatgacttttttttttataaaagtaaaggaaagatgatgtggtccttccagaagaaagaccaatctagaatatggaactctaatcacttctagtatttcaacttcctagcagaaatgaacttggccctagacctagggataagcaatgttctttatgtagccaatgctacgaaacaaaagaggtgaaagagacccttttttatacttaatgtacatatattgactttttgagcaagaatgccagaaatagccttcatttctaccctgcaaaataatccagatctgctttctaaaatgaatcagtttctaaagtgaaacatgcaatatttatgctctgactgactcctgaattggaagaggaagaacttctgtttacagaaaactgtattgttatatatgtcaggctgtgtattgtgactatcagcattctggtgcaaatgaacttttctccatcatcgactgtggaaaattgatacttttaaagcatattcttctatgagcacaggtcctcctagtgaagcttagtttgacaaagggtgtcatatgctttcctaacctgatttgtagttaacattcacagagcctacattttctcattacggttatgatgctcagtatctttccaagtgccaggcacgggcttccttttctgatcaaacataccattttttatatttcacaactatagacagtcacttctgcagtcccaatttaaaaatgcagaactgctttatccaagaatgctgaaaaatactgttctatccaggtttcctaaactataaaagcagattttgcttttgtttgttaatcataggcatggccgagcattgtggattagcctgaggcttaaaatcagatgcatgtctggtaagatgaccactgtctcactatcaagagcctgcagagccattttccagacctgtgattgcccagaacacatagtccccacgtttctaatttggagcaaatctaaaaggtgctgagggattggacagctctgactttcctcgagactatggatatagtccttctcagattagctggaaatggggacagagttctcatttatcccagatatatacattggcttttttggaatctatagattgagattttgatgaatttatattggttttaatgagacccaaatgactctctcttaacaattcaagcagtagacaaagttgctcacaaatacagaaaacatctttttgtctacttcgcaagtctcaaaacgtgataatatttaagcccatttgtagaagaaatcttgtatatactattattacaccttgatatctatacaaaacatcacttgtattaaaatatatagataactttctggcatttagaattttgttccattcatttaatttgttcatctgagaatttttttttttgcctgaaaacccattaaaagaaaacgtgccttctgtataagtttatgtttattcctacattttattcatttttaatgtatgggtaattggtggcacatgactttacataatgactttctagactctgaaaaaaatgcttttatcatttttgcaattcagacaagggtaaacattttactttatgtaattgccacatcccaagatgtaaaacggcagtaatttatgaccacgtatggaagaaattcttcaaatagctaccttacatttctgcgtatatatgaaaactgaatgatatttctcagtgtatttccttgcatttgaatggttcaattctgttgtgtttatgtagaaaattcacaaatctgttcatttaattttttaatttgagaatttttatttcttttgactgaaaacacattagaacctatgagtaaattctgaaggttttaagatttacttcagcttgtcaccagtttcaaataaatccctaataggtaacaagtaaaatacaaattcttgtctactttcatgtggttttaaatggcagggacttcgctgagtcagtaagtataatcactctagtttattcaaggatgtgtggcaactttcaacttccatacgtatatatgtatgtatggaaggccatgtcaatactagtatcattggatataactttgattcttaatcagagggcaaattcattagagaagaatttttagtagatacacagactaatatttgtgtggaggttcttttgaccaattttattcctaagaataaacaaacccctacagttaaaatgcaaagatgcctgtcatctaagtattgaaagaatttttgccttatcaagagttgttttttaaaaatttaataaattcataaaaaagactcatatctttgcaaacaaaagaagggcagatactgggcttctacatgctatccttaagagcttctccccctcacccattcctagtgctcttggtatacacttgggaaaataatgtcctccaggagaaagtgttagagggaactaacattttaggaatgcttattcagaaaaaaatcctagagttgattcattgttttcctccatcctgcaaaagaagatccctttgttaagcagctcacttggaaatatgattcttggagtcaatgatctctaaacaaactggattatcaactatttacaacgtctatacagtataaactacctcacttgcctttcttgggaaaaaaaaaatgaatggactttaacaattgttgttacaaactgtgcctgaatcttattatttaaatcacttcagttagctttcagtgtatgtttaataatatacatttaatgatgaaaaatattttcagcaaagctttaaaaccagaaatactgtgtaactgtgatctatgtggtatactctgagagaattctgtgtcctgctcattgtcttgagtttctaaccatgtgcagatgcaagcgttcaggagtaggaattaatgtccatcttttctttcaggcattttcatctgctgtccacgtatttcacttgactgaaagctcatatgagttaaaatgtcccttcttcctagcgagcatatttcaactgttcttcataaatgtttatgtgccttaaaagactttatgttaaaggattaaatagtttctctgacaggcagtttttaactgttttccacaaataaaaataatatgtcatgggattaaaatgtttgttttcaagcatttttaacagttttacacacttacatacaccttaattaaaaatttttttctgtcagacatttaccaactattttctaaaactaatttgacaaatcatgacactagaaaacgccaatgttttatgtctttgcccatctcaaaagctaatattgattcttctgttccatcagctttcattgttaagtagaatatgtatgttgcattttatccataagaaataaagagaaaaaaactaaaaa

SEQ ID NO: 175779 - DNA, 709 bp, Homo sapiens
  Payload ID: 14516
  Gene Symbol: ARHGAP28
  Gene Name: Rho GTPase activating protein 28
  ENST ID: ENST00000532723
  CDS Start-End: 359-709
attagttcttcacttagagaagaaactccattgccctttgtttctggccctgtgcggctggaggcggccagcactgtcctgtcctggttgaagcaattttaatgtgtgtggggtgctgaatgtgggctggggatggcttccctgcctttgggtcatggggagacacacttgcagaggggttttgtgggtcttcctcaagaatatcatccctgaaatttttaacctgctaaaagaatcaccacttcacatctgtaagcagagcgctggctaactctgtggcttaagcagaggtcagaacatctgaagtgatctgcagatatcctgaaaatccattcctcgctgccgaagaattaacaggatgctctccaatgaatccctccatcctcctgccttcagccgttccaactcagaagcctccgtagacagcgcctccatggaggatttctggcgggaaatagaaagtattaaagacagcagcatgggagggcaagaagagccaccgccagctgaggtcacacctgtggatgaaggagaacttgaagcagaatggctgcaagatgtgggtttatcaactctgatctcaggtgatgaagaggaagatggcaaagccttgctctccacattgactcgaacccaagcagctgccgtgcaaaagagataccatacctatacccaaaccatgaggaaaaaggataagcaatctatcagg

SEQ ID NO: 175780 - DNA, 1859 bp, Homo sapiens
  Payload ID: 14516
  Gene Symbol: ARHGAP28
  Gene Name: Rho GTPase activating protein 28
  Uniprot ID: Q9P2N2
  ENST ID: ENST00000532996
  CDS Start-End: 75-1712
caggaagctagcagagtttgcttctgagacgaattctgttacagtacatggcatttatgaggatcaatgtaattatgaatgaattgcctcgtgatacctgtggcaaccacactaatcagctggatggcaccaaggaagaaagagagcttccaagagttatcaagacaagtggttccatgccagatgatgcttctctcaacagtactaccctgtctgacgcatcccaggataaagaagggagttttgcggttcccaggagtgactctgtggctatacttgagaccattccagttctaccagttcattccaatggatcaccggagcctggacagccagttcagaatgcgataagtgatgatgattttctggaaaagaacattccaccagaggctgaagagctgtcatttgaagtgtcttattcagaaatggttacggaggctctaaaaagaaataaacttaagaaatcagagattaagaaagaagactatgttttaactaaatttaatgttcagaaaaccagatttggcttaactgaagcaggagatctgtctgctgaagacatgaagaaaatccgccatctctctctgattgaattgactgccttttttgatgcctttggaattcaactgaaaaggaacaaaacagagaaagtaaaaggacgagacaatgggatttttggagttccacttacagtcctcctggacggtgaccgaaagaaagaccctggagtgaaagttcccctggtattacaaaaattttttgagaaagttgaggaatcaggtctggaatctgaaggaatttttcgactttcaggatgtactgctaaagtcaagcaataccgtgaagaacttgatgccaagtttaatgctgataaatttaaatgggacaaaatgtgccatagagaagctgcagtaatgttgaaagcgtttttcagagaactacccacctctctcttccctgtggaatatatacctgccttcatcagtctaatggaaagagggcctcacgtcaaagtacagtttcaagccttacacctcatggtcatggcgctgcctgatgccaacagagatgcagctcaggccctcatgacattcttcaataaagtgattgccaatgaatcaaaaaaccgaatgagtctgtggaacatttctacagtgatggcaccaaaccttttcttcagtagaagcaaacactctgattatgaagaattactgttagcaaacactgcggcccacatcatccgcctaatgcttaagtaccagaagattttgtggaaggttccatctttcttaatcactcaagtaagaagaatgaatgaagccacgatgctattgaagaagcagctcccaagtgtcaggaagctgctcaggaggaagaccctcgagcgggagactgcaagccccaagacttcaaaggtactgcaaaaatcaccctcggcaagacgaatgtctgacgtgccggaaggagtcatacgggtccatgctccacttctctccaaggtgtccatggccattcaactcaacaatcaaaccaaagccaaagacatattggcaaaatttcaatatgaaaacagaatactgcactggcagcgagctgcactttccttcctaaatggaaaatgggttaaaaaagaaagagaagagtcgacagagaccaacaggagccccaaacatgtattcctcttcactattggcctggacatctccacataggcagtcatatagagacttgaaatatcattcaagggatttgggtatccagtagacttttagttacatatactacaaaactgactttgtactctcaagtagacctttcgtagaaagaaaatgtttctaataaaaatgtattagaactaa

SEQ ID NO: 175781 - DNA, 2171 bp, Homo sapiens
  Payload ID: 14516
  Gene Symbol: ARHGAP28
  Gene Name: Rho GTPase activating protein 28
  ENST ID: ENST00000531294
  CDS Start-End: 213-1910
aggccagtattgccagagaacaggagaggaggagagtatggtataagcatgtccagaaataaggagaacttgaagcagaatggctgcaagatgtgggtttatcaactctgatctcaggtgatgaagaggaagatggcaaagccttgctctccacattgactcgaacccaagcagctgccgtgcaaaagagataccatacctatacccaaaccatgaggaaaaaggataagcaatctatcagggatgtcagagacatttttggagtcagtgaatctcctcctcgtgatacctgtggcaaccacactaatcagctggatggcaccaaggaagaaagagagcttccaagagttatcaagacaaatgatgcttctctcaacagtactaccctgtctgacgcatcccaggataaagaagggagttttgcggttcccaggagtgactctgtggctatacttgagaccattccagttctaccagttcattccaatggatcaccggagcctggacagccagttcagaatgcgataagtgatgatgattttctggaaaagaacattccaccagaggctgaagagctgtcatttgaagtgtcttattcagaaatggttacggaggctctaaaaagaaataaacttaagaaatcagagattaagaaagaagactatgttttaactaaatttaatgttcagaaaaccagatttggcttaactgaagcaggagatctgtctgctgaagacatgaagaaaatccgccatctctctctgattgaattgactgccttttttgatgcctttggaattcaactgaaaaggaacaaaacagagaaagtaaaaggacgagacaatgggatttttggagttccacttacagtcctcctggacggtgaccgaaagaaagaccctggagtgaaagttcccctggtattacaaaaattttttgagaaagttgaggaatcaggtctggaatctgaaggaatttttcgactttcaggatgtactgctaaagtcaagcaataccgtgaagaacttgatgccaagtttaatgctgataaatttaaatgggacaaaatgtgccatagagaagctgcagtaatgttgaaagcgtttttcagagaactacccacctctctcttccctgtggaatatatacctgccttcatcagtctaatggaaagagggcctcacgtcaaagtacagtttcaagccttacacctcatggtcatggcgctgcctgatgccaacagagatgcagctcaggccctcatgacattcttcaataaagtgattgccaatgaatcaaaaaaccgaatgagtctgtggaacatttctacagtgatggcaccaaaccttttcttcagtagaagcaaacactctgattatgaagaattactgttagcaaacactgcggcccacatcatccgcctaatgcttaagtaccagaagattttgtggaaggttccatctttcttaatcactcaagtaagaagaatgaatgaagccacgatgctattgaagaagcagctcccaagtgtcaggaagctgctcaggaggaagaccctcgagcgggagactgcaagccccaagacttcaaaggtactgcaaaaatcaccctcggcaagacgaatgtctgacgtgccggaaggagtcatacgggtccatgctccacttctctccaaggtgtccatggccattcaactcaacaatcaaaccaaagccaaagacatattggcaaaatttcaatatgaaaacagtcatggttcatcagaatgtattaagattcagaaccaaaggttatatgaaattggaggaaatataggagagcattgcttggatccagatgcttatatattggatgtatatcgtataaatcctcaagcagaatgggtgattaaaccccaacaaagttcttaaaatatcctcgagagagctgctatcatgtattatatgccaaaaagatcctacattttggtagggaaaaaacaacactgtgtttgacgtatttgttcctacagcattctcagtatttctggccctcagcagtgggcattgtaagcatgaactatggaagaggcgccggttcaccaattcaactgaagctttctcatgacttttttttttataaaagtaaaggaaagatgatgtggtccttccagaagaaagaccaatctagaa

SEQ ID NO: 175782 - DNA, 443 bp, Homo sapiens
  Payload ID: 14516
  Gene Symbol: ARHGAP28
  Gene Name: Rho GTPase activating protein 28
  ENST ID: ENST00000584387
  CDS Start-End: 31-443
tggatgttgtttcaagttttggtggactagatgagtgagcctggggttctttgcattgtctttgactggagaaaatccattcctcgctgccgaagaattaacaggatgctctccaatgaatccctccatcctcctgccttcagccgttccaactcagaagcctccgtagacagcgcctccatggaggatttctggcgggaaatagaaagtgatgaagaggaagatggcaaagccttgctctccacattgactcgaacccaagcagctgccgtgcaaaagagataccatacctatacccaaaccatgaggaaaaaggataagcaatctatcagggatgtcagagacatttttggagtcagtgaatctcctcctcgtgatacctgtggcaaccacactaatcagctggatggcaccaaggaagaaagagagcttccaagagttat

SEQ ID NO: 175783 - DNA, 629 bp, Homo sapiens
  Payload ID: 14516
  Gene Symbol: ARHGAP28
  Gene Name: Rho GTPase activating protein 28
  ENST ID: ENST00000581099
  CDS Start-End: 296-629
aaagtaggccagtattgccagagaacaggagaggaggagagtatggtataagcatgtccagaaatgaaactcgtttgtactggcagatgctataagaagagagccctgactggaaataagctaggttcaggtgtgttggccagaaggagaacttgaagcagaatggctgcaagatgtgggtttatcaactctgatctcaggtgatgaagaggaagatggcaaagccttgctctccacattgactcgaacccaagcagctgccgtgcaaaagagataccatacctatacccaaaccatgaggaaaaaggataagcaatctatcagggatgtcagagacatttttggagtcagtgaatctcctcctcgtgatacctgtggcaaccacactaatcagctggatggcaccaaggaagaaagagagcttccaagagttatcaagacaagtggttccatgccagatgatgcttctctcaacagtactaccctgtctgacgcatcccaggataaagaagggagttttgcggttcccaggagtgactctgtggctatacttgagaccattccagttctaccagttcattccaatggatcaccggagcctggacagccagttcagaatgcgataagtg

SEQ ID NO: 175784 - DNA, 608 bp, Homo sapiens
  Payload ID: 14516
  Gene Symbol: ARHGAP28
  Gene Name: Rho GTPase activating protein 28
  ENST ID: ENST00000579689
  CDS Start-End: 1-608
gaagacatgaagaaaatccgccatctctctctgattgaattgactgccttttttgatgcctttggaattcaactgaaaaggaacaaaacagagaaagtaaaaggacgagacaatgggatttttggagttccacttacagtcctcctggacggtgaccgaaagaaagaccctggagtgaaagttcccctggtattacaaaaacaataccgtgaagaacttgatgccaagtttaatgctgataaatttaaatgggacaaaatgtgccatagagaagctgcagtaatgttgaaagcgtttttcagagaactacccacctctctcttccctgtggaatatatacctgccttcatcagtctaatggaaagagggcctcacgtcaaagtacagtttcaagccttacacctcatggtcatggcgctgcctgatgccaacagagatgcagctcaggccctcatgacattcttcaataaagtgattgccaatgaatcaaaaaaccgaatgagtctgtggaacatttctacagtgatggcaccaaaccttttcttcagtagaagcaaacactctgattatgaagaattactgttagcaaacactgcggcccacatcat

SEQ ID NO: 175785 - DNA, 535 bp, Homo sapiens
  Payload ID: 14516
  Gene Symbol: ARHGAP28
  Gene Name: Rho GTPase activating protein 28
  ENST ID: ENST00000577524
  CDS Start-End: 153-326
aaggagaacttgaagcagaatggctgcaagatgtgggtttatcaactctgatctcaggtgatgaagaggaagatggcaaagccttgctctccacattgactcgaacccaagcagctgccgtgcaaaagagataccatacctatacccaaaccatgaggaaaaaggataagcaatctatcagggatgtcagagacatttttggagtcagtgaatctcctcctcgtgatacctgtggcaaccacactaatcagctggatggcaccaaggaagaaagagagcttccaagagttatcaagacaagtggttccatgtactaccctgtctgacgcatcccaggataaagaagggagttttgcggttcccaggagtgactctgtggctatacttgagaccattccagttctaccagttcattccaatggatcaccggagcctggacagccagttcagaatgcgataagtgatgatgattttctggaaaagaacattccaccagaggctgaagagctgtcatttgaagtgtcttattcagaaa

SEQ ID NO: 175786 - DNA, 462 bp, Homo sapiens
  Payload ID: 14516
  Gene Symbol: ARHGAP28
  Gene Name: Rho GTPase activating protein 28
  ENST ID: ENST00000583410
  CDS Start-End: 243-462
acccggagccgctcccaccagggcggcgcagtcgcgctgggcttggggggttcgccgtgcagctgcgccttgtgcctgagcgcacgaccgccgtcactggatgttgtttcaagttttggtggactagatgagtcaatttcccaaggatcttcataagtaatattgtgaaatgaagccctggacctgggaacctgaatttgccagctaagtttcccaagtagactatatgtctgagtgaataaatgaatttgatccaaggaaaatccattcctcgctgccgaagaattaacaggatgctctccaatgaatccctccatcctcctgccttcagccgttccaactcagaagcctccgtagacagcgcctccatggaggatttctggcgggaaatagaaagtattaaagacagcagcatgggagggcaagaagagccaccgccagctgaggtcacacctgtggatg

SEQ ID NO: 175787 - DNA, 517 bp, Homo sapiens
  Payload ID: 14516
  Gene Symbol: ARHGAP28
  Gene Name: Rho GTPase activating protein 28
  ENST ID: ENST00000584287
  CDS Start-End: 153-326
aaggagaacttgaagcagaatggctgcaagatgtgggtttatcaactctgatctcaggtgatgaagaggaagatggcaaagccttgctctccacattgactcgaacccaagcagctgccgtgcaaaagagataccatacctatacccaaaccatgaggaaaaaggataagcaatctatcagggatgtcagagacatttttggagtcagtgaatctcctcctcgtgatacctgtggcaaccacactaatcagctggatggcaccaaggaagaaagagagcttccaagagttatcaagacaagtggttccatgtactaccctgtctgacgcatcccaggataaagaagggagttttgcggttcccaggagtgactctgtggctatacttgagaccattccagttctaccagttcattccaatggatcaccggagcctggacagccagttcagaatgcgataaatgatgattttctggaaaagaacattccaccagaggctgaagagctgtcatttgaag

SEQ ID NO: 175788 - DNA, 6087 bp, Homo sapiens
  Payload ID: 14517
  Gene Symbol: ARHGAP29
  Gene Name: Rho GTPase activating protein 29
  Uniprot ID: Q52LW3
  ENST ID: ENST00000260526
  CDS Start-End: 184-3969
gctgtggctgcggctgcggctgcggctgagatttggccgggcgtccgcaggccgtgggggatgggggcagcgagctccagccctcggcggtggcggcggccgtaggtgtggggcgggcgtccgcgtccggcacgcgagatggagcgccgtggatttcagtttttctgactgttacatgaaaggatgattgctcacaaacagaaaaagacaaagaaaaaacgtgcttgggcatcaggtcaactctctactgatattacaacttctgaaatggggctcaagtccttaagttccaactctatttttgatccggattacatcaaggagttggtgaatgatatcaggaagttctcccacatgttactatatttgaaagaagccatattttcagactgttttaaagaagttattcatatacgtctagaggaactgctccgtgttttaaagtctataatgaataaacatcagaacctcaattctgttgatcttcaaaatgctgcagaaatgctcactgcaaaagtgaaagctgtgaacttcacagaagttaatgaagaaaacaaaaacgatctcttccaggaagtgttttcttctattgaaactttggcatttacctttggaaatatccttacaaacttccttatgggagatgtaggcaatgattcattattgcgactgcctgtttctcgagaaactaagtcgtttgaaaatgtttctgtggaatcagtggactcatccagtgaaaaaggaaatttttcccctttagaactagacaacgtgctgttaaagaacactgactctatcgagctggctttgtcatatgctaaaacttggtcaaaatatactaagaacatagtttcatgggttgaaaaaaagcttaacttggaattggagtccactagaaatatggtcaagttggcagaggcaactagaactaacattggaattcaggagttcatgccactgcagtctctgtttactaatgctcttcttaatgatatagaaagcagtcaccttttacaacaaacaattgcagctctccaggctaacaaatttgtgcagcctctacttggaaggaaaaatgaaatggaaaaacaaaggaaagaaataaaagagctttggaaacaggagcaaaataaaatgcttgaagcagagaatgctctcaaaaaggcaaaattattatgcatgcaacgtcaagatgaatatgagaaagcaaagtcttccatgtttcgtgcagaagaggagcatctgtcttcaagtggcggattagcaaaaaatctcaacaagcaactagaaaaaaagcgaaggttggaagaggaggctctccaaaaagtagaagaagcaaatgaactttacaaagtttgtgtgacaaatgttgaagaaagaagaaatgatctagaaaataccaaaagagaaattttagcacaactccggacacttgttttccagtgtgatcttacccttaaagctgtaacagttaacctcttccacatgcagcatctgcaggctgcttcccttgcagacagtttacagtctctctgtgatagtgccaaactctatgacccaggccaagagtacagtgaatttgtcaaggccacaaattcaactgaagaagaaaaagttgatggaaatgtaaataaacatttaaatagttcccaaccttcaggatttggacctgccaactctttagaggatgttgtacgccttcctgacagttctaataaaattgaagaggacagatgctctaacagtgcagatataacaggtccttcctttataagatcatggacatttgggatgtttagtgattctgagagcactggagggagcagcgaatctagatctctggattcagaatctataagtccaggagactttcatcgaaaacttccacgaacaccatccagtggaactatgtcctctgcagatgatctagatgaaagagagccaccttccccttcagaaactggacccaattcccttggaacatttaagaaaacattgatgtcaaaggcagctctcacacacaagtttcgcaaattgagatcccccacgaaatgtagggattgtgaaggcattgtagtgttccaaggtgttgaatgtgaagagtgtctccttgtttgtcatcgaaagtgtttggaaaatttagtcattatttgtggtcatcagaaacttccaggaaaaatacacttatttggagcagaattcacacaagttgcaaaaaaggaaccagatggtatcccttttatactcaaaatatgtgcctcagagattgaaaatagagctttgtgtctacagggaatttatcgtgtgtgtggaaacaaaataaaaactgaaaaattgtgtcaagctttggaaaatggaatgcacttggtagatatttcagaatttagttcacatgatatctgtgacgtcttgaaattataccttcggcagctcccagaaccatttattttatttcgattgtacaaggaatttatagaccttgcaaaagagatccaacatgtaaatgaagaacaagagacaaaaaagaatagtcttgaagacaaaaaatggccaaatatgtgtatagaaataaaccgaattcttctaaaaagcaaagaccttctaagacaattgccagcatcaaattttaacagtcttcatttccttatagtacatctaaagcgggtagtagatcatgcagaagaaaacaagatgaactccaaaaacttgggggtgatatttggaccaagtctcattaggccaaggcccacaactgctcctatcaccatctcctcccttgcagagtattcaaatcaagcacgcttggtagagtttctcattacttactcacagaagatcttcgatgggtccctacaaccacaagatgttatgtgtagcataggtgttgttgatcaaggctgttttccaaagcctctgttatcaccagaagaaagagacattgaacgttccatgaagtcactatttttttcttcaaaggaagatatccatacttcagagagtgaaagcaaaatttttgaacgagctacatcatttgaggaatcagaacgcaagcaaaatgcgttaggaaaatgtgatgcatgtctcagtgacaaagcacagttgcttctagaccaagaggctgaatcagcatcccaaaagatagaagatggtaaaacccctaagccactttctctgaaatctgataggtcaacaaacaatgtggagaggcatactccaaggaccaagattagacctgtaagtttgcctgtagatagactacttcttgcaagtcctcctaatgagagaaatggcagaaatatgggaaatgtaaatttagacaagttttgcaagaatcctgcctttgaaggagttaatagaaaagacgctgctactactgtttgttccaaatttaatggctttgaccagcaaactctacagaaaattcaggacaaacagtatgaacaaaacagcctaactgccaagactacaatgatcatgcccagtgcactccaggaaaaaggagtgacaacaagcctccagattagtggggaccattctatcaatgccactcaacccagtaagccatatgcagagccagtcaggtcagtgagagaggcatctgagagacggtcttcagattcctaccctctcgctcctgtcagagcacccagaacactgcagcctcaacattggacaacattttataaaccacatgctcccatcatcagtatcagggggaatgaggagaagccagcttcaccctcagcagcagtgcctcctggcacagatcacgatccccacggtctcgtggtgaagtcaatgccagacccagacaaagcatcagcttgtcctgggcaagcaactggtcaacctaaagaagactctgaggagcttggcttgcctgatgtgaatccaatgtgtcagagaccaaggctaaaacgaatgcaacagtttgaagacctcgaaggtgaaattccacaatttgtgtagggatgtcaaatttcagggtttttttgttgttgttgtgttattttgtggtattgtgcttgttttgtgaaagaatgttttgacagggcctcttttgtataggactgccaaatcatgggttttgccttttgttgttgtatttatcctctgttggtaatactgaatggtagaatgttttgatagggtcacatttgtgcctcactggaattatctttaaattctgtatttttaaagttgtgaataagataggtggattcgtattttttaaagttcagttgactttccccaccaaatggtccatttgaatgcatccctaatatatgatatagtctcaactaataggtgcaatttgggaaaatcaggtttattttttggagtggaactgttataagtgcttatttataaaaggaatgtttctgaatgcaagtgcctaaaaagatctttgttggtatgcatatgttttgtcacacaattttatagtgcatctttcaccatttgtgcttttttaagatacgtatgtaagctcttatttttcaattggcaattcagttaatttttaaatgtttacataatggccagaaggcttgcaaatctgtatttaattgcattttaattaattgccagtttttacatgtgatagtcagttgtacaaagaaaatgcacttaaacctgtttctaaattatatattcagttatattatatttggctttagatggttttaatacatttgatagtttttcaccccttggctttattttatataaacttttgtttttcagcagttctgaactttttagtattttataaatggtccaaaaaatgcctgtttcagaagtttttgaattcagtgcatttcctcttgatttgtctgggttaaaaccattccttttgtatgaaatgttttgacttaggaatcattttatgtacttgttctacctggattgtcaacaactgaaagtacatatttcatccaaatcaagctaaaatttatttaagttgattctgagagtacaggtcagtaagcctcattatttggaatttgagagaaggtataggtgatcggatctgtttcatttataaaaggtccagtttttaggactagtacattcctgttattttctgggttttatcattttgcctaaaataggatataaaagggacaaaaaataagtagactgtttttatgtgtgaattatatttctactaaatgtttttgtatgactgtgttatacttgataatatatatatatatatatatcaacttgttaaattatttcatgttcccgtggcttcttttcagttgttgcctattacagtatgagagtttaaggttattaaccattggcttagaagtcaacacctaggatcatacatccgttgactacaatgtggaatgaattttatggaaacctgttttatagttctatgtgatgtaaaggtctagggagcaataaccagcccttttttttctgaaggcttgtttttagtcctcattgtacaaaatataaaataatcatattgctatgaatacctaaaaagaaaattagagcccatgtgtattgagccttctctgtgtgccaggaactttgccaaggtgctacatagattattttatttcaagttcacagcaacctataatgggtgggtaagcatgttattatttctgtgttacagataaggaaactaaggcttagttaaatgacttgcttcagtgttccacaggtgtaacaggtggagtcaaatctcaaacatagggctgtcagattttgatggttagtgctcttaatgactgtgattactaaataatatctggtagtttttaacaatagaaaatgcaactttaaaaaatttttattgtggtaaaatacacataacatttaccatttttaagtatattgtttgaaccatttttaagcatatagttcagtggcattaagtatattcacattgttttgcaaccatgagcacctattcatctccagaacattatcatcatcctatactaaaacttagaaaatgtacttttaaacttcttcagttctcttttaatatatggagcccacccaaaggttatatcatgtaataaactcatttctctgttttccctcacagcttaaaaa

SEQ ID NO: 175789 - DNA, 2043 bp, Homo sapiens
  Payload ID: 14517
  Gene Symbol: ARHGAP29
  Gene Name: Rho GTPase activating protein 29
  Uniprot ID: Q52LW3
  ENST ID: ENST00000370217
  CDS Start-End: 252-1433
gggcgggcggtgcggccgtggcggtagctgcaggggcggtggcggctgcagtggtggtggtgcctgtggctgtggctgcggctgcggctgcggctgagatttggccgggcgtccgcaggccgtgggggatgggggcagcgagctccagccctcggcggtggcggcggccgtaggtgtggggcgggcgtccgcgtccggcacgcgagatggagcgccgtggatttcagtttttctgactgttacatgaaaggatgattgctcacaaacagaaaaagacaaagaaaaaacgtgcttgggcatcaggtcaactctctactgatattacaacttctgaaatggggctcaagtccttaagttccaactctatttttgatccggattacatcaaggagttggtgaatgatatcaggaagttctcccacatgttactatatttgaaagaagccatattttcagactgttttaaagaagttattcatatacgtctagaggaactgctccgtgttttaaagtctataatgaataaacatcagaacctcaattctgttgatcttcaaaatgctgcagaaatgctcactgcaaaagtgaaagctgtgaacttcacagaagttaatgaagaaaacaaaaacgatctcttccaggaagtgttttcttctattgaaactttggcatttacctttggaaatatccttacaaacttccttatgggagatgtaggcaatgattcattattgcgactgcctgtttctcgagaaactaagtcgtttgaaaatgtttctgtggaatcagtggactcatccagtgaaaaaggaaatttttcccctttagaactagacaacgtgctgttaaagaacactgactctatcgagctggctttgtcatatgctaaaacttggtcaaaatatactaagaacatagtttcatgggttgaaaaaaagcttaacttggaattggagtccactagaaatatggtcaagttggcagaggcaactagaactaacattggaattcaggagttcatgccactgcagtctctgtttactaatgctcttcttaatgatatagaaagcagtcaccttttacaacaaacaattgcagctctccaggctaacaaatttgtgcagcctctacttggaaggaaaaatgaaatggaaaaacaaaggaaagaaataaaagagctttggaaacaggagcaaaataaaatgcttgaagcagagaatgctctcaaaaaggcaaaattattatgcatgcaacgtcaagatgaatatgagaaagcaaagtcttccatgtttcgtgcagaagaggagcatctgtcttcaagtggcggattagcaaaaaatctcaacaagcaactagaaaaaaagcgaaggttggaagaggaggctctccaaaaagtaacgatctttttcttttttatttgcaagttgaattagcggtaatctgccaggagtttggtgtcaaagttctgcgtctgccaagactgcctggaaaggcatgttaaaacatggctaagcccatcccccagagtttctcattcagtaggtcaacattttttaataggctctcaggtcgtgctgatgctgttggtgaagatccacattttgagaaccactatgctgagacctgaattttggagtttgtgaaagaatgtcttagagaaggcagtagtttattttacttgacaagaaagttcaccttttaggcaagtgtgtgtgtgtatgtgtactaattcaggcacctgatagcaaggataggcaaaagctttgtattattgatgaaatgtaattttacgaacaaattctgtaagattatatggaatatagtaaatataaatataaaatgctatttcaaatagaagcaaatattttatagacagtgtactaattataaattgtacatggctgtccattaaaatcaactgcctttgaatcactgaccagaacagattaacttcagaagtattattttgaaaacagaagatttcagaattttcagttatttcaacttagctttactatagtaaatatttgtttaaaatataaa

SEQ ID NO: 175790 - DNA, 3439 bp, Homo sapiens
  Payload ID: 14517
  Gene Symbol: ARHGAP29
  Gene Name: Rho GTPase activating protein 29
  ENST ID: ENST00000552844
  CDS Start-End: 90-3197
agaacccctggtaggttaatccaggcttacccacttgctctacatgctgctctttgggatttcagtttttctgactgttacatgaaaggatgattgctcacaaacagaaaaagacaaagaaaaaacgtgcttgggcatcaggtcaactctctactgatattacaacttctgaaatggggctcaagtccttaagttccaactctatttttgatccggattacatcaaggagttggtgaatgatatcaggaagttctcccacatgttactatatttgaaagaagccatattttcagactgttttaaagaagttattcatatacgtctagaggaactgctccgtgttttaaagtctataatgaataaacatcagaacctcaattctgttgatcttcaaaatgctgcagaaatgctcactgcaaaagtgaaagctgtgaacttcacagaagttaatgaagaaaacaaaaacgatctcttccaggaagtgttttcttctattgaaactttggcatttacctttggaaatatccttacaaacttccttatgggagatgtaggcaatgattcattattgcgactgcctgtttctcgagaaactaagtcgtttgaaaatgtttctgtggaatcagtggactcatccagtgaaaaaggaaatttttcccctttagaactagacaacgtgctgttaaagaacactgactctatcgagctggctttgtcatatgctaaaacttggtcaaaatatactaagaacatagtttcatgggttgaaaaaaagcttaacttggaattggagtccactagaaatatggtcaagttggcagaggcaactagaactaacattggaattcaggagttcatgccactgcagtctctgtttactaatgctcttcttaatgatatagaaagcagtcaccttttacaacaaacaattgcagctctccaggctaacaaatttgtgcagcctctacttggaaggaaaaatgaaatggaaaaacaaaggaaagaaataaaagagctttggaaacaggagcaaaataaaatgcttgaagcagagaatgctctcaaaaaggcaaaattattatgcatgcaacgtcaagatgaatatgagaaagcaaagtcttccatgtttcgtgcagaagaggagcatctgtcttcaagtggcggattagcaaaaaatctcaacaagcaactagaaaaaaagcgaaggttggaagaggaggctctccaaaaagtagaagaagcaaatgaactttacaaagtttgtgtgacaaatgttgaagaaagaagaaatgatctagaaaataccaaaagagaaattttagcacaactccggacacttgttttccagtgtgatcttacccttaaagctgtaacagttaacctcttccacatgcagcatctgcaggctgcttcccttgcagacagtttacagtctctctgtgatagtgccaaactctatgacccaggccaagagtacagtgaatttgtcaaggccacaaattcaactgaagaagaaaaagttgatggaaatgtaaataaacatttaaatagttcccaaccttcaggatttggacctgccaactctttagaggatgttgtacgccttcctgacagttctaataaaattgaagaggacagatgctctaacagtgcagatataacaggtccttcctttataagatcatggacatttgggatgtttagtgattctgagagcactggagggagcagcgaatctagatctctggattcagaatctataagtccaggagactttcatcgaaaacttccacgaacaccatccagtggaactatgtcctctgcagatgatctagatgaaagagagccaccttccccttcagaaactggacccaattcccttggaacatttaagaaaacattgatgtcaaaggcagctctcacacacaagtttcgcaaattgagatcccccacgaaatgtagggattgtgaaggcattgtagtgttccaaggtgttgaatgtgaagagtgtctccttgtttgtcatcgaaagtgtttggaaaatttagtcattatttgtggtcatcagaaacttccaggaaaaatacacttatttggagcagaattcacacaagttgcaaaaaaggaaccagatggtatcccttttatactcaaaatatgtgcctcagagattgaaaatagagctttgtgtctacagggaatttatcgtgtgtgtggaaacaaaataaaaactgaaaaattgtgtcaagctttggaaaatggaatgcacttggtagatatttcagaatttagttcacatgatatctgtgacgtcttgaaattataccttcggcagctcccagaaccatttattttatttcgattgtacaaggaatttatagaccttgcaaaagagatccaacatgtaaatgaagaacaagagacaaaaaagaatagtcttgaagacaaaaaatggccaaatatgtgtatagaaataaaccgaattcttctaaaaagcaaagaccttctaagacaattgccagcatcaaattttaacagtcttcatttccttatagtacatctaaagcgggtagtagatcatgcagaagaaaacaagatgaactccaaaaacttgggggtgatatttggaccaagtctcattaggccaaggcccacaactgctcctatcaccatctcctcccttgcagagtattcaaatcaagcacgcttggtagagtttctcattacttactcacagaagatcttcgatgggtccctacaaccacaagatgttatgtgtagcataggtgttgttgatcaaggctgttttccaaagcctctgttatcaccagaagaaagagacattgaacgttccatgaagtcactatttttttcttcaaaggaagatatccatacttcagagagtgaaagcaaaatttttgaacgagctacatcatttgaggaatcagaacgcaagcaaaatgcgttaggaaaatgtgatgcatgtctcagtgacaaagcacagttgcttctagaccaagaggctgaatcagcatcccaaaagatagaagatggtaaaacccctaagccactttctctgaaatctgataggtcaacaaacaatgtggagaggcatactccaaggaccaagattagacctgagactttaatacaaaattaccgtgtacttcatctacaatatgtcttctgctgctgatctagatctgagctgtccgatacagctgccagaagccacaggtgacgttatattcctattcgaagaccaagagctcaaaacatcattcctcccccaaatgaaaaaatgtctgggaaaaattactaatctacttctctgaaacccatttgggaagctggcccaattcgagttctatactcaaaaggcaaacgtaaagactaaacctaagacaccaggtttttagccttggatcaagatgtctc

SEQ ID NO: 175791 - DNA, 4394 bp, Homo sapiens
  Payload ID: 14518
  Gene Symbol: ARHGAP30
  Gene Name: Rho GTPase activating protein 30
  Uniprot ID: Q7Z6I6
  ENST ID: ENST00000368013
  CDS Start-End: 322-3627
gttaaggagctgcactgcttcctgccccctaaagctgagcggggcgaggagggcgagtgccaggctgggccacgagacacaggacacaatttcttgccagggtcctggtagcttcctcttcaacagccacttccgtgtggccggggccccaggggcaggagctgctgcccgttgcccaggccaccctccacccccaattgggagccctgcccccctggggccgggccaagcccagcagctggctgggatcccatgggggactggtagggcacaggtcttgggggatagaggtgaccgggccagtgccctggggctctggccatgaagtctcggcagaaaggaaagaagaagggcagcgcaaaggagcgggtttttgggtgcgacttgcaggagcacctgcagcactcaggccaggaggtgccccaggtgctaaagagctgtgcagaatttgtggaggagtatggagtggtggatgggatctaccgcctctcaggggtctcctccaacatccagaagcttcggcaggaatttgagtcagagcggaagccagacctgcgtcgggatgtttacctccaagacattcactgcgtctcctccctgtgcaaggcctatttcagagaactgccggatcccctgctcacttaccggctctatgacaagtttgctgaggctgtaggagtgcaattggaacctgagcgcttggtcaagatcctagaggtgcttcgggaactccctgtcccaaactacaggaccctggagttcctcatgaggcacttggtacacatggcctcattcagtgcccagaccaacatgcatgctcgcaacctggccatcgtgtgggctcccaacctgctgaggtctaaggacatagaggcctcaggcttcaatgggacagcggccttcatggaggtgcgggtacaatccatcgtcgtggagttcatcctcacacacgtggaccagctctttgggggtgctgccctctctggtggtgaggtggagagtgggtggcgatcgcttccagggacccgggcatcaggcagccccgaggaccttatgcccaggccactgccttatcacctgcctagcatactgcaggctggcgatggacccccacagatgcggccctaccatactatcatcgagattgcagagcacaagaggaaggggtctttgaaggtcaggaagtggaggtctatcttcaatttaggtcgctctggccatgagactaagcgtaaacttccacggggggctgaggacagggaggataaatccaacaaggggacactgcggccagccaaaagcatggactcactgagtgctgcagctggggccagtgatgagccagaggggctggtggggcccagcagcccccggccaagcccattgctgcctgagagcttggagaacgattctatagaggcagcagagggtgaacaggagcctgaggcagaagcactgggtggcacaaactctgaaccaggcacaccacgagctgggcggtcagccatccgggctgggggcagcagccgtgcagaacgctgtgctggtgtccacatctcagacccctacaatgtcaacctcccgctacacatcacctctatcctcagtgtgcccccgaacatcatctctaacgtttccttggccaggctcacccgtggccttgagtgccctgctctacagcaccggccaagccctgcctctggccctggccctggccctggccttggccctggccccccagatgaaaagttggaagcaagtccagcctcaagtcccctggcagactcaggcccagacgacttggctcctgccctggaggactcgctgtcccaggaggtgcaggactccttctccttcctagaggactcaagcagctcagaacctgagtgggtgggggcagaggatggggaggtggcccaggcagaagcagcaggagcagccttctcccctggggaggacgaccctgggatgggctacctggaggagctcctgggagttgggcctcaggtggaggagttctctgtggagccacccctggatgacctgtctctggatgaggcacagtttgtcttggcccccagctgctgttccctggactccgctggccccaggcctgaagttgaggaggaaaatggggaggaagttttcctgagtgcctatgatgacctaagtccccttctgggacctaaacccccaatctggaagggttcagggagtctggagggagaggcagcaggatgtggaaggcaggctctgggacagggtggggaagagcaggcatgctgggaagttggggaggacaagcaggctgagcctggaggcaggctagacatcagggaagaggcagagggaagtccagagaccaaggtggaggctggaaaggccagtgaggatagaggggaggctgggggaagccaagagacaaaagtcagattgagagaagggagtagggaagagacagaggccaaggaagagaagtccaaaggtcagaagaaggctgacagtatggaggctaaaggtgtggaggaaccaggaggagatgagtatacagatgagaaggaaaaagaaattgagagagaagaggatgaacaaagagaggaagcccaggtagaagctggaagggacctagagcaaggggcccaggaagatcaagttgctgaggagaaatgggaagttgtacagaaacaagaggctgagggagtcagagaggatgaggacaaaggacagagggagaaggggtaccatgaagcaagaaaagaccaaggagatggtgaagacagcagaagcccagaagcagcaactgaaggaggagcaggggaggtcagcaaggaacgggagagtggggatggagaggctgagggagaccagagggctggagggtactatttagaagaggacaccctctctgaaggttcaggtgtagcgtccctggaggttgactgtgccaaagagggcaatcctcactcttctgagatggaagaggtagccccacagccacctcagccagaggagatggagcctgaggggcagcccagtccagacggctgtctatgcccctgttctcttggcctgggtggcgtgggcatgcgtctagcttccactctggttcaggtccaacaggtccgctctgtgcctgtggtgccccccaagccacagtttgccaagatgcccagtgcaatgtgtagcaagattcatgtggcacctgcaaatccatgcccgaggcctggccggcttgatgggactcctggagaaagggcttgggggtcccgagcttctcgatcctcttggaggaatgggggtagtctttcctttgatgctgctgtggccctagcccgggaccgccaaaggactgaggctcaaggagttcggcgaacccagacctgtactgagggtggggattactgcctcatccccagaacctccccttgtagcatgatctctgcccattctcctcggccccttagctgcctggagctcccatctgaaggtgcagaagggtctggatcccggagtcgtcttagtctgccccccagagaaccccaggttcctgaccccctgttgtcctctcagcgcaggtcatatgcatttgaaacacaggctaaccctgggaaaggtgaaggactgtgattaggaccacagccctgggcaaaggggaccagcaagttgtcttgaatctccagggttcctgactagctgtctcctctgcagcatgagcagctgtagtgcccaactctataggctttggccctccagcttctctctttgactgtgggaggcactgccttggttggtttacctgaacttgtctccgacacaaagcacttatctcttaggagattcccaagaaagtcaacaagatcttgttcccagggagtgggtcattggccaaagggaacataaggtaggcagaaaacttaaaagagtttgttaaagtgaagactggagaaattcctcccttcctctgagctgtgaatctctcttcatgaaagccaaaggtagagacagggaggacagggccaggttagggccttccacacacaaacacttctagagttgcccattcctgttatgttcttggaccctaagatacctcctgtcccttttaaatccagattaagagaaacgtccaggaagagctctttgaagccctcaatatttgttggagggactggactcctctccagctccccaccctctgcctccagtcaccatgtgcaagagaggtcctgtacagatctctctgggctctcctttctcctttggaataacttgttcctatttcaggaaagggaaatggtgtcactcaggccctgggactgcttctccagccaggctggggccacaggtcccactctagtgaaggtcaatgtctcagaataaaagctgtattttta

SEQ ID NO: 175792 - DNA, 3887 bp, Homo sapiens
  Payload ID: 14518
  Gene Symbol: ARHGAP30
  Gene Name: Rho GTPase activating protein 30
  ENST ID: ENST00000368015
  CDS Start-End: 347-3121
gcaaagatgctctaacaggaagtgggttaaggagctgcactgcttcctgccccctaaagctgagcggggcgaggagggcgagtgccaggctgggccacgagacacaggacacaatttcttgccagggtcctggtagcttcctcttcaacagccacttccgtgtggccggggccccaggggcaggagctgctgcccgttgcccaggccaccctccacccccaattgggagccctgcccccctggggccgggccaagcccagcagctggctgggatcccatgggggactggtagggcacaggtcttgggggatagaggtgaccgggccagtgccctggggctctggccatgaagtctaaggacatagaggcctcaggcttcaatgggacagcggccttcatggaggtgcgggtacaatccatcgtcgtggagttcatcctcacacacgtggaccagctctttgggggtgctgccctctctggtggtgaggtggagagtgggtggcgatcgcttccagggacccgggcatcaggcagccccgaggaccttatgcccaggccactgccttatcacctgcctagcatactgcaggctggcgatggacccccacagatgcggccctaccatactatcatcgagattgcagagcacaagaggaaggggtctttgaaggtcaggaagtggaggtctatcttcaatttaggtcgctctggccatgagactaagcgtaaacttccacggggggctgaggacagggaggataaatccaacaaggggacactgcggccagccaaaagcatggactcactgagtgctgcagctggggccagtgatgagccagaggggctggtggggcccagcagcccccggccaagcccattgctgcctgagagcttggagaacgattctatagaggcagcagagggtgaacaggagcctgaggcagaagcactgggtggcacaaactctgaaccaggcacaccacgagctgggcggtcagccatccgggctgggggcagcagccgtgcagaacgctgtgctggtgtccacatctcagacccctacaatgtcaacctcccgctacacatcacctctatcctcagtgtgcccccgaacatcatctctaacgtttccttggccaggctcacccgtggccttgagtgccctgctctacagcaccggccaagccctgcctctggccctggccctggccctggccttggccctggccccccagatgaaaagttggaagcaagtccagcctcaagtcccctggcagactcaggcccagacgacttggctcctgccctggaggactcgctgtcccaggaggtgcaggactccttctccttcctagaggactcaagcagctcagaacctgagtgggtgggggcagaggatggggaggtggcccaggcagaagcagcaggagcagccttctcccctggggaggacgaccctgggatgggctacctggaggagctcctgggagttgggcctcaggtggaggagttctctgtggagccacccctggatgacctgtctctggatgaggcacagtttgtcttggcccccagctgctgttccctggactccgctggccccaggcctgaagttgaggaggaaaatggggaggaagttttcctgagtgcctatgatgacctaagtccccttctgggacctaaacccccaatctggaagggttcagggagtctggagggagaggcagcaggatgtggaaggcaggctctgggacagggtggggaagagcaggcatgctgggaagttggggaggacaagcaggctgagcctggaggcaggctagacatcagggaagaggcagagggaagtccagagaccaaggtggaggctggaaaggccagtgaggatagaggggaggctgggggaagccaagagacaaaagtcagattgagagaagggagtagggaagagacagaggccaaggaagagaagtccaaaggtcagaagaaggctgacagtatggaggctaaaggtgtggaggaaccaggaggagatgagtatacagatgagaaggaaaaagaaattgagagagaagaggatgaacaaagagaggaagcccaggtagaagctggaagggacctagagcaaggggcccaggaagatcaagttgctgaggagaaatgggaagttgtacagaaacaagaggctgagggagtcagagaggatgaggacaaaggacagagggagaaggggtaccatgaagcaagaaaagaccaaggagatggtgaagacagcagaagcccagaagcagcaactgaaggaggagcaggggaggtcagcaaggaacgggagagtggggatggagaggctgagggagaccagagggctggagggtactatttagaagaggacaccctctctgaaggttcaggtgtagcgtccctggaggttgactgtgccaaagagggcaatcctcactcttctgagatggaagaggtagccccacagccacctcagccagaggagatggagcctgaggggcagcccagtccagacggctgtctatgcccctgttctcttggcctgggtggcgtgggcatgcgtctagcttccactctggttcaggtccaacaggtccgctctgtgcctgtggtgccccccaagccacagtttgccaagatgcccagtgcaatgtgtagcaagattcatgtggcacctgcaaatccatgcccgaggcctggccggcttgatgggactcctggagaaagggcttgggggtcccgagcttctcgatcctcttggaggaatgggggtagtctttcctttgatgctgctgtggccctagcccgggaccgccaaaggactgaggctcaaggagttcggcgaacccagacctgtactgagggtggggattactgcctcatccccagaacctccccttgtagcatgatctctgcccattctcctcggccccttagctgcctggagctcccatctgaaggtgcagaagggtctggatcccggagtcgtcttagtctgccccccagagaaccccaggttcctgaccccctgttgtcctctcagcgcaggtcatatgcatttgaaacacaggctaaccctgggaaaggtgaaggactgtgattaggaccacagccctgggcaaaggggaccagcaagttgtcttgaatctccagggttcctgactagctgtctcctctgcagcatgagcagctgtagtgcccaactctataggctttggccctccagcttctctctttgactgtgggaggcactgccttggttggtttacctgaacttgtctccgacacaaagcacttatctcttaggagattcccaagaaagtcaacaagatcttgttcccagggagtgggtcattggccaaagggaacataaggtaggcagaaaacttaaaagagtttgttaaagtgaagactggagaaattcctcccttcctctgagctgtgaatctctcttcatgaaagccaaaggtagagacagggaggacagggccaggttagggccttccacacacaaacacttctagagttgcccattcctgttatgttcttggaccctaagatacctcctgtcccttttaaatccagattaagagaaacgtccaggaagagctctttgaagccctcaatatttgttggagggactggactcctctccagctccccaccctctgcctccagtcaccatgtgcaagagaggtcctgtacagatctctctgggctctcctttctcctttggaataacttgttcctatttcaggaaagggaaatggtgtcactcaggccctgggactgcttctccagccaggctggggccacaggtcccactctagtgaaggtcaatgtctcagaataaaagctgtattttt

SEQ ID NO: 175793 - DNA, 3482 bp, Homo sapiens
  Payload ID: 14518
  Gene Symbol: ARHGAP30
  Gene Name: Rho GTPase activating protein 30
  ENST ID: ENST00000368016
  CDS Start-End: 43-2715
gggggatagaggtgaccgggccagtgccctggggctctggccatgaagtctcggcagaaaggaaagaagaagggcagcgcaaaggagcgggtttttgggtgcgacttgcaggagcacctgcagcactcaggccaggaggtgccccaggtgctaaagagctgtgcagaatttgtggaggagtatggagtggtggatgggatctaccgcctctcaggggtctcctccaacatccagaagcttcggcaggaatttgagtcagagcggaagccagacctgcgtcgggatgtttacctccaagacattcactgcgtctcctccctgtgcaaggcctatttcagagaactgccggatcccctgctcacttaccggctctatgacaagtttgctgaggctgtaggagtgcaattggaacctgagcgcttggtcaagatcctagaggtgcttcgggaactccctgtcccaaactacaggaccctggagttcctcatgaggcacttggtacacatggcctcattcagtgcccagaccaacatgcatgctcgcaacctggccatcgtgtgggctcccaacctgctgaggtctaaggacatagaggcctcaggcttcaatgggacagcggccttcatggaggtgcgggtacaatccatcgtcgtggagttcatcctcacacacgtggaccagctctttgggggtgctgccctctctggtggtgaggtggagagtgggtggcgatcgcttccagggacccgggcatcaggcagccccgaggaccttatgcccaggccactgccttatcacctgcctagcatactgcaggctggcgatggacccccacagatgcggccctaccatactatcatcgagattgcagagcacaagaggaaggggtctttgaaggtcaggaagtggaggtctatcttcaatttaggtcgctctggccatgagactaagcgtaaacttccacggggggctgaggacagggaggataaatccaacaaggggacactgcggccagccaaaagcatggactcactgagtgctgcagctggggccagtgatgagccagaggggctggtggggcccagcagcccccggccaagcccattgctgcctgagagcttggagaacgattctatagaggcagcagagggtgaacaggagcctgaggcagaagcactgggtggcacaaactctgaaccaggcacaccacgagctgggcggtcagccatccgggctgggggcagcagccgtgcagaacgctgtgctggtgtccacatctcagacccctacaatgtcaacctcccgctacacatcacctctatcctcagtgtgcccccgaacatcatctctaacgtttccttggccaggctcacccgtggccttgagtgccctgctctacagcaccggccaagccctgcctctggccctggccctggccctggccttggccctggccccccagatgaaaagttggaagcaagtccagcctcaagtcccctggcagactcaggcccagacgacttggctcctgccctggaggactcgctgtcccaggaggtgcaggactccttctccttcctagaggactcaagcagctcagaacctgagtgggtgggggcagaggatggggaggtggcccaggcagaagcagcaggagcagccttctcccctggggaggacgaccctgggatgggctacctggaggagctcctgggagttgggcctcaggtggaggagttctctgtggagccacccctggatgacctgtctctggatgaggcacagtttgtcttggcccccagctgctgttccctggactccgctggccccaggcctgaagttgaggaggaaaatggggaggaagttttcctgagtgcctatgatgacctaagtccccttctgggacctaaacccccaatctggaagggttcagggagtctggagggagaggcagcaggatgtggaaggcaggctctgggacagggtggggaagagcaggcatgctgggaagttggggaggacaagcaggctgagcctggaggcaggctagacatcagggaagaggcagagggaaccccacagccacctcagccagaggagatggagcctgaggggcagcccagtccagacggctgtctatgcccctgttctcttggcctgggtggcgtgggcatgcgtctagcttccactctggttcaggtccaacaggtccgctctgtgcctgtggtgccccccaagccacagtttgccaagatgcccagtgcaatgtgtagcaagattcatgtggcacctgcaaatccatgcccgaggcctggccggcttgatgggactcctggagaaagggcttgggggtcccgagcttctcgatcctcttggaggaatgggggtagtctttcctttgatgctgctgtggccctagcccgggaccgccaaaggactgaggctcaaggagttcggcgaacccagacctgtactgagggtggggattactgcctcatccccagaacctccccttgtagcatgatctctgcccattctcctcggccccttagctgcctggagctcccatctgaaggtgcagaagggtctggatcccggagtcgtcttagtctgccccccagagaaccccaggttcctgaccccctgttgtcctctcagcgcaggtcatatgcatttgaaacacaggctaaccctgggaaaggtgaaggactgtgattaggaccacagccctgggcaaaggggaccagcaagttgtcttgaatctccagggttcctgactagctgtctcctctgcagcatgagcagctgtagtgcccaactctataggctttggccctccagcttctctctttgactgtgggaggcactgccttggttggtttacctgaacttgtctccgacacaaagcacttatctcttaggagattcccaagaaagtcaacaagatcttgttcccagggagtgggtcattggccaaagggaacataaggtaggcagaaaacttaaaagagtttgttaaagtgaagactggagaaattcctcccttcctctgagctgtgaatctctcttcatgaaagccaaaggtagagacagggaggacagggccaggttagggccttccacacacaaacacttctagagttgcccattcctgttatgttcttggaccctaagatacctcctgtcccttttaaatccagattaagagaaacgtccaggaagagctctttgaagccctcaatatttgttggagggactggactcctctccagctccccaccctctgcctccagtcaccatgtgcaagagaggtcctgtacagatctctctgggctctcctttctcctttggaataacttgttcctatttcaggaaagggaaatggtgtcactcaggccctgggactgcttctccagccaggctggggccacaggtcccactctagtgaaggtcaatgtctcagaataaaagctgtattttta

SEQ ID NO: 175794 - DNA, 560 bp, Homo sapiens
  Payload ID: 14518
  Gene Symbol: ARHGAP30
  Gene Name: Rho GTPase activating protein 30
  ENST ID: ENST00000368018
  CDS Start-End: 52-243
acaggtcttgggggatagaggtgaccgggccagtgccctggggctctggccatgaagtctcggcagaaaggaaagaagaagggcagcgcaaaggagcgggtttttgggtgcgacttgcaggagcacctgcagcactcaggccaggaggggtctcactctgttacccagcaggccagagtgcggcttcctgcagcccttgcctcctgggctcaggtgatcctcccatatcagcctcctgagtagctgaaactacagtgccccaggtgctaaagagctgtgcagaatttgtggaggagtatggagtggtggatgggatctaccgcctctcaggggtctcctccaacatccagaagcttcggaggctgtaggagtgcaattggaacctgagcgcttggtcaagatcctagaggtgcttcgggaactccctgtcccaaactacaggaccctggagttcctcatgaggcacttggtacacatggcctcattcagtgcccagaccaacatgcatgctcgcaacctggccatcgtgtgggctcccaacctgctgaggtctaaggaca

SEQ ID NO: 175795 - DNA, 2265 bp, Homo sapiens
  Payload ID: 14518
  Gene Symbol: ARHGAP30
  Gene Name: Rho GTPase activating protein 30
  ENST ID: ENST00000490279
  CDS Start-End: 180-389
ggggccccaggggcaggagctgctgcccgttgcccaggccaccctccacccccaattgggagccctgcccccctggggccgggccaagcccagcagctggctgggatcccatgggggactggtagggcacaggtcttgggggatagaggtgaccgggccagtgccctggggctctggccatgaagtctcggcagaaaggaaagaagaagggcagcgcaaaggagcgggtttttgggtgcgacttgcaggagcacctgcagcactcaggccaggaggtgccccaggtgctaaagagctgtgcagaatttgtggaggagtatggagtggtggatgggatctaccgcctctcaggggtctcctccaacatccagaagcttcggaggctgtaggagtgcaattggaacctgagcgcttggtcaagatcctagaggtgcttcgggaactccctgtcccaaactacaggaccctggagttcctcatgaggcacttggtacacatggcctcattcagtgcccagaccaacatgcatgctcgcaacctggccatcgtgtgggctcccaacctgctgaggtctaaggacatagaggcctcaggcttcaatgggacagcggccttcatggaggtgcgggtacaatccatcgtcgtggagttcatcctcacacacgtggaccagctctttgggggtgctgccctctctggtggtgaggtggagagtgggtggcgatcgcttccagggacccgggcatcaggcagccccgaggaccttatgcccaggccactgccttatcacctgcctagcatactgcaggctggcgatggacccccacagatgcggccctaccatactatcatcgagattgcagagcacaagaggaaggggtctttgaaggtcaggaagtggaggtctatcttcaatttaggtcgctctggccatgagactaagcgtaaacttccacggggggctgaggacagggaggataaatccaacaaggggacactgcggccagccaaaagcatggactcactgagtgctgcagctggggccagtgatgagccagaggggctggtggggcccagcagcccccggccaagcccattgctgcctgagagcttggagaacgattctatagaggcagcagagggtgaacaggagcctgaggcagaagcactgggtggcacaaactctgaaccaggcacaccacgagctgggcggtcagccatccgggctgggggcagcagccgtgcagaacgctgtgctggtgtccacatctcagacccctacaatgtcaacctcccgctacacatcacctctatcctcagtgtgcccccgaacatcatctctaacgtttccttggccaggctcacccgtggccttgagtgccctgctctacagcaccggccaagccctgcctctggccctggccctggccctggccttggccctggccccccagatgaaaagttggaagcaagtccagcctcaagtcccctggcagactcaggcccagacgacttggctcctgccctggaggactcgctgtcccaggaggtgcaggactccttctccttcctagaggactcaagcagctcagaacctgagtgggtgggggcagaggatggggaggtggcccaggcagaagcagcaggagcagccttctcccctggggaggacgaccctgggatgggctacctggaggagctcctgggagttgggcctcaggtggaggagttctctgtggagccacccctggatgacctgtctctggatgaggcacagtttgtcttggcccccagctgctgttccctggactccgctggccccaggcctgaagttgaggaggaaaatggggaggaagttttcctgagtgcctatgatgacctaagtccccttctgggacctaaacccccaatctggaagggttcagggagtctggagggagaggcagcaggatgtggaaggcaggctctgggacagggtggggaagagcaggcatgctgggaagttggggaggacaagcaggctgagcctggaggcaggctagacatcagggaagaggcagagggaagtccagagaccaaggtggaggctggaaaggccagtgaggatagaggggaggctgggggaagccaagagacaaaagtcagattgagagaagggagtagggaagagacagaggccaaggaagagaagtccaaaggtcagaagaaggctgacagtatggaggctaaaggtgtggaggaaccaggaggagatgagtatacaga

SEQ ID NO: 175796 - DNA, 543 bp, Homo sapiens
  Payload ID: 14518
  Gene Symbol: ARHGAP30
  Gene Name: Rho GTPase activating protein 30
  ENST ID: ENST00000471492
  CDS Start-End: 292-417
aaagctgagcggggcgaggagggcgagtgccaggctgggccacgagacacaggacacaatttcttgccagggtcctggtagcttcctcttcaacagccacttccgtgtggccggggccccaggggcaggagctgctgcccgttgcccaggccaccctccacccccaattgggagccctgcccccctggggccgggccaagcccagcagctggctgggatcccatgggggactggtagggcacaggtcttgggggatagaggtgaccgggccagtgccctggggctctggccatgaagtctcggcagaaaggaaagaagaagggcagcgcaaaggagcgggtttttgggtgcgacttgcaggagcacctgcagcactcaggccaggagggaggctgtaggagtgcaattggaacctgagcgcttggtcaagatcctagaggtgcttcgggaactccctgtcccaaactacaggaccctggagttcctcatgaggcacttggtacacatggcctcattcagtgcccagaccaacatgcatgctcg

SEQ ID NO: 175797 - DNA, 9317 bp, Homo sapiens
  Payload ID: 14519
  Gene Symbol: ARHGAP31
  Gene Name: Rho GTPase activating protein 31
  Uniprot ID: Q2M1Z3
  ENST ID: ENST00000264245
  CDS Start-End: 533-4867
ggaaaaaaaggaaggcgtgagggcgggcagcagcgacaggatgcttgtttttcgctctaccaaagtcgtctgaaggcgagacagcgggcccagggcgcaggacccaccgcagccccctgggcagtctcctcgccccgcgtccgcgtcgtctccggggcacttagtaaggggtggggagagcttgccctccctcttaagctgaggagaaacacccgaagacaccgcaggagcctgtgaaagtccctaggactccaagtgaggaagtgacactcccaggcgagccggcccgcggctgccagtctgcacggcctcggcacggcggccccggagcggcgcggggtggatctcaggctctgccggcccgcggcccgcggggtccatgcgcagggcccccagcccaagttcttccatcttccgatgcggccccccagagccgcggggcagccggtgatctagcccgggagcccatcttacagcggtgccaagcagaggggcggcagagacggaggggcagcctctttgggactaactcatgaagaacaagggtgctaagcagaagctgaaacgaaagggagccgccagcgcgtttggctgtgacctgacggagtatctggaaagctcgggacaggatgttccatacgttttgaagagctgtgcagaatttatagagactcacggcatcgtggatggaatctatcggctttcaggagtcacctcaaacatacaacggctaaggcaagagtttggctcagatcaatgtccagatctgacaagggaagtgtacctccaggacatccactgtgtgggctcgctttgcaagctctactttagggagctgcccaaccccctcctgacttatgagctctatgagaaattcacggaggcagtgtcgcattgccctgaagaaggccaactggcccgaatccaaaatgttatccaggagcttcctccatcccactataggaccttggaatacctgattcgacacctggcccatatcgcctccttcagcagcaagaccaacatgcacgcccggaacctggccctggtgtgggcgccaaacctcctcaggtctaaagaaattgaagccactggttgcaatggagatgcagccttccttgcagtccgggtccagcaggtggtgattgagttcatattgaatcatgtagatcaaatctttaacaacggtgcacctgggtctctggagaatgatgaaaaccggcccatcatgaagagcctgaccttgccagccctctccctgcccatgaagctggtgagccttgaggaagctcaagcccgcagcctggccactaaccatcctgctcgcaaggaaaggagggagaacagcctgcctgagattgtccctcccatgggcaccctcttccacactgtccttgagttaccagacaacaagcgaaagctctccagtaaatcaaagaagtggaaatcaatatttaacctgggacgttctggatcagactccaaatcaaaactgagtagaaatgggagtgtatttgtgagaggacagaggctctcggtggaaaaggctactatccgaccagctaaaagcatggactcactatgttcagtgcctgtggaaggaaaagaaaccaagggaaatttcaatcgaacagttaccaccggtggatttttcattccagcaacaaagatgcactccaccggcaccggcagctcatgtgacctcaccaagcaggagggcgaatggggccaggaggggatgcctcccggggctgagggtggctttgatgtgagcagtgatcgcagccatctccagggcgctcaggcccggcccccaccggaacagctgaaggttttccggcctgttgaggatccggagagcgagcaaacagccccaaagatgttgggtatgttctacacttcgaacgacagccctagcaaatccgtcttcaccagcagcctcttccagatggagccctcgccgcgtaaccagcgcaaggcgctgaacatctccgagccctttgcggtatctgtgccgctccgcgtgtccgcagtcatcagcaccaacagcacgccgtgcagaacacccccgaaggagctgcagtctctttccagcctggaagagttttcttttcatggatcagagagcggaggctggccagaagaagagaaaccgctgggagctgagacttctgcagcttctgtacctaagaaggcaggtcttgaggatgccaaggcagtacctgaagcaccggggacagtggaatgcagcaaaggcctgtcccaggagccaggcgcccacctggaggagaagaaaaccccagaaagctccttgagctctcaacatttaaatgaattagagaagaggccaaatccggagaaggtggtggaggagggacgagaggctggtgagatggagtccagcaccctgcaggagagccccagggccagagccgaagctgtgcttctccatgagatggatgaagatgatctggccaatgccctgatctggcctgagattcaacaggagctgaaaatcattgaatctgaggaggagctctcatcgttgccacctcctgctctgaagaccagcccaattcagcctattctcgagtcgagtctggggccctttattccctcagagcctcctgggagcttgccttgtggctccttccctgctccagtctccacccctctggaggtgtggactagggatccagccaatcagagcacacagggggcttccacagcagccagcagagagaagccggaacctgagcagggcctgcacccagacctcgccagcctggctcctctggaaatagttccttttgagaaggcatctccacaagcaacagtggaagtaggaggcccaggcaatctgtctcctccactcccacctgctcctccccctccaactcctctggaggagtcaactccagtcctgctttcaaagggcggcccggaaagagaagactcatccaggaaattgaggacagatctctacatagaccagctgaagtcccaagacagccctgagatctctagcctctgtcagggagaggaggcaaccccaagacacagtgacaagcaaaattcaaagaatgctgcttctgaggggaaaggctgtggttttccaagcccaaccagggaggttgagatcgtctcacaagaagaggaggatgtaacccattcagtacaggagccttcagactgtgacgaagatgacactgtgacagacattgcccagcatggcctggagatggtggagccctgggaggaaccccagtgggtgacgagtccccttcactctcccaccctgaaagacgcgcacaaggcccaggtacagggccttcagggtcaccagttggagaagaggctttcccacaggcccagccttcgccagagccattctctagatagcaaacccacggttaaaagccagtggactctcgaggttccctcctccagcagctgtgctaatcttgaaacagagaggaattctgaccctcttcagccccaggcacccaggagagagattactggatgggatgagaaagccctgaggtccttcagagagttctctggcctgaaaggggcagaggctcctcccaaccagaagggaccaagtggtgtgcaacccaacccagcagaaaccagccccatcagcctagcagagggaaaggagctagggacacacctggggcacagcagtccacagattaggcaaggtggtgttcctgggccagagagcagcaaggagagttcacccagcgtgcaggacagcacttcgcctggagagcaccccgcaaagttacagctaaagagcacagagtgtgggcccccaaaagggaaaaacaggccttcttccctcaacttggaccctgccattcccattgctgacctcttctggtttgagaatgtggcctcatttagttcacctggaatgcaggtctctgagccaggagacccaaaggtcacatggatgacctcatcttactgtaaagcagacccctggagggtttactcccaggacccccaggacctggacattgttgctcatgcactgacaggccgccgtaactcagctcctgtgagtgtgtcagctgtgagaacctccttcatggtcaaaatgtgccaggccagggcggtcccagtcatccctcccaagattcagtacacccagatcccacagcccctgccctctcagagctcaggggagaatggggttcagcctctggagaggagccaggagggacccagctcaaccagtgggaccactcagaaacctgccaaagatgattctccctcctccctggaaagctcaaaggaagaaaaaccaaagcaagatcccggagccattaagtcctcaccagtggatgccactgcaccctgcatgtgcgagggacctaccctttctccagaaccaggctcgtctaacctgctctccacccaggatgcagtagtgcaatgcagaaagcgcatgtcagagacagagccatctggggacaaccttctttcttcaaaactagagcgaccatctgggggttctaagcctttccacaggtcaaggccaggaagacctcagagcctaatcttattcagtcctcctttccccattatggaccacctgcccccttcatccacagtgacagattccaaggtcctgctgtcccctatcagaagtcccacccagacagtttcccctggccttctttgtggagagttggcagaaaacacatgggtcacaccagaaggggttacacttaggaataaaatgaccatccctaagaatggccagagactagagacctcaaccagctgtttttaccagcctcagcggagatcagtaattctggatggaagaagtgggaggcaaatagaatgatttcggttcacctgctggtgtctgaaaaaaaccgtgattcatctggaagttattacagggccagcttgccatattccaggcacacgttatcaagtttgggcctattgtggcctctgacttctctttcttcagccttttgaccacttattaattagtccatttgctagaagagtggtcaagggaaaaacgagagatgaaatttagttaagtctatgtgagcaagtgagagaaggttaggtaaggggagaggatggaatgcttgcctccaatgaactttggagcttgtatgtgagtcagattgctcccctattgctattatctattactcttgagagctggctgtcctttgaaagaaagaagtaatgttctttgaaagaaagaaaaatctcttgctgtgtcaaacctcaaaatgttgctattggggttagaaggcctcctctttatgctttttaatgctctttcaaacgtgttcttttagaccagttttctaataagctttgtaaaatgtactatccaaattagaagcggatttggaaatgcaaactaacgtgcacttagatatccaagtgggtgagcttagccactcttacccatgctctttccctggaatccctggagacctgtccaagatgatttccatataccagcatagaaaatcagaatcaagagcaaactctgagactggcacaatccaagaagatttcctggctctggcttttagtaatttgggactccaactgccactgtactggactgtaatttataaatccagtagctacgcagggtggaggctgggctgaggattaccataatgaaatgtactaaatcttcatttaggtatgcaattgtgaagtgaaggcatctgctttctttacagtatcagagtccaagaacaggatgtcaccatagataaaagcctcatacaaaggcagaactacactccaaatttaatgtgtttaaattggtggggcaccagcagaaaatattctagctcagctttactcttcttccacactaggctgggcccagcaatacaggagaggatgaagggaggagctccaggaggcgagggaagagccctagcagggcggccatcacaaccactcactgagagttgcccttcttaaaaatgtattttattttagccagtgggtcccttcctttctcctttcctctctactgctcaagaacagatttgaggccaggtgcggtgcctcacatctgtaatcccaacactttgggaggctgagatgggtggattgcttgagcccaggagttcaagaccagcctgggcaacacagcgagaccccatctcttaaaaaataacagacttgaggaacccctctcccttccataattcccctcatccaccgcccactccaggcactcactcaaacttgctcttcaactctgtatacaagcagaagcaataaaccaatctgattttcttttcaattatttataactttcaatggttctttcctttccagctggcgagagaaaggagaactaatatacctgctggcagatttttggtgctgcccaaaaaaggacttcacagggcatctcttctcaggttcaagcctggctgaattctgcccagaagctcagtcattgcagaaatttctctaagggctgatagtacctctgggtaggcgtcacaaccaaggctggttctgggcttagtgggggctgagatgaagttacctcctccaatgagaaattgggagctgatgccctgcaacagatatatattcctctctctctctgtctctctatctctctcctccctctccctccctccctccccgccaataagccttacaaacagttttgaaatcttgttctgtaccttttaagccagtgtctgtggcgagggtgactggcaagtcagctgatgagttctgccttctgagagcactgagtgagcaaggcctttcatcagtgttttggccttctcattgggtgaggaagacattgaaccaacagccaacgagatatgaacctgtaagaaaaaagtcctagaatatagtatttttccccaggccagcaaagtgaagaaatacagtggtgacagatgagaaaggccatgttcaagagatctgaaaagtacattcctgccttatcagaaaatgtgtcagacaggttttatgtcagcctcagtgctcctgcggtgtcgacgctctgataaggaccatgttccagttagaatgcgagggagggaaagagctgcactttgcttcaccatcagaactctgagccaaataatgaatatgtaaactattttatgattattttaaatgtttgtttggtaacatttataagatctatttttatttggggatagactgagaagccaccatttacatattaacaagtgacttcagttctaagggttgagatgcctgtgtggatttataaaatggttgcaagatcttttagactctgacatttatagcatcaccttcaggaacacagttctggggatgtcatcatgagacacactgacagctgtggagatagtccctactctcagctttccttgctagtcaagtccaaaaggccttagaagctgactcaccttctcagccagagtcctgctgctcaagtgtggacctccactttgactctcacccagcctgccagccatcacaaaggctttcataaacttcctgtggtctgggctagcctggcactgatgaaattccattctaaagaaagaaaactcatattcctcccccccacaaattgttcccccaaatgctctgggattacctatttcaccactcatttgagtctccgaaaaatgaactccctgagaatggctggatgggaatcagatagtctgcttccattcaggagagggacagaacaggagctgctgtgtttaggaggatttacctggtgccctagaaagggctatgcaatcaaattctcaagggctccttcaaatcagctatcagtcctcaaaatgggggttgctgatgttaaatgatggatttgcagtgaaacgcatgcatgtactgacgttttctttcagcattagtggttgcttaagaaaatagtaacctatattttctgctacacttggaatatgaagaaatctgaacaagaaccccattaagacacctaacctaatctaaaccctaaaattcaaaatattgtccaagtcaaaagtctagactctgaggacattaaaaatgtaaatatcatcatccttagcaaatatttattgggagcttagtaatagtgcactgggtaccttagcactcccaaatcattcaagagtctagtgaaaaagggggagggatggcagcaaataaaacacccccataaacaaccaggagcaaggttgagaaccattaagttgccaaacaaaagcagaaggggaaaaagtgtggcaacaagcatcttttaataggatagttgacggtattcaagtgacctactgactccaaataatcaaattgaacacaattgcaaatccaatagaacatcccagtgagacactcgggtatttgagaactttgcttgatttagaaaactggaaagtggcaactaggctagaatagtggcaactaggttcggaggtttcgtgtggtcataattggtttggtgaagtgtgagatctctgcaaatgagccaggtaagatcagtattccatagtgcttgaaaaggggattttagagacttctgtcatcacaaagcagattaactcctagttaatgatgaagcagtaggcccaagataaactgttcaattcaagataaattgttcttgtcagtgtttggcatatgataatcacatttggctaaaattggatgggacagtcatttgtctacacaggccttccattcctgcatgaagagatactggggagcatacaattattttgtccagtattagagtgggagaagttctcagtaagtccagtcccaccaggatttatttgggccacattctaccacggccagtccaatctgatgaccacatgaattggggttaagtgttgctaagactatgattttagacatgtctggcaggaaggtcagctcaaaatgtggcatgacaaagaatatgtgctctactaccaaaacctttcctagcaaaacaaggccagaagagggagcaagcatctttccaagcatggagaggagggggcaatggtggaagggtgattgcctgaaatcagtgccagtacagatagcataaaattgggggccaccacagattggctggctactgtgtagatcatttagtaatcttgaggtacattaataatgcagagattacttttctgtgagggtaagggggacgtagctaaatataagaagcttacaaggtccatagccatgtattttactggataaatcacaatgctttgcaataacttaatgtcatagtactttctggcttataattctgcaaagtaaagcactttttcaaagga

SEQ ID NO: 175798 - DNA, 551 bp, Homo sapiens
  Payload ID: 14519
  Gene Symbol: ARHGAP31
  Gene Name: Rho GTPase activating protein 31
  ENST ID: ENST00000482743
  CDS Start-End: 55-551
gcagatcagcggaatggctaaatgaaggtgctatactttacttaaaaggtgaaaatgtgtcatttggttccatacgttttgaagagctgtgcagaatttatagagactcacggcatcgtggatggaatctatcggctttcaggagtcacctcaaacatacaacggctaaggcaagagtttggctcagatcaatgtccagatctgacaagggaagtgtacctccaggacatccactgtgtgggctcgctttgcaagctctactttagggagctgcccaaccccctcctgacttatgagctctatgagaaattcacggaggcagtgtcgcattgccctgaagaaggccaactggcccgaatccaaaatgttatccaggagcttcctccatcccactataggaccttggaatacctgattcgacacctggcccatatcgcctccttcagcagcaagaccaacatgcacgcccggaacctggccctggtgtgggcgccaaacctcctcaggtctaaagaaattgaagccactggttgcaatggagatgcagcctt

SEQ ID NO: 175799 - DNA, 10111 bp, Homo sapiens
  Payload ID: 14520
  Gene Symbol: ARHGAP32
  Gene Name: Rho GTPase activating protein 32
  Uniprot ID: A7KAX9
  ENST ID: ENST00000310343
  CDS Start-End: 1-6264
atggagactgaaagtgagagtagcactttaggggatgacagtgtcttctggttggagtctgaagttataatccaggtgactgactgtgaagaggaagaaagggaagagaagttcaggaagatgaagtcctcagtacattctgaagaagatgattttgttccagagctacatagaaatgtacaccctcgagagcggcctgattgggaagaaactcttagcgcaatggcaagaggcgcagatgttccagagattcctggagatcttactcttaagacgtgtggcagtacagccagtatgaaggttaagcatgtgaaaaagttacccttcactaaaggtcactttccgaagatggctgaatgtgcgcatttccattatgagaatgttgagttcggcagcatacagctttcactttcagaagaacagaatgaagtaatgaaaaatggctgtgaatctaaagagctggtctacctcgtgcagattgcttgtcagggaaaaagttggattgttaaaagaagttatgaagattttcgggtacttgataaacatcttcatctgtgtatttatgaccgaagattttcccagctctcagaacttccccgttctgacaccctgaaggacagtccagagtcggtcactcagatgcttatggcttacctgtcacgcctttcagctatcgctggcaacaagatcaactgtgggcccgcccttacctggatggagattgataataagggaaatcaccttttggttcatgaggagtcatccatcaacactcctgctgtcggtgctgcccatgttatcaagaggtacactgctcgggcccctgacgaactgaccttagaggtgggagacattgtttctgttattgacatgcccccgaaagtgttaagcacatggtggagaggcaagcacggattccaggtgggactcttccctggacactgtgttgagttaattaaccaaaaagttccccagtcagtgaccaactcagtgccaaaaccagtgtctaaaaagcacggcaagctcattacgttcttacgaacattcatgaagtctcgtccaacaaaacagaagctgaagcagcggggaatcttgaaagagagggtgtttggttgtgacctgggggaacaccttctaaattctggttttgaagtgccgcaggttcttcaaagctgcacagcattcattgagagatatggcatcgtggatggaatctatcgcctttctggtgttgcctccaatatccagagactacgccatgaatttgactctgagcacgtccccgacctgacgaaagaaccgtatgttcaggacatccattctgtgggttccctatgtaagctgtacttccgggaactcccaaaccctctgcttacctaccagctgtatgagaaattttctgatgcagtttcagcagcaacagatgaagaaaggctgataaaaatccacgatgtcatccagcagctccccccaccacactacagaacactggagttcctgatgagacacttgtctcttctagctgactattgttccatcacaaatatgcatgcaaaaaatctagcaattgtttgggctccaaacctgttaagatcaaaacagatagaatctgcctgcttcagtggaacagcagctttcatggaagtgaggattcagtctgtggttgttgagttcatcctgaatcacgttgatgtgctgttcagcggcagaatcagcatggccatgcaagagggggcagcttctctatcaaggcccaagtccctcctggtatcctctccatccaccaaactgctgacattggaagaggcccaggcacgaacacaagctcaggtcaattctccaattgtgacggaaaataaatatatcgaagtaggagaaggacctgctgcacttcaggggaaatttcataccataattgagttcccacttgaaagaaagaggcctcaaaataagatgaaaaagtctcctgtgggtagctggcgttcctttttcaacttggggaaatcatcatctgtttctaaacgaaagctgcagcggaatgagagtgagccttcagagatgaaagccatggctctgaaaggtggcagggcagaaggaaccctccgttcagctaaaagtgaggagtctcttacatctctccatgcagttgatggtgattctaagctcttccgacccagaagacccagatcttccagtgatgcactgtctgcctcttttaatggagaaatgctggggaaccgctgtaactcctatgataatctgcctcatgacaatgagagtgaggaggaaggagggctgcttcatatcccagcccttatgtctcctcattcagctgaggatgttgacttgagcccaccagacattggagtagccagcctggattttgatccaatgtcatttcaatgtagtcctcctaaggccgaatcagaatgtctggagagtggtgcttcctttttagattcaccaggatactccaaggataaaccaagtgccaataaaaaggatgcagaaacaggtagtagccaatgtcagactccaggaagcacagcaagctctgaacctgtctctcctcttcaggagaaactgagtccattctttaccctggacttgagcccaactgaagataaatcatctaagccatcctcctttactgaaaaggtcgtctatgctttctctccgaagataggacggaaattaagcaaatcaccttctatgagcatatctgagccaatttcagtgaccctaccaccacgggtgtcagaagtcattggtacagtctcaaataccacagctcagaatgcatcatcttcaacctgggacaaatgcgttgaagaaagggatgccacaaatagatcccccacccagatagtaaagatgaaaacaaatgagacagttgcccaagaagcatatgaatctgaagtccagcccctggaccaggtggctgctgaagaagtagaattgccagggaaagaggatcagtctgtctcaagcagtcagagtaaggctgtagcttctggacagactcagacaggagcagttacccatgacccccctcaggattccgttcctgtcagttcagtctctcttatcccaccaccaccgcctccgaaaaatgttgcccgaatgttggcgctagcattagctgagtccgcacagcaagcctcaactcagtcattgaagagaccagggacctctcaggctgggtatacaaattatggagacatagcggtggctacaactgaagataatctgtccagttcttactctgcagttgctctagataaggcctatttccaaaccgatcgaccagcagagcagttccacctccagaataatgcaccaggaaactgtgaccatcctctaccagagacaacagctactggggatcctacccattccaacacaactgaatctggggagcaacatcaccaagtagacttaacagggaatcagccacatcaagcatatttatctggggacccagaaaaggccagaattacttcagttcccttagactcagagaagtctgatgatcatgtaagtttccctgaagaccagtctgggaagaacagtatgccaactgtctccttcttggatcaggaccagtctccaccccgtttctacagtggagatcagcctccttcttatcttggtgcaagtgtggataaactccatcaccctttagaatttgcagacaaatctcccacacctcctaatttacctagcgataaaatctaccctccttctgggtcccccgaagagaataccagcacagccaccatgacttacatgacaactactccagcaacagcccaaatgagcaccaaggaagccagctgggatgtggctgaacaacccaccactgctgattttgctgctgccacacttcagcgcacgcacagaactaatcgtccccttccccctccgccttcccagagatctgcagagcagccaccagttgtggggcaggtacaagcagcaaccaatataggattaaataattcccacaaggttcaaggagtagttccagttccagagaggccacctgaacctcgagccatggatgaccctgcgtctgccttcatcagtgacagtggtgctgctgctgctcagtgtcccatggctacagctgtccagccaggcctgcctgagaaagtgcgggacggtgcccgggtcccgctgctgcacctgcgcgccgagtctgtccctgcgcatccctgtggctttcctgcaccactgccccccaccaggatgatggagagtaagatgattgctgccatacactccagcagtgcagatgccaccagcagttcaaattatcattcctttgtcactgcttcatccacctctgtggacgatgcattgcctttaccacttcctgtcccacaacctaagcatgcttctcagaaaacagtttactcctcctttgctaggcccgatgtcaccactgaaccctttggtccagataactgtttgcatttcaatatgactccaaactgccagtaccgtccccagagtgtacctccccatcacaataaattggagcagcaccaagtgtatggtgccaggtcagagccaccagcctccatgggtcttcgttataacacatatgtggccccaggaagaaacgcatctggacaccactccaagccatgcagccgggtcgagtatgtgtcttctttgagctcctctgtcaggaatacctgttaccccgaagacattccaccgtaccctaccatccggagagtgcagtctctccatgctccgccgtcttccatgattcgctctgttcccatttcacggacagaagttcccccagatgatgagccagcctactgcccaagacctctgtaccaatataagccatatcagtcctcccaggcccgctcagattatcatgtcactcagcttcagccttactttgagaatggccgggtccactacaggtatagcccatattccagttcttctagttcctattacagtccagatggggccctgtgtgatgtggatgcctatggcacagtccagttgagaccccttcaccgccttcccaatcgagactttgctttctacaatcctaggctgcaaggaaagagcttgtacagttatgctggtttggctccacgtccccgggccaacgtgactggctatttctctcccaacgaccataatgtagtcagcatgcctccggctgctgatgtgaagcacacctacacctcatgggatcttgaggacatggaaaaataccgcatgcagtccatccggagagagagccgtgctcggcagaaggtgaaagggcctgtcatgtcccaatatgataacatgaccccggcggtgcaggacgacttgggtgggatctatgtcatccatctgcgtagtaaatcagatcctgggaaaactggacttctctcagtggcagaaggaaaggagagccgccatgcagccaaggccatcagtcccgagggagaggaccgcttctataggaggcatcccgaggcagagatggacagagcccaccatcacggaggccatggtagcacgcagccggagaagccatccctgcctcagaagcagagcagcctgaggagcaggaagcttcctgacatgggctgcagtcttcctgagcacagggcacaccaagaagcaagccataggcagttctgtgagtcaaagaatgggcccccttatccccagggagctggccagttagattatgggtccaaagggattccagacacttctgagccagtcagctaccacaactctggagtaaaatatgctgcatccgggcaagaatctttaagactgaaccacaaagaggtaaggctctccaaagagatggagcgaccctgggttaggcagccttctgccccagagaaacactccagagactgctacaaggaggaagaacacctcactcagtcaatcgtcccaccccctaaaccagagaggagtcatagcctcaaactccatcatacccagaacgtggagagggaccccagtgtgctgtaccagtaccaaccacacggcaagcgccagagcagtgtgactgttgtgtcccagtatgataacctggaagattaccactccctgcctcagcaccagcgaggagtctttggagggggcggcatggggacgtatgtgccccctggctttccccatccacagagcaggacctatgctacagcgttgggtcaaggggccttcctgcccgcagagttgtccttgcagcatcctgaaacacagatccatgcagaatgagccctgcgagcaatagagttgaagcagcctctgctggacagtggactgttctatttttttcaataaccaaaaagattaaacaaaaaatactataaaacccctgaccacatttaaaaaatgataataaaagtaaacaaatcagcatctttttccccttccctgcttcattaccccctcttccatctatagactttgtcatttttgtctttagaaaagatctgaaggatggtaaagccccgtgctgaaacccagtagagaaacctgtctcaggacacacttgccatctagggctagcttgaaagagcctgaggactgcctttaactgaatttgaattcagcattgtcctttcttcttagtatttgctgcataattgagagcagttcacatcgatttcctggtaggcgtctgcattccctgttgtgttcctgcttctccttcagtagctgcacaacttgcgcagatcgacacactgttgtcacttcattctccccgtctgagaaggatcttgtgttcagttagagtcgtggaaaaatccctgatccttcaaggtcagtcagacagttggcaacattataattaaaaataagaaattaagactttaaattaaacatttggtagagtcatcataaaacaccagaccacttagactcaggctgaaccatactctttctattcttatttttcatccttgttcctcacggttcagtgaacaggctcatatcatgacagaatggacttttaaaagttagtacttaaggaaacttctttaggtggaagaaagtaaagttcttattgtcagtgaactttattagcaccagaaatctctattgatgcttttaatgcattgcctgccttcaggttttcttcttaccccacccctcaataagatttggtgaattgtaattctagtaaaacatgtcataccattggttttcctaaattatcaactttctttcattaaaaaaaaaaaaaaaaaaaaaagcccagcatggtttgactggatagacacgcataatttattatgaatataaatttccatgtttgtttctgttcctaaaccagagtacgaggtccctgggaatttaagtagctacgcattatctattattagactgcaagttcctgcaataactgcttagttcacagccccgtttcaccagtggagttctgggcagttattgctgtcctaaggcattactgtcgtttgcttactctatacttgtgtggtcacagtcttcttgtaattaccatctacaccagcatttcaggtatagctctttataactctggagacatgtaaaacatgtttaacacccacgagttttgaaagttgcattccttattagagtaggaactctctagcccaactccattctatgttctcagctccctccaccccccaaaatacatcagactagcaaggcagtcctatgtttacaaaacgagtttagattgtcatttcattccataactcttaataatactcaagttttatacattcacgtattttaaatgctcggtctgtagaagacactaggagaattgcattccaattactggatggttgctgctctggctttttagaacttgaaattaatttttatttagagcaaaggaggaaatcttttaagaggctaaaatcatgctgctattattgctgtgaaattgtataaagattaggattcatgccagtttttattttaaaaaataatgtgcattttaagggtttatatttagaaaaaaataaaatgtttcaagaacaacacattgatatgtggaaatattctataaggttttcttttgttcccttagaattcattggagggatgcagtaaaaactgtagtagaaaccttgaaacacccatatgtgaaaaggtctgtggaaattgaggcctctacattaaaagtgcagaaccaactgttttacagtcaaagtgctaggaaacctgataggatacttccctttggcacaaaaacaccctgggtgctacatacaggagtatgacctttggtgaatatgtggcactaattttttttaccttaatcatattcttgtcaagtaggcaacccattgccccttggagaccacaccagccctgtaagttctcaccagcagcatggagattaggaagaggggctgctgtgaccaggagatacacacggctttaagtaactgagagcctaaagaaagtaacccagggagtccggtccagttttaatatttgtggatttgttgtcacacacattgtttagtcctgaaactaaaacctattttataaatagtagggttaattcctcgaaacaatttctttattaataaatgtcctgtgggtttagaaatatcaggtaaatatttgaatacagaatgatgattgcaattactgttacaagcgtgaaacacaaacttcagatcaaatctagagttgcttcatttaatgcatgctagcaacagccttaactttggattcagttatttgaaacacttttccggcatctttccctttctaatgttgtggggtggaaaccggatggcaaatcactgtgagccggatacctcagcacagtccaccttgtgtgtgacttcacaaatgggggacttcacaaatggggtaactgaatgttattactttcaaattttgacatggagcattatgatcaaggaaatggagctgccttatacattaaacccgtgatttaatcctattgacattttcatagccatgcctccagattttatctttttggcaaaattctgattccacagtttggtctgattgaaataaatattccctggacgtctggctaaaaattttgctaacaatcccagaggtgccattttcttattaataaatttcattggagccttatttcttactatattcaatttcgtttcaaacctgcaagtccctgggatggtcccacgactagggcctgcacatttcttacaatggcaaagcattttttaaaatttagggtcaggttgaaaaattctaggactaattctgtagagaggagggactgttaactaacgtgagtggggacggaggagtaggttaccacatttggagcagtaatagatgcaaacgatgtaaatttgaaatttgcccctttagttaaagaaggagcctgcaaagtccatttctctgttttcagccctgtcagtcacccatttaggatgttggcaaagtactgcttgagcagaatgtgtaagaaagtaataatgaaagcaaaagtatgtcagacagttacttcttccacatggttagaggcatgtgattttcagcactgtgtgttacagaaatgtcaggaatggtgtattataacgtgtgcaagataatgtcagtgtgcacagagggtcttttttccttatctgattagtactgttaatgttcaaagaataaaaatggttttacagtttagattctgagatagcaaaacctgatttttcaaccatgacctgcatgagagaagcatcctaggaagtcttagatcatacttttgagtttttaattttaatttatatagtgtttttttatgtcttaatatttttgtgaactggtgtaaattgttaatgcatataagcttgtgtatttttgtaaatagttttgtgatttatttcttgccccatatgtaaatatttagagtctcatttcttgcaaacttatttgaagctgagttgtgggtttgggttttgtttgtttctttggttgcagggtggggtggggggtggcaggggagggaggaagggatttttgtacctggagatggagatatcttgtggtttaaagcaaatgtcccactgaaagtgattcaaatatcaacagaattatttcaggttaaaacaga

SEQ ID NO: 175800 - DNA, 6556 bp, Homo sapiens
  Payload ID: 14520
  Gene Symbol: ARHGAP32
  Gene Name: Rho GTPase activating protein 32
  Uniprot ID: A7KAX9
  ENST ID: ENST00000392657
  CDS Start-End: 380-5596
aaagcagtatgtgctgagagaggaggattaagctcctggaggcagagctctcccacacacttgctggcttgctgggctccactgactggactgaaaacagggccaagaaaactgctgctgcagggggtcctgaaaacagctggaacccggcagtgatgtgggacctaacttgaagttaacctgtggtggtgaggttggaaccagttggattatgatttattttctacactcttgtacggaatgcagagctgttgtatcctgatgaatctactgctaaatatagtcatttggaataattttaagtattgatcttaaaacttgtaccacaacaagagtgtctaaaaagcacggcaagctcattacgttcttacgaacattcatgaagtctcgtccaacaaaacagaagctgaagcagcggggaatcttgaaagagagggtgtttggttgtgacctgggggaacaccttctaaattctggttttgaagtgccgcaggttcttcaaagctgcacagcattcattgagagatatggcatcgtggatggaatctatcgcctttctggtgttgcctccaatatccagagactacgccatgaatttgactctgagcacgtccccgacctgacgaaagaaccgtatgttcaggacatccattctgtgggttccctatgtaagctgtacttccgggaactcccaaaccctctgcttacctaccagctgtatgagaaattttctgatgcagtttcagcagcaacagatgaagaaaggctgataaaaatccacgatgtcatccagcagctccccccaccacactacagaacactggagttcctgatgagacacttgtctcttctagctgactattgttccatcacaaatatgcatgcaaaaaatctagcaattgtttgggctccaaacctgttaagatcaaaacagatagaatctgcctgcttcagtggaacagcagctttcatggaagtgaggattcagtctgtggttgttgagttcatcctgaatcacgttgatgtgctgttcagcggcagaatcagcatggccatgcaagagggggcagcttctctatcaaggcccaagtccctcctggtatcctctccatccaccaaactgctgacattggaagaggcccaggcacgaacacaagctcaggtcaattctccaattgtgacggaaaataaatatatcgaagtaggagaaggacctgctgcacttcaggggaaatttcataccataattgagttcccacttgaaagaaagaggcctcaaaataagatgaaaaagtctcctgtgggtagctggcgttcctttttcaacttggggaaatcatcatctgtttctaaacgaaagctgcagcggaatgagagtgagccttcagagatgaaagccatggctctgaaaggtggcagggcagaaggaaccctccgttcagctaaaagtgaggagtctcttacatctctccatgcagttgatggtgattctaagctcttccgacccagaagacccagatcttccagtgatgcactgtctgcctcttttaatggagaaatgctggggaaccgctgtaactcctatgataatctgcctcatgacaatgagagtgaggaggaaggagggctgcttcatatcccagcccttatgtctcctcattcagctgaggatgttgacttgagcccaccagacattggagtagccagcctggattttgatccaatgtcatttcaatgtagtcctcctaaggccgaatcagaatgtctggagagtggtgcttcctttttagattcaccaggatactccaaggataaaccaagtgccaataaaaaggatgcagaaacaggtagtagccaatgtcagactccaggaagcacagcaagctctgaacctgtctctcctcttcaggagaaactgagtccattctttaccctggacttgagcccaactgaagataaatcatctaagccatcctcctttactgaaaaggtcgtctatgctttctctccgaagataggacggaaattaagcaaatcaccttctatgagcatatctgagccaatttcagtgaccctaccaccacgggtgtcagaagtcattggtacagtctcaaataccacagctcagaatgcatcatcttcaacctgggacaaatgcgttgaagaaagggatgccacaaatagatcccccacccagatagtaaagatgaaaacaaatgagacagttgcccaagaagcatatgaatctgaagtccagcccctggaccaggtggctgctgaagaagtagaattgccagggaaagaggatcagtctgtctcaagcagtcagagtaaggctgtagcttctggacagactcagacaggagcagttacccatgacccccctcaggattccgttcctgtcagttcagtctctcttatcccaccaccaccgcctccgaaaaatgttgcccgaatgttggcgctagcattagctgagtccgcacagcaagcctcaactcagtcattgaagagaccagggacctctcaggctgggtatacaaattatggagacatagcggtggctacaactgaagataatctgtccagttcttactctgcagttgctctagataaggcctatttccaaaccgatcgaccagcagagcagttccacctccagaataatgcaccaggaaactgtgaccatcctctaccagagacaacagctactggggatcctacccattccaacacaactgaatctggggagcaacatcaccaagtagacttaacagggaatcagccacatcaagcatatttatctggggacccagaaaaggccagaattacttcagttcccttagactcagagaagtctgatgatcatgtaagtttccctgaagaccagtctgggaagaacagtatgccaactgtctccttcttggatcaggaccagtctccaccccgtttctacagtggagatcagcctccttcttatcttggtgcaagtgtggataaactccatcaccctttagaatttgcagacaaatctcccacacctcctaatttacctagcgataaaatctaccctccttctgggtcccccgaagagaataccagcacagccaccatgacttacatgacaactactccagcaacagcccaaatgagcaccaaggaagccagctgggatgtggctgaacaacccaccactgctgattttgctgctgccacacttcagcgcacgcacagaactaatcgtccccttccccctccgccttcccagagatctgcagagcagccaccagttgtggggcaggtacaagcagcaaccaatataggattaaataattcccacaaggttcaaggagtagttccagttccagagaggccacctgaacctcgagccatggatgaccctgcgtctgccttcatcagtgacagtggtgctgctgctgctcagtgtcccatggctacagctgtccagccaggcctgcctgagaaagtgcgggacggtgcccgggtcccgctgctgcacctgcgcgccgagtctgtccctgcgcatccctgtggctttcctgcaccactgccccccaccaggatgatggagagtaagatgattgctgccatacactccagcagtgcagatgccaccagcagttcaaattatcattcctttgtcactgcttcatccacctctgtggacgatgcattgcctttaccacttcctgtcccacaacctaagcatgcttctcagaaaacagtttactcctcctttgctaggcccgatgtcaccactgaaccctttggtccagataactgtttgcatttcaatatgactccaaactgccagtaccgtccccagagtgtacctccccatcacaataaattggagcagcaccaagtgtatggtgccaggtcagagccaccagcctccatgggtcttcgttataacacatatgtggccccaggaagaaacgcatctggacaccactccaagccatgcagccgggtcgagtatgtgtcttctttgagctcctctgtcaggaatacctgttaccccgaagacattccaccgtaccctaccatccggagagtgcagtctctccatgctccgccgtcttccatgattcgctctgttcccatttcacggacagaagttcccccagatgatgagccagcctactgcccaagacctctgtaccaatataagccatatcagtcctcccaggcccgctcagattatcatgtcactcagcttcagccttactttgagaatggccgggtccactacaggtatagcccatattccagttcttctagttcctattacagtccagatggggccctgtgtgatgtggatgcctatggcacagtccagttgagaccccttcaccgccttcccaatcgagactttgctttctacaatcctaggctgcaaggaaagagcttgtacagttatgctggtttggctccacgtccccgggccaacgtgactggctatttctctcccaacgaccataatgtagtcagcatgcctccggctgctgatgtgaagcacacctacacctcatgggatcttgaggacatggaaaaataccgcatgcagtccatccggagagagagccgtgctcggcagaaggtgaaagggcctgtcatgtcccaatatgataacatgaccccggcggtgcaggacgacttgggtgggatctatgtcatccatctgcgtagtaaatcagatcctgggaaaactggacttctctcagtggcagaaggaaaggagagccgccatgcagccaaggccatcagtcccgagggagaggaccgcttctataggaggcatcccgaggcagagatggacagagcccaccatcacggaggccatggtagcacgcagccggagaagccatccctgcctcagaagcagagcagcctgaggagcaggaagcttcctgacatgggctgcagtcttcctgagcacagggcacaccaagaagcaagccataggcagttctgtgagtcaaagaatgggcccccttatccccagggagctggccagttagattatgggtccaaagggattccagacacttctgagccagtcagctaccacaactctggagtaaaatatgctgcatccgggcaagaatctttaagactgaaccacaaagaggtaaggctctccaaagagatggagcgaccctgggttaggcagccttctgccccagagaaacactccagagactgctacaaggaggaagaacacctcactcagtcaatcgtcccaccccctaaaccagagaggagtcatagcctcaaactccatcatacccagaacgtggagagggaccccagtgtgctgtaccagtaccaaccacacggcaagcgccagagcagtgtgactgttgtgtcccagtatgataacctggaagattaccactccctgcctcagcaccagcgaggagtctttggagggggcggcatggggacgtatgtgccccctggctttccccatccacagagcaggacctatgctacagcgttgggtcaaggggccttcctgcccgcagagttgtccttgcagcatcctgaaacacagatccatgcagaatgagccctgcgagcaatagagttgaagcagcctctgctggacagtggactgttctatttttttcaataaccaaaaagattaaacaaaaaatactataaaacccctgaccacatttaaaaaatgataataaaagtaaacaaatcagcatctttttccccttccctgcttcattaccccctcttccatctatagactttgtcatttttgtctttagaaaagatctgaaggatggtaaagccccgtgctgaaacccagtagagaaacctgtctcaggacacacttgccatctagggctagcttgaaagagcctgaggactgcctttaactgaatttgaattcagcattgtcctttcttcttagtatttgctgcataattgagagcagttcacatcgatttcctggtaggcgtctgcattccctgttgtgttcctgcttctccttcagtagctgcacaacttgcgcagatcgacacactgttgtcacttcattctccccgtctgagaaggatcttgtgttcagttagagtcgtggaaaaatccctgatccttcaaggtcagtcagacagttggcaacattataattaaaaataagaaattaagactttaaattaaacatttggtagagtcatcataaaacaccagaccacttagactcaggctgaaccatactctttctattcttatttttcatccttgttcctcacggttcagtgaacaggctcatatcatgacagaatggacttttaaaagttagtacttaaggaaacttctttaggtggaagaaagtaaagttcttattgtcagtgaactttattagcaccagaaatctctattgatgcttttaatgcattgcctgccttcaggttttcttcttaccccacccctcaataagatttggtgaattgtaattctagtaaaacatgtcataccattggttttcctaaattatcaactttctttcatt

SEQ ID NO: 175801 - DNA, 719 bp, Homo sapiens
  Payload ID: 14520
  Gene Symbol: ARHGAP32
  Gene Name: Rho GTPase activating protein 32
  ENST ID: ENST00000525234
  CDS Start-End: 184-719
gcccggccgagcccccgcggctgccctcggcggccaggcgctaggctcggcggcgcgggcggcgctcggcggcggcggcggcgggcggagggcgtcgggcccggcccgcggagggcagacacggagcggccagcggggcgcagggacgccgcggcggcgcggcggggccgcggggctcggaagatgaagtcctcagtacattctgaagaagatgattttgttccagagctacatagaaatgtacaccctcgagagcggcctgattgggaagaaactcttagcgcaatggcaagaggcgcagatgttccagagattcctggagatcttactcttaagacgtgtggcagtacagccagtatgaaggttaagcatgtgaaaaagtccaccactccaggactgatgggctgtgacaacattcacaggttacccttcactaaaggtcactttccgaagatggctgaatgtgcgcatttccattatgagaatgttgagttcggcagcatacagctttcactttcagaagaacagaatgaagtaatgaaaaatggctgtgaatctaaagagctggtctacctcgtgcagattgcttgtcagggaaaaagttggattgttaaaagaagttatgaagattttcgggtacttgataaacatcttcatctgtgtatttatgaccgaagattttcccagctctcagaacttccccgttctgacaccctgaa

SEQ ID NO: 175802 - DNA, 8194 bp, Homo sapiens
  Payload ID: 14520
  Gene Symbol: ARHGAP32
  Gene Name: Rho GTPase activating protein 32
  ENST ID: ENST00000524655
  CDS Start-End: 25-2865
gattgggaagaaactcttagcgcaatggcaagaggcgcagatgttccagagattcctggagatcttactcttaagacgtgtggcagtacagccagtatgaaggttaagcatgtgaaaaagttacccttcactaaaggtcactttccgaagatggctgaatgtgcgcatttccattatgagaatgttgagttcggcagcatacagctttcactttcagaagaacagaatgaagtaatgaaaaatggctgtgaatctaaagagctggtctacctcgtgcagattgcttgtcagggaaaaagttggattgttaaaagaagttatgaagattttcgggtacttgataaacatcttcatctgtgtatttatgaccgaagattttcccagctctcagaacttccccgttctgacaccctgaaggacagtccagagtcggtcactcagatgcttatggcttacctgtcacgcctttcagctatcgctggcaacaagatcaactgtgggcccgcccttacctggatggagattgataataagggaaatcaccttttggttcatgaggagtcatccatcaacactcctgctgtcggtgctgcccatgttatcaagaggtacactgctcgggcccctgacgaactgaccttagaggtgggagacattgtttctgttattgacatgcccccgaaagtgttaagcacatggtggagaggcaagcacggattccaggtgggactcttccctggacactgtgttgagttaattaaccaaaaagttccccagtcagtgaccaactcagtgccaaaaccagtgtctaaaaagcacggcaagctcattacgttcttacgaacattcatgaagtctcgtccaacaaaacagaagctgaagcagcggggaatcttgaaagagagggtgtttggttgtgacctgggggaacaccttctaaattctggttttgaagtgccgcaggttcttcaaagctgcacagcattcattgagagatatggcatcgtggatggaatctatcgcctttctggtgttgcctccaatatccagagactacgccatgaatttgactctgagcacgtccccgacctgacgaaagaaccgtatgttcaggacatccattctgtgggttccctatgtaagctgtacttccgggaactcccaaaccctctgcttacctaccagctgtatgagaaattttctgatgcagtttcagcagcaacagatgaagaaaggctgataaaaatccacgatgtcatccagcagctccccccaccacactacagaacactggagttcctgatgagacacttgtctcttctagctgactattgttccatcacaaatatgcatgcaaaaaatctagcaattgtttgggctccaaacctgttaagatcaaaacagatagaatctgcctgcttcagtggaacagcagctttcatggaagtgaggattcagtctgtggttgttgagttcatcctgaatcacgttgatgtgctgttcagcggcagaatcagcatggccatgcaagagggggcagcttctctatcaaggcccaagtccctcctggtatcctctccatccaccaaactgctgacattggaagaggcccaggcacgaacacaagctcaggtcaattctccaattgtgacggaaaataaatatatcgaagtaggagaaggacctgctgcacttcaggggaaatttcataccataattgagttcccacttgaaagaaagaggcctcaaaataagatgaaaaagtctcctgtgggtagctggcgttcctttttcaacttggggaaatcatcatctgtttctaaacgaaagctgcagcggaatgagagtgagccttcagagatgaaagccatggctctgaaaggtggcagggcagaaggaaccctccgttcagctaaaagtgaggagtctcttacatctctccatgcagttgatggtgattctaagctcttccgacccagaagacccagatcttccagtgatgcactgtctgcctcttttaatggagaaatgctggggaaccgctgtaactcctatgataatctgcctcatgacaatgagagtgaggaggaaggagggctgcttcatatcccagcccttatgtctcctcattcagctgaggatgttgacttgagcccaccagacattggagtagccagcctggattttgatccaatgtcatttcaatgtagtcctcctaaggccgaatcagaatgtctggagagtggtgcttcctttttagattcaccaggatactccaaggataaaccaagtgccaataaaaaggatgcagaaacaggtagtagccaatgtcagactccaggaagcacagcaagctctgaacctgtctctcctcttcaggagaaactgagtccattctttaccctggacttgagcccaactgaagataaatcatctaagccatcctcctttactgaaaaggtcgtctatgctttctctccgaagataggacggaaattaagcaaatcaccttctatgagcatatctgagccaatttcagtgaccctaccaccacgggtgtcagaagtcattggtacagtctcaaataccacagctcagaatgcatcatcttcaacctgggacaaatgcgttgaagaaagggatgccacaaatagatcccccacccagatagtaaagatgaaaacaaatgagacagttgcccaagaagcatatgaatctgaagtccagcccctggaccaggtggctgctgaagaagtagaattgccagggaaagaggatcagtctgtctcaagcagtcagagtaaggctgtagcttctggacagactcagacaggtaccgtttgttttcctccattctttctttaagttaagagggatcttcaatcctgtgtgccatctgtgccttttaagagagaaatttgtccacagctagcctttaatcaaagagaatgcttttctgggtggtgctgatggctcagagccctaaattaaaagcagtccaacaaaactccccaaaagggccaatggtcctgcttcaaatcttcacaaaagtccccttatctctttggacggtgagaattcgtggataatttttgcacaactgcgtagctcttgattctgtttttctcttctaataaaatatctttattgtagccttccaagttaacaagccagctacaccatcaaatgtaaaaactgttcataataacagtctacaagcacttgaagcttgttttctaagcaatcttttctgagccaggtgagggacatgctttttttcccccccatctctgtaacaattcaagaagagattgcagtctttatacactgtttgttttagttttccttctgaaccagatgtgttttcaacagcatttgcatgtgggatagaagatcatggattgccattttgaaatatggaaggcacctattttttaatgatcacatggggagtgtttggctttccatttaggataacgtaagctaccttttcactctcattttttttcccaatttcccactaggagcagttacccatgacccccctcaggattccgttcctgtcagttcagtctctcttatcccaccaccaccgcctccgaaaaatgttgcccgaatgttggcgctagcattagctgagtccgcacagcaagcctcaactcagtcattgaagagaccagggacctctcaggctgggtatacaaattatggagacatagcggtggctacaactgaagataatctgtccagttcttactctgcagttgctctagataaggcctatttccaaaccgatcgaccagcagagcagttccacctccagaataatgcaccaggaaactgtgaccatcctctaccagagacaacagctactggggatcctacccattccaacacaactgaatctggggagcaacatcaccaagtagacttaacagggaatcagccacatcaagcatatttatctggggacccagaaaaggccagaattacttcagttcccttagactcagagaagtctgatgatcatgtaagtttccctgaagaccagtctgggaagaacagtatgccaactgtctccttcttggatcaggaccagtctccaccccgtttctacagtggagatcagcctccttcttatcttggtgcaagtgtggataaactccatcaccctttagaatttgcagacaaatctcccacacctcctaatttacctagcgataaaatctaccctccttctgggtcccccgaagagaataccagcacagccaccatgacttacatgacaactactccagcaacagcccaaatgagcaccaaggaagccagctgggatgtggctgaacaacccaccactgctgattttgctgctgccacacttcagcgcacgcacagaactaatcgtccccttccccctccgccttcccagagatctgcagagcagccaccagttgtggggcaggtacaagcagcaaccaatataggattaaataattcccacaaggtaagaaggggaagatatcagtgagatgaaatatactattaccaaaggtatgtcacttttcagcagggtgtgttgttatctttgagtcagacacaacaattacttttaagccctgtggctggtttccatgagatagttcccatttgaggttggagtctgccattaccttgatgctggcttttccccaggaaaggagtagctcctagatgactatagcttaactgtacctgctcccttttcttcctaaagtgtctcggtagtttattccagtaacacaaagagatcaggatcaaatgagacaaagtgggctttacggttgtgggttgctttttcttatttttttccaactccatcactgactcattgtgactttgggcaagtcatttacctaccctctgccaattattcacagttacacaatgaaaatacttcattctcaaaacattcgtaagactgtctgccttgcagactttttggaagtataagagattatagtgccttgggattttttgttactttcctagcattcaccagcagtttgtcccatagtcaggtgcctgtttcaatgagagaatgtagtatgcagaatgctaaggtttcttcctgaatttcctcatattttaagaaagtgccacaggttgtttttcttctatatggtcaccttgaactattaataggacttaagattttagaccttagtggaggatgctgtgtttactgcttctcaaggatagcatgttttcagtatgaggattatctttggccagactaaggtggaatcaaaggtaggagagaggcagtagcttctgatttgaatattgcctttccctatgtttgaagccctaaaactgctaactgtgtacaactgtgaatttcaaaagtctccccagatgatagaattaactcttaatttaacaagatgtcctttgtgttgagactgagctagactaatagaccgggtatgtatttttaagctctacagcattacttgactaaacctctcttttggtttgtatattaaaattatgccataggcaacctcatctcgcatttaaaacctctcataaattagaaaactttgaatggttctccaaagataatactgggtgttgtacaaaatagcagcacaagccttcttttcctagaaatgggtacagattcattgcaaccacatggcttgggaaagttcaagctgctacccaaccagccttaatttgtgagttacaaatttaatagtacttgattcatagagggaacaaaaaatagacccatagtattatcatctttcaataggttcaaggagtagttccagttccagagaggccacctgaacctcgagccatggatgaccctgcgtctgccttcatcagtgacagtggtgctgctgctgctcagtgtcccatggctacagctgtccagccaggcctgcctgagaaagtgcgggacggtgcccgggtcccgctgctgcacctgcgcgccgagtctgtccctgcgcatccctgtggctttcctgcaccactgccccccaccaggatgatggagagtaagatgattgctgccatacactccagcagtgcagatgccaccagcagttcaaattatcattcctttgtcactgcttcatccacctctgtggacgatgcattgcctttaccacttcctgtcccacaacctaagcatgcttctcagaaaacagtttactcctcctttgctaggcccgatgtcaccactgaaccctttggtccagataactgtttgcatttcaatatgactccaaactgccagtaccgtccccagagtgtacctccccatcacaataaattggagcagcaccaagtgtatggtgccaggtcagagccaccagcctccatgggtcttcgttataacacatatgtggccccaggaagaaacgcatctggacaccactccaagccatgcagccgggtcgagtatgtgtcttctttgagctcctctgtcaggaatacctgttaccccgaagacattccaccgtaccctaccatccggagagtgcagtctctccatgctccgccgtcttccatgattcgctctgttcccatttcacggacagaagttcccccagatgatgagccagcctactgcccaagacctctgtaccaatataagccatatcagtcctcccaggcccgctcagattatcatgtcactcagcttcagccttactttgagaatggccgggtccactacaggtatagcccatattccagttcttctagttcctattacagtccagatggggccctgtgtgatgtggatgcctatggcacagtccagttgagaccccttcaccgccttcccaatcgagactttgctttctacaatcctaggctgcaaggaaagagcttgtacagttatgctggtttggctccacgtccccgggccaacgtgactggctatttctctcccaacgaccataatgtagtcagcatgcctccggctgctgatgtgaagcacacctacacctcatgggatcttgaggacatggaaaaataccgcatgcagtccatccggagagagagccgtgctcggcagaaggtgaaagggcctgtcatgtcccaatatgataacatgaccccggcggtgcaggacgacttgggtgggatctatgtcatccatctgcgtagtaaatcagatcctgggaaaactggacttctctcagtggcagaaggaaaggagagccgccatgcagccaaggccatcagtcccgagggagaggaccgcttctataggaggcatcccgaggcagagatggacagagcccaccatcacggaggccatggtagcacgcagccggagaagccatccctgcctcagaagcagagcagcctgaggagcaggaagcttcctgacatgggctgcagtcttcctgagcacagggcacaccaagaagcaagccataggcagttctgtgagtcaaagaatgggcccccttatccccagggagctggccagttagattatgggtccaaagggattccagacacttctgagccagtcagctaccacaactctggagtaaaatatgctgcatccgggcaagaatctttaagactgaaccacaaagaggtaaggctctccaaagagatggagcgaccctgggttaggcagccttctgccccagagaaacactccagagactgctacaaggaggaagaacacctcactcagtcaatcgtcccaccccctaaaccagagaggagtcatagcctcaaactccatcatacccagaacgtggagagggaccccagtgtgctgtaccagtaccaaccacacggcaagcgccagagcagtgtgactgttgtgtcccagtatgataacctggaagattaccactccctgcctcagcaccagcgaggagtctttggagggggcggcatggggacgtatgtgccccctggctttccccatccacagagcaggacctatgctacagcgttgggtcaaggggccttcctgcccgcagagttgtccttgcagcatcctgaaacacagatccatgcagaatgagccctgcgagcaatagagttgaagcagcctctgctggacagtggactgttctatttttttcaataaccaaaaagattaaacaaaaaatactataaaacccctgaccacatttaaaaaatgataataaaagtaaacaaatcagca

SEQ ID NO: 175803 - DNA, 5289 bp, Homo sapiens
  Payload ID: 14520
  Gene Symbol: ARHGAP32
  Gene Name: Rho GTPase activating protein 32
  Uniprot ID: A7KAX9
  ENST ID: ENST00000527272
  CDS Start-End: 35-5251
gcacggcaagctcattacgttcttacgaacattcatgaagtctcgtccaacaaaacagaagctgaagcagcggggaatcttgaaagagagggtgtttggttgtgacctgggggaacaccttctaaattctggttttgaagtgccgcaggttcttcaaagctgcacagcattcattgagagatatggcatcgtggatggaatctatcgcctttctggtgttgcctccaatatccagagactacgccatgaatttgactctgagcacgtccccgacctgacgaaagaaccgtatgttcaggacatccattctgtgggttccctatgtaagctgtacttccgggaactcccaaaccctctgcttacctaccagctgtatgagaaattttctgatgcagtttcagcagcaacagatgaagaaaggctgataaaaatccacgatgtcatccagcagctccccccaccacactacagaacactggagttcctgatgagacacttgtctcttctagctgactattgttccatcacaaatatgcatgcaaaaaatctagcaattgtttgggctccaaacctgttaagatcaaaacagatagaatctgcctgcttcagtggaacagcagctttcatggaagtgaggattcagtctgtggttgttgagttcatcctgaatcacgttgatgtgctgttcagcggcagaatcagcatggccatgcaagagggggcagcttctctatcaaggcccaagtccctcctggtatcctctccatccaccaaactgctgacattggaagaggcccaggcacgaacacaagctcaggtcaattctccaattgtgacggaaaataaatatatcgaagtaggagaaggacctgctgcacttcaggggaaatttcataccataattgagttcccacttgaaagaaagaggcctcaaaataagatgaaaaagtctcctgtgggtagctggcgttcctttttcaacttggggaaatcatcatctgtttctaaacgaaagctgcagcggaatgagagtgagccttcagagatgaaagccatggctctgaaaggtggcagggcagaaggaaccctccgttcagctaaaagtgaggagtctcttacatctctccatgcagttgatggtgattctaagctcttccgacccagaagacccagatcttccagtgatgcactgtctgcctcttttaatggagaaatgctggggaaccgctgtaactcctatgataatctgcctcatgacaatgagagtgaggaggaaggagggctgcttcatatcccagcccttatgtctcctcattcagctgaggatgttgacttgagcccaccagacattggagtagccagcctggattttgatccaatgtcatttcaatgtagtcctcctaaggccgaatcagaatgtctggagagtggtgcttcctttttagattcaccaggatactccaaggataaaccaagtgccaataaaaaggatgcagaaacaggtagtagccaatgtcagactccaggaagcacagcaagctctgaacctgtctctcctcttcaggagaaactgagtccattctttaccctggacttgagcccaactgaagataaatcatctaagccatcctcctttactgaaaaggtcgtctatgctttctctccgaagataggacggaaattaagcaaatcaccttctatgagcatatctgagccaatttcagtgaccctaccaccacgggtgtcagaagtcattggtacagtctcaaataccacagctcagaatgcatcatcttcaacctgggacaaatgcgttgaagaaagggatgccacaaatagatcccccacccagatagtaaagatgaaaacaaatgagacagttgcccaagaagcatatgaatctgaagtccagcccctggaccaggtggctgctgaagaagtagaattgccagggaaagaggatcagtctgtctcaagcagtcagagtaaggctgtagcttctggacagactcagacaggagcagttacccatgacccccctcaggattccgttcctgtcagttcagtctctcttatcccaccaccaccgcctccgaaaaatgttgcccgaatgttggcgctagcattagctgagtccgcacagcaagcctcaactcagtcattgaagagaccagggacctctcaggctgggtatacaaattatggagacatagcggtggctacaactgaagataatctgtccagttcttactctgcagttgctctagataaggcctatttccaaaccgatcgaccagcagagcagttccacctccagaataatgcaccaggaaactgtgaccatcctctaccagagacaacagctactggggatcctacccattccaacacaactgaatctggggagcaacatcaccaagtagacttaacagggaatcagccacatcaagcatatttatctggggacccagaaaaggccagaattacttcagttcccttagactcagagaagtctgatgatcatgtaagtttccctgaagaccagtctgggaagaacagtatgccaactgtctccttcttggatcaggaccagtctccaccccgtttctacagtggagatcagcctccttcttatcttggtgcaagtgtggataaactccatcaccctttagaatttgcagacaaatctcccacacctcctaatttacctagcgataaaatctaccctccttctgggtcccccgaagagaataccagcacagccaccatgacttacatgacaactactccagcaacagcccaaatgagcaccaaggaagccagctgggatgtggctgaacaacccaccactgctgattttgctgctgccacacttcagcgcacgcacagaactaatcgtccccttccccctccgccttcccagagatctgcagagcagccaccagttgtggggcaggtacaagcagcaaccaatataggattaaataattcccacaaggttcaaggagtagttccagttccagagaggccacctgaacctcgagccatggatgaccctgcgtctgccttcatcagtgacagtggtgctgctgctgctcagtgtcccatggctacagctgtccagccaggcctgcctgagaaagtgcgggacggtgcccgggtcccgctgctgcacctgcgcgccgagtctgtccctgcgcatccctgtggctttcctgcaccactgccccccaccaggatgatggagagtaagatgattgctgccatacactccagcagtgcagatgccaccagcagttcaaattatcattcctttgtcactgcttcatccacctctgtggacgatgcattgcctttaccacttcctgtcccacaacctaagcatgcttctcagaaaacagtttactcctcctttgctaggcccgatgtcaccactgaaccctttggtccagataactgtttgcatttcaatatgactccaaactgccagtaccgtccccagagtgtacctccccatcacaataaattggagcagcaccaagtgtatggtgccaggtcagagccaccagcctccatgggtcttcgttataacacatatgtggccccaggaagaaacgcatctggacaccactccaagccatgcagccgggtcgagtatgtgtcttctttgagctcctctgtcaggaatacctgttaccccgaagacattccaccgtaccctaccatccggagagtgcagtctctccatgctccgccgtcttccatgattcgctctgttcccatttcacggacagaagttcccccagatgatgagccagcctactgcccaagacctctgtaccaatataagccatatcagtcctcccaggcccgctcagattatcatgtcactcagcttcagccttactttgagaatggccgggtccactacaggtatagcccatattccagttcttctagttcctattacagtccagatggggccctgtgtgatgtggatgcctatggcacagtccagttgagaccccttcaccgccttcccaatcgagactttgctttctacaatcctaggctgcaaggaaagagcttgtacagttatgctggtttggctccacgtccccgggccaacgtgactggctatttctctcccaacgaccataatgtagtcagcatgcctccggctgctgatgtgaagcacacctacacctcatgggatcttgaggacatggaaaaataccgcatgcagtccatccggagagagagccgtgctcggcagaaggtgaaagggcctgtcatgtcccaatatgataacatgaccccggcggtgcaggacgacttgggtgggatctatgtcatccatctgcgtagtaaatcagatcctgggaaaactggacttctctcagtggcagaaggaaaggagagccgccatgcagccaaggccatcagtcccgagggagaggaccgcttctataggaggcatcccgaggcagagatggacagagcccaccatcacggaggccatggtagcacgcagccggagaagccatccctgcctcagaagcagagcagcctgaggagcaggaagcttcctgacatgggctgcagtcttcctgagcacagggcacaccaagaagcaagccataggcagttctgtgagtcaaagaatgggcccccttatccccagggagctggccagttagattatgggtccaaagggattccagacacttctgagccagtcagctaccacaactctggagtaaaatatgctgcatccgggcaagaatctttaagactgaaccacaaagaggtaaggctctccaaagagatggagcgaccctgggttaggcagccttctgccccagagaaacactccagagactgctacaaggaggaagaacacctcactcagtcaatcgtcccaccccctaaaccagagaggagtcatagcctcaaactccatcatacccagaacgtggagagggaccccagtgtgctgtaccagtaccaaccacacggcaagcgccagagcagtgtgactgttgtgtcccagtatgataacctggaagattaccactccctgcctcagcaccagcgaggagtctttggagggggcggcatggggacgtatgtgccccctggctttccccatccacagagcaggacctatgctacagcgttgggtcaaggggccttcctgcccgcagagttgtccttgcagcatcctgaaacacagatccatgcagaatgagccctgcgagcaatagagttgaagcagcctctgctgga

SEQ ID NO: 175804 - DNA, 2545 bp, Homo sapiens
  Payload ID: 14521
  Gene Symbol: ARHGAP33
  Gene Name: Rho GTPase activating protein 33
  ENST ID: ENST00000007510
  CDS Start-End: 58-2304
acgagaacggcgagcgaggggtcgagcgcggccggggcctgaggaggctacgcgaccatggtggcacgcagcactgacagcctggatggcccaggggagggctcggtgcagcctctacccactgctggggggcccagtgtgaaggggaagcctgggaagaggctctcagctcctcgaggccccttcccgcggctggctgactgcgcccatttccactacgagaacgttgactttggccacattcagctcctgctgtctccagaccgtgaagggcccagcctctctggagagaatgagctggtgttcggggtgcaggtgacctgtcagggccgttcctggccggttctccggagttacgatgactttcgttccctggatgcccacctccaccggtgcatatttgaccggaggttctcctgccttccggagcttcccccgccccccgagggtgccagggctgcccagatgctggtgccactgctgctgcagtacctggagacactgtcaggactggtggacagtaacctcaactgcgggcctgtgctcacctggatggagctggacaatcacggccggcgactgctcctcagtgaggaggcgtcactcaatatccctgcagtggcggccgcccatgtgatcaaacggtatacagcccaggcgccagatgagctgtcctttgaggtgggagacattgtctcggtgatcgacatgccacccacagaggatcggagctggtggcggggcaagcgaggcttccaggtcgggttcttccccagtgagtgtgtggaactcttcacagagcggccaggtccgggcctgaaggcggatgccgatggccccccatgtggcatcccggctccccagggtatctcgtctctgacctcagctgtgccacggcctcgtgggaagctggccggcctgctccgcaccttcatgcgctcccgcccttctcggcagcggctgcggcagcggggaatcctgcgacagagggtgtttggctgcgatcttggcgagcacctcagcaactcaggccaggatgtgccccaggtgctgcgctgctgctccgagttcattgaggcccacggggtggtggatgggatctaccggctctcaggcgtgtcttccaacatccagaggcttcggcacgagtttgacagtgagaggatcccggagctgtctggccctgcattcctgcaggacatccacagcgtgtcctccctctgcaagctctacttccgagagcttccgaaccctctgctcacctaccagctctatgggaagttcagtgaggccatgtcagtgcctggggaggaggagcgtctggtgcgggtgcacgatgtcatccagcagctgcccccaccacattacaggaccctggagtacctgctgaggcacctggcccgcatggcgagacacagtgccaacaccagcatgcatgcccgcaacctggccattgtctgggcacccaacctgctacggtccatggagctggagtcagtgggaatgggtggcgcggcggcgttccgggaagttcgggtgcagtcggtggtggtggagtttctgctcacccatgtggacgtcctgttcagcgacaccttcacctccgccggcctcgaccctgcaggccgctgcctgctccccaggcccaagtcccttgcgggcagctgcccctccacccgcctgctgacgctggaggaagcccaggcacgcacccagggccggctggggacgcccacggagcccacaactcccaaggccccggcctcacctgcggaaaggaggaaaggggagagaggggagaagcagcggaagccagggggcagcagctggaagacgttctttgcactgggccggggccccagtgtccctcgaaagaagcccctgccctggctggggggcacccgtgccccaccgcagccttcaggcagcagacccgacaccgtcacactgagatctgccaagagcgaggagtctctgtcatcgcaggccagcggggctggcctccagaggctgcacaggctgcggcgaccccactccagcagcgacgctttccctgtgggcccagcacctgctggctcctgcgagagcctgtcctcgtcctcctcctccgagtcctcctcctctgagtcctcctcttcctcctctgagtcctcagcagctgggctgggggcactctctgggtctccctcacaccgtacctcagcctggctagatgatggtgatgagctggacttcagcccaccccgttaccccactcccagctggtccctccactctgagggccagacccgaagctactgctgagcaccagctgggaggggccgtccttccttcccttcaccctcactggatcttggcccaaccaaatcccttgttttgtattttcttgaaccccgaccactaccccaggtttctaactttgtaacttgcttctgatgtgggtccctaacctataatctcagcttccctaccctggactgaagggtctgcccatccccccaccaccctccatcctgggggccctcgcacaaatctggggtgggag

SEQ ID NO: 175805 - DNA, 3858 bp, Homo sapiens
  Payload ID: 14521
  Gene Symbol: ARHGAP33
  Gene Name: Rho GTPase activating protein 33
  Uniprot ID: O14559
  ENST ID: ENST00000314737
  CDS Start-End: 85-3465
tgtgtcgccatggcggcggcagcggcgacgagaacggcgagcgaggggtcgagcgcggccggggcctgaggaggctacgcgaccatggtggcacgcagcactgacagcctggatggcccaggggagggctcggtgcagcctctacccactgctggggggcccagtgtgaaggggaagcctgggaagaggctctcagctcctcgaggccccttcccgcggctggctgactgcgcccatttccactacgagaacgttgactttggccacattcagctcctgctgtctccagaccgtgaagggcccagcctctctggagagaatgagctggtgttcggggtgcaggtgacctgtcagggccgttcctggccggttctccggagttacgatgactttcgttccctggatgcccacctccaccggtgcatatttgaccggaggttctcctgccttccggagcttcccccgccccccgagggtgccagggctgcccagatgctggtgccactgctgctgcagtacctggagacactgtcaggactggtggacagtaacctcaactgcgggcctgtgctcacctggatggagctggacaatcacggccggcgactgctcctcagtgaggaggcgtcactcaatatccctgcagtggcggccgcccatgtgatcaaacggtatacagcccaggcgccagatgagctgtcctttgaggtgggagacattgtctcggtgatcgacatgccacccacagaggatcggagctggtggcggggcaagcgaggcttccaggtcgggttcttccccagtgagtgtgtggaactcttcacagagcggccaggtccgggcctgaaggcggatgccgatggccccccatgtggcatcccggctccccagggtatctcgtctctgacctcagctgtgccacggcctcgtgggaagctggccggcctgctccgcaccttcatgcgctcccgcccttctcggcagcggctgcggcagcggggaatcctgcgacagagggtgtttggctgcgatcttggcgagcacctcagcaactcaggccaggatgtgccccaggtgctgcgctgctgctccgagttcattgaggcccacggggtggtggatgggatctaccggctctcaggcgtgtcttccaacatccagaggcttcggcacgagtttgacagtgagaggatcccggagctgtctggccctgcattcctgcaggacatccacagcgtgtcctccctctgcaagctctacttccgagagcttccgaaccctctgctcacctaccagctctatgggaagttcagtgaggccatgtcagtgcctggggaggaggagcgtctggtgcgggtgcacgatgtcatccagcagctgcccccaccacattacaggaccctggagtacctgctgaggcacctggcccgcatggcgagacacagtgccaacaccagcatgcatgcccgcaacctggccattgtctgggcacccaacctgctacggtccatggagctggagtcagtgggaatgggtggcgcggcggcgttccgggaagttcgggtgcagtcggtggtggtggagtttctgctcacccatgtggacgtcctgttcagcgacaccttcacctccgccggcctcgaccctgcaggccgctgcctgctccccaggcccaagtcccttgcgggcagctgcccctccacccgcctgctgacgctggaggaagcccaggcacgcacccagggccggctggggacgcccacggagcccacaactcccaaggccccggcctcacctgcggaaaggaggaaaggggagagaggggagaagcagcggaagccagggggcagcagctggaagacgttctttgcactgggccggggccccagtgtccctcgaaagaagcccctgccctggctggggggcacccgtgccccaccgcagccttcaggcagcagacccgacaccgtcacactgagatctgccaagagcgaggagtctctgtcatcgcaggccagcggggctgaactgctgggggctgggggagcacctgcctcagccaccccaacaccagctctcagccccggccggagcctgcgcccccatctcatacccctgctgctgcgaggagccgaggccccgctgactgacgcctgccagcaggagatgtgcagcaagctccggggagcccagggcccactcggtcctgatatggagtcaccactgccaccccctcccctgtctctcctgcgccctgggggtgccccacccccgccccctaagaacccagcacgcctcatggccctggccctggctgagcgggctcagcaggtggccgagcaacagagccagcaggagtgtgggggcaccccacctgcttcccaatcccccttccaccgctcgctgtctctggaggtgggcggggagcccctggggacctcagggagtgggccacctcccaactccctagcacacccgggtgcctgggtcccgggacccccaccctacttaccaaggcaacaaagtgatgggagcctgctgaggagccagcggcccatggggacctcaaggaggggactccgaggccctgcccaggtcagtgcccagctcagggcaggtggcgggggcagggatgcgccagaggcagcagcccagtccccatgttctgtcccctcacaggttcctacccccggcttcttctccccagcccccagggagtgcctgccacccttcctcggggtccccaagccaggcttgtaccccctgggccccccatccttccagcccagttccccagccccagtctggaggagctctctgggcccccctgcaccactcgacaggggagagaacctgtactatgagatcggggcaagtgaggggtccccctattctggccccacccgctcctggagtccctttcgctccatgccccccgacaggctcaatgcctcctacggcatgcttggccaatcacccccactccacaggtcccccgacttcctgctcagctacccgccagccccctcctgctttccccctgaccaccttggctactcagccccccagcaccctgctcggcgccctacaccgcctgagcccctctacgtcaacctagctctagggcccaggggtccctcacctgcctcttcctcctcctcttcccctcctgcccacccccgaagccgttcagatcccggtcccccagtcccccgccttccccagaaacaacgggcaccctggggaccccgtacccctcatagggtgccgggtccctggggccctcctgagcctctcctgctctacagggcagccccgccagcctacggaagggggggcgagctccaccgagggtccttgtacagaaatggagggcaaagaggggagggggctggtcccccacccccttaccccactcccagctggtccctccactctgagggccagacccgaagctactgctgagcaccagctgggaggggccgtccttccttcccttcaccctcactggatcttggcccaaccaaatcccttgttttgtattttcttgaaccccgaccactaccccaggtttctaactttgtaacttgcttctgatgtgggtccctaacctataatctcagcttccctaccctggactgaagggtctgcccatccccccaccaccctccatcctgggggccctcgcacaaatctggggtgggaggggctaggctgaccccatcctcctctccctccaggagcccccagcatgtcctgacctgtgcacggggatggggggacaactcctacccttctttccccacatgccccactaaaccatctgacaacattaatgaataaaatggtgaaaatgtg

SEQ ID NO: 175806 - DNA, 4219 bp, Homo sapiens
  Payload ID: 14521
  Gene Symbol: ARHGAP33
  Gene Name: Rho GTPase activating protein 33
  Uniprot ID: O14559
  ENST ID: ENST00000378944
  CDS Start-End: 455-3826
acgggcagccgttaggggcggggtctgcagccgcccgcgcgcggctcgcgccctcccctttgtgtcgccatggcggcggcagcggcgacgagaacggcgagcgaggggtcgagcgcggccggggcctgaggaggctacgcgaccatggtggctctcagctcctcgaggccccttcccgcggctggctgactgcgcccatttccactacgagaacgttgactttggccacattcagctcctgctgtctccagaccgtgaagggcccagcctctctggagagaatgagctggtgttcggggtgcaggtgacctgtcagggccgttcctggccggttctccggagttacgatgactttcgttccctggatgcccacctccaccggtgcatatttgaccggaggttctcctgccttccggagcttcccccgccccccgagggtgccagggctgcccagatgctggtgccactgctgctgcagtacctggagacactgtcaggactggtggacagtaacctcaactgcgggcctgtgctcacctggatggagctggacaatcacggccggcgactgctcctcagtgaggaggcgtcactcaatatccctgcagtggcggccgcccatgtgatcaaacggtatacagcccaggcgccagatgagctgtcctttgaggtgggagacattgtctcggtgatcgacatgccacccacagaggatcggagctggtggcggggcaagcgaggcttccaggtcgggttcttccccagtgagtgtgtggaactcttcacagagcggccaggtccgggcctgaaggcggatgccgatggccccccatgtggcatcccggctccccagggtatctcgtctctgacctcagctgtgccacggcctcgtgggaagctggccggcctgctccgcaccttcatgcgctcccgcccttctcggcagcggctgcggcagcggggaatcctgcgacagagggtgtttggctgcgatcttggcgagcacctcagcaactcaggccaggatgtgccccaggtgctgcgctgctgctccgagttcattgaggcccacggggtggtggatgggatctaccggctctcaggcgtgtcttccaacatccagaggcttcggcacgagtttgacagtgagaggatcccggagctgtctggccctgcattcctgcaggacatccacagcgtgtcctccctctgcaagctctacttccgagagcttccgaaccctctgctcacctaccagctctatgggaagttcagtgaggccatgtcagtgcctggggaggaggagcgtctggtgcgggtgcacgatgtcatccagcagctgcccccaccacattacaggaccctggagtacctgctgaggcacctggcccgcatggcgagacacagtgccaacaccagcatgcatgcccgcaacctggccattgtctgggcacccaacctgctacggtccatggagctggagtcagtgggaatgggtggcgcggcggcgttccgggaagttcgggtgcagtcggtggtggtggagtttctgctcacccatgtggacgtcctgttcagcgacaccttcacctccgccggcctcgaccctgcaggccgctgcctgctccccaggcccaagtcccttgcgggcagctgcccctccacccgcctgctgacgctggaggaagcccaggcacgcacccagggccggctggggacgcccacggagcccacaactcccaaggccccggcctcacctgcggaaaggaggaaaggggagagaggggagaagcagcggaagccagggggcagcagctggaagacgttctttgcactgggccggggccccagtgtccctcgaaagaagcccctgccctggctggggggcacccgtgccccaccgcagccttcaggcagcagacccgacaccgtcacactgagatctgccaagagcgaggagtctctgtcatcgcaggccagcggggctggcctccagaggctgcacaggctgcggcgaccccactccagcagcgacgctttccctgtgggcccagcacctgctggctcctgcgagagcctgtcctcgtcctcctcctccgagtcctcctcctctgagtcctcctcttcctcctctgagtcctcagcagctgggctgggggcactctctgggtctccctcacaccgtacctcagcctggctagatgatggtgatgagctggacttcagcccaccccgctgcctggagggactccgggggctggactttgatcccttaaccttccgctgcagcagccccaccccaggggatcccgcacctcccgccagcccagcaccccccgcccctgcctctgccttcccacccagggtgaccccccaggccatctcgccccgggggcccaccagccccgcctcgcctgctgccctagacatctcagagcccctggctgtatcagtgccacccgctgtcctagaactgctgggggctgggggagcacctgcctcagccaccccaacaccagctctcagccccggccggagcctgcgcccccatctcatacccctgctgctgcgaggagccgaggccccgctgactgacgcctgccagcaggagatgtgcagcaagctccggggagcccagggcccactcggtcctgatatggagtcaccactgccaccccctcccctgtctctcctgcgccctgggggtgccccacccccgccccctaagaacccagcacgcctcatggccctggccctggctgagcgggctcagcaggtggccgagcaacagagccagcaggagtgtgggggcaccccacctgcttcccaatcccccttccaccgctcgctgtctctggaggtgggcggggagcccctggggacctcagggagtgggccacctcccaactccctagcacacccgggtgcctgggtcccgggacccccaccctacttaccaaggcaacaaagtgatgggagcctgctgaggagccagcggcccatggggacctcaaggaggggactccgaggccctgcccaggttcctacccccggcttcttctccccagcccccagggagtgcctgccacccttcctcggggtccccaagccaggcttgtaccccctgggccccccatccttccagcccagttccccagccccagtctggaggagctctctgggcccccctgcaccactcgacaggggagagaacctgtactatgagatcggggcaagtgaggggtccccctattctggccccacccgctcctggagtccctttcgctccatgccccccgacaggctcaatgcctcctacggcatgcttggccaatcacccccactccacaggtcccccgacttcctgctcagctacccgccagccccctcctgctttccccctgaccaccttggctactcagccccccagcaccctgctcggcgccctacaccgcctgagcccctctacgtcaacctagctctagggcccaggggtccctcacctgcctcttcctcctcctcttcccctcctgcccacccccgaagccgttcagatcccggtcccccagtcccccgccttccccagaaacaacgggcaccctggggaccccgtacccctcatagggtgccgggtccctggggccctcctgagcctctcctgctctacagggcagccccgccagcctacggaagggggggcgagctccaccgagggtccttgtacagaaatggagggcaaagaggggagggggctggtcccccacccccttaccccactcccagctggtccctccactctgagggccagacccgaagctactgctgagcaccagctgggaggggccgtccttccttcccttcaccctcactggatcttggcccaaccaaatcccttgttttgtattttcttgaaccccgaccactaccccaggtttctaactttgtaacttgcttctgatgtgggtccctaacctataatctcagcttccctaccctggactgaagggtctgcccatccccccaccaccctccatcctgggggccctcgcacaaatctggggtgggaggggctaggctgaccccatcctcctctccctccaggagcccccagcatgtcctgacctgtgcacggggatggggggacaactcctacccttctttccccacatgccccactaaaccatctgacaacattaatgaataaaatggtgaaaatgtg

SEQ ID NO: 175807 - DNA, 528 bp, Homo sapiens
  Payload ID: 14521
  Gene Symbol: ARHGAP33
  Gene Name: Rho GTPase activating protein 33
  ENST ID: ENST00000590893
  CDS Start-End: 117-413
agccgcccgcgcgcggctcgcgccctcccctttgtgtcgccatggcggcggcagcggcgacgagaacggcgagcgaggggtcgagcgcggccggggcctgaggaggctacgcgaccatggtggcacgcagcactgacagcctggatggcccaggggagggctcggtgcagcctctacccactgctggggggcccagtgtgaaggggaagcctgggaagaggctctcagctcctcgaggccccttcccgcggctggctgactgcgcccatttccactacgagaacgttgactttggccacattcagctcctgctgtctccagaccgtgaagggcccagcctctctggagagaatgagctggtgttcggggtgcaggtgacctgtcagtgtgaaatcatcaaggcagcgggatagagaaatatttaaatactgatgctggtgccactgctgctgcagtacctggagacactgtcaggactggtggacagtaacctcaactgcgggcctgtgctcacctggatggagctgg

SEQ ID NO: 175808 - DNA, 2983 bp, Homo sapiens
  Payload ID: 14521
  Gene Symbol: ARHGAP33
  Gene Name: Rho GTPase activating protein 33
  ENST ID: ENST00000587447
  CDS Start-End: 1-2590
gcacgatgtcatccagcagctgcccccaccacattacaggaccctggagtacctgctgaggcacctggcccgcatggcgagacacagtgccaacaccagcatgcatgcccgcaacctggccattgtctgggcacccaacctgctacggtccatggagctggagtcagtgggaatgggtggcgcggcggcgttccgggaagttcgggtgcagtcggtggtggtggagtttctgctcacccatgtggacgtcctgttcagcgacaccttcacctccgccggcctcgaccctgcaggccgctgcctgctccccaggcccaagtcccttgcgggcagctgcccctccacccgcctgctgacgctggaggaagcccaggcacgcacccagggccggctggggacgcccacggagcccacaactcccaaggccccggcctcacctgcggaaaggaggaaaggggagagaggggagaagcagcggaagccagggggcagcagctggaagacgttctttgcactgggccggggccccagtgtccctcgaaagaagcccctgccctggctggggggcacccgtgccccaccgcagccttcaggcagcagacccgacaccgtcacactgagatctgccaagagcgaggagtctctgtcatcgcaggccagcggggctggcctccagaggctgcacaggctgcggcgaccccactccagcagcgacgctttccctgtgggcccagcacctgctggctcctgcgagagcctgtcctcgtcctcctcctccgagtcctcctcctctgagtcctcctcttcctcctctgagtcctcagcagctgggctgggggcactctctgggtctccctcacaccgtacctcagcctggctagatgatggtgatgagctggacttcagcccaccccgctgcctggagggactccgggggctggactttgatcccttaaccttccgctgcagcagccccaccccaggggatcccgcacctcccgccagcccagcaccccccgcccctgcctctgccttcccacccagggtgaccccccaggccatctcgccccgggggcccaccagccccgcctcgcctgctgccctagacatctcagagcccctggctgtatcagtgccacccgctgtcctagaactgctgggggctgggggagcacctgcctcagccaccccaacaccagctctcagccccggccggagcctgcgcccccatctcatacccctgctgctgcgaggagccgaggccccgctgactgacgcctgccagcaggagatgtgcagcaagctccggggagcccagggcccactcggtcctgatatggagtcaccactgccaccccctcccctgtctctcctgcgccctgggggtgccccacccccgccccctaagaacccagcacgcctcatggccctggccctggctgagcgggctcagcaggtggccgagcaacagagccagcaggagtgtgggggcaccccacctgcttcccaatcccccttccaccgctcgctgtctctggaggtgggcggggagcccctggggacctcagggagtgggccacctcccaactccctagcacacccgggtgcctgggtcccgggacccccaccctacttaccaaggcaacaaagtgatgggagcctgctgaggagccagcggcccatggggacctcaaggaggggactccgaggccctgcccaggtcagtgcccagctcagggcaggtggcgggggcagggatgcgccagaggcagcagcccagtccccatgttctgtcccctcacaggttcctacccccggcttcttctccccagcccccagggagtgcctgccacccttcctcggggtccccaagccaggcttgtaccccctgggccccccatccttccagcccagttccccagccccagtctggaggagctctctgggcccccctgcaccactcgacaggggagagaacctgtactatgagatcggggcaagtgaggggtccccctattctggccccacccgctcctggagtccctttcgctccatgccccccgacaggctcaatgcctcctacggcatgcttggccaatcacccccactccacaggtcccccgacttcctgctcagctacccgccagccccctcctgctttccccctgaccaccttggctactcagccccccagcaccctgctcggcgccctacaccgcctgagcccctctacgtcaacctagctctagggcccaggggtccctcacctgcctcttcctcctcctcttcccctcctgcccacccccgaagccgttcagatcccggtcccccagtcccccgccttccccagaaacaacgggcaccctggggaccccgtacccctcatagggtgccgggtccctggggccctcctgagcctctcctgctctacagggcagccccgccagcctacggaagggggggcgagctccaccgagggtccttgtacagaaatggagggcaaagaggggagggggctggtcccccacccccttaccccactcccagctggtccctccactctgagggccagacccgaagctactgctgagcaccagctgggaggggccgtccttccttcccttcaccctcactggatcttggcccaaccaaatcccttgttttgtattttcttgaaccccgaccactaccccaggtttctaactttgtaacttgcttctgatgtgggtccctaacctataatctcagcttccctaccctggactgaagggtctgcccatccccccaccaccctccatcctgggggccctcgcacaaatctggggtgggaggggctaggctgaccccatcctcctctccctccaggagcccccagcatgtcctgacctgtgcacggggatggggggacaactcctacccttctttccccacatgccccactaaaccatctgacaacattaatgaataaaatggtgaaaatgtg

SEQ ID NO: 175809 - DNA, 2004 bp, Homo sapiens
  Payload ID: 14521
  Gene Symbol: ARHGAP33
  Gene Name: Rho GTPase activating protein 33
  ENST ID: ENST00000588248
  CDS Start-End: 1-1987
gcacgagtttgacagtgagaggatcccggagctgtctggccctgcattcctgcaggacatccacagcgtgtcctccctctgcaagctctacttccgagagcttccgaaccctctgctcacctaccagctctatgggaagttcagtgaggccatgtcagtgcctggggaggaggagcgtctggtgcgggtgcacgatgtcatccagcagctgcccccaccacattacaggaccctggagtacctgctgaggcacctggcccgcatggcgagacacagtgccaacaccagcatgcatgcccgcaacctggccattgtctgggcacccaacctgctacggtccatggagctggagtcagtgggaatgggtggcgcggcggcgttccgggaagttcgggtgcagtcggtggtggtggagtttctgctcacccatgtggacgtcctgttcagcgacaccttcacctccgccggcctcgaccctgcaggccgctgcctgctccccaggcccaagtcccttgcgggcagctgcccctccacccgcctgctgacgctggaggaagcccaggcacgcacccagggccggctggggacgcccacggagcccacaactcccaaggccccggcctcacctgcggaaaggaggaaaggggagagaggggagaagcagcggaagccagggggcagcagctggaagacgttctttgcactgggccggggccccagtgtccctcgaaagaagcccctgccctggctggggggcacccgtgccccaccgcagccttcaggcagcagacccgacaccgtcacactgagatctgccaagagcgaggagtctctgtcatcgcaggccagcggggctggcctccagaggctgcacaggctgcggcgaccccactccagcagcgacgctttccctgtgggcccagcacctgctggctcctgcgagagcctgtcctcgtcctcctcctccgagtcctcctcctctgagtcctcctcttcctcctctgagtcctcagcagctgggctgggggcactctctgggtctccctcacaccgtacctcagcctggctagatgatggtgatgagctggacttcagcccaccccgctgcctggagggactccgggggctggactttgatcccttaaccttccgctgcagcagccccaccccaggggatcccgcacctcccgccagcccagcaccccccgcccctgcctctgccttcccacccagggtgaccccccaggccatctcgccccgggggcccaccagccccgcctcgcctgctgccctagacatctcagagcccctggctgtatcagtgccacccgctgtcctagaactgctgggggctgggggagcacctgcctcagccaccccaacaccagctctcagccccggccggagcctgcgcccccatctcatacccctgctgctgcgaggagccgaggccccgctgactgacgcctgccagcaggagatgtgcagcaagctccggggagcccagggcccactcggtcctgatatggagtcaccactgccaccccctcccctgtctctcctgcgccctgggggtgccccacccccgccccctaagaacccagcacgcctcatggccctggccctggctgagcgggctcagcaggtggccgagcaacagagccagcaggagtgtgggggcaccccacctgcttcccaatcccccttccaccgctcgctgtctctggaggtgggcggggagcccctggggacctcagggagtgggccacctcccaactccctagcacacccgggtgcctgggtcccgggacccccaccctacttaccaaggcaacaaagtgatgggagcctgctgaggagccagcggcccatggggacctcaaggaggggactccgaggccctgcccaggagcccccagcatgtcctgacctgtgcacggggatggggggacaactcctacccttctttccccacatgccccactaaaccatctgacaacatta

SEQ ID NO: 175810 - DNA, 8889 bp, Homo sapiens
  Payload ID: 14522
  Gene Symbol: ARHGAP35
  Gene Name: Rho GTPase activating protein 35
  Uniprot ID: Q9NRY4
  ENST ID: ENST00000404338
  CDS Start-End: 1-4500
atgatgatggcaagaaagcaagatgtccgaattcccacctacaacatcagtgtggtgggattatctgggaccgagaaggaaaagggccagtgtgggattggaaagtcttgtttgtgcaaccgcttcgtgcgcccgagtgctgacgagtttcacttggaccatacctccgtcctcagcaccagtgactttggagggcgagtggtcaataatgaccactttctctactggggagaagttagccgctccctggaggattgtgtggaatgtaagatgcacattgtggagcagactgaatttattgatgatcagacttttcaacctcatcgaagcacggccctgcagccctatatcaagagagctgctgcgaccaagcttgcatcagctgaaaaactcatgtacttttgcactgaccagctggggctggagcaggactttgagcagaaacaaatgccagacggaaagctgctggttgatggttttcttcttggtattgatgttagcaggggcatgaataggaactttgatgaccagctcaagtttgtctccaatctctacaatcagcttgcaaaaacaaaaaagcccatagtggtggtcctgactaagtgtgacgaaggtgttgagcggtacattagagatgcacatacttttgccttaagcaaaaagaacctccaggttgtggagacctcagcgagatccaatgtaaacgtggacttggctttcagcaccttagtgcaactcattgataaaagtcggggaaagacaaaaatcattccttattttgaagctctcaagcagcagagtcagcagatagctacagcaaaagacaagtatgagtggctggtgagtcgcattgtgaaaaaccacaatgagaactggctgagtgtcagccgaaagatgcaggcctctccagaataccaggactatgtctacctggaagggactcagaaagccaagaagctgtttctacagcacatccaccgcctcaagcatgagcatatcgagcgtaggagaaagctgtacctggcagccctgccattagcttttgaagctcttatacctaatctagatgaaatagaccacctaagctgcataaaagccaaaaagctcttagaaaccaagccagaattcttgaagtggtttgttgtgcttgaagagaccccatgggatgccaccagtcacattgacaacatggaaaacgaacggattccctttgatttaatggataccgtccctgcagagcagctatacgaggcccacttagagaagctgaggaacgaaaggaaaagagttgagatgcgaagggcgtttaaagaaaacctggagacttctcctttcataactcccggaaagccttgggaagaggcccgtagttttattatgaatgaggatttctaccagtggctggaggaatctgtatacatggatatttatggcaaacaccaaaagcaaattatagataaagcaaaggaagaatttcaggagttgcttttggaatattcagaattgttttatgaactggagctggatgctaagcccagcaaggagaagatgggtgttattcaggatgttctgggagaggaacagcgatttaaagcattacaaaagctccaagcagagcgtgatgcccttattctgaaacacattcattttgtgtaccacccaacaaaggagacatgccccagctgcccagcttgtgtggacgctaagattgagcacttgattagttctcggtttatccggccgtctgaccggaatcagaaaaattcactctctgaccctaacattgatagaatcaacttggttatattgggcaaagacggccttgcccgagagttggccaatgagattcgagctctttgtacaaatgatgacaagtatgtgatagatggtaaaatgtatgagctttccctgaggccaatagaggggaatgtcaggcttcctgtgaactctttccagacgccaacatttcagccccacggctgtctctgcctttacaattcaaaggaatcgctatcctatgtagtggaaagtatagagaagagtagagagtccacgctgggccggcgggataatcatttagtccatctcccccttacattaattttggttaacaagagaggagacaccagtggagagactctgcatagcttaatacagcaaggtcaacaaattgctagcaaacttcagtgtgtctttctcgaccctgcttctgctggcattggttacggacgcaacattaatgaaaagcaaatcagtcaagttttgaagggactcctggactctaagcgtaacttaaacctggtcagttctactgctagcatcaaagatttggctgatgttgatctgcgaattgttatgtgtctgatgtgtggagatccttttagtgcagatgacatactttttcctgtccttcagtcccaaacctgtaaatcttcccattgtggaagcaacaactctgttttacttgaactaccaatcggactgcacaagaagcggattgaactgtctgttctttcataccattcctcctttagcatcagaaagagccggttggttcatgggtacattgttttttattcagccaaacgtaaggcctctttggctatgttacgtgcctttctttgtgaagtgcaggatattatccctattcagcttgtagcactcactgatggcgctgtagatgtcctggacaatgacttaagtagggaacagctaactgagggggaggagattgctcaagaaattgacggaaggttcacaagcatcccctgtagccaaccccagcataaacttgagatctttcacccattttttaaagatgtggtggaaaaaaagaacataatcgaggctactcatatgtacgataatgctgccgaggcctgtagcaccaccgaagaggtgtttaactccccccgggcaggatcaccgctctgcaactcaaacctgcaggattcagaagaagatatcgagccatcttacagcctgtttcgagaagacacatcactgccttctctgtccaaagaccattctaagctctctatggaactggagggaaatgatgggctgtctttcattatgagcaattttgagagtaaactgaacaacaaagtacctccgccagtcaaaccaaagcctcctgtccattttgaaattacaaagggggatctatcttatttagaccaaggccatagggatggacagaggaagtctgtgtcttctagcccctggctgcctcaggatgggtttgatccttctgactatgctgaacccatggatgctgtggtgaagccaaggaatgaagaagaaaacatatactccgtgccccatgacagcacccaaggcaaaatcatcaccattcggaatatcaacaaagcccagtccaacggcagcgggaatggttctgacagtgaaatggacaccagctctctagagcgagggcgcaaggtttccatcgtgagcaagccagtgctgtacaggacgagatgcacccggctggggcggtttgctagttaccggaccagcttcagcgtggggagtgatgatgagctggggcccatccggaagaaagaggaggatcaggcatcccagggttataaaggggacaatgctgtcattccatacgaaacagacgaagacccgcggaggaggaatattcttcgcagcctaaggaggaacactaagaaaccaaagcccaaaccccggccatccatcacaaaggcaacctgggagagtaactattttggggtgcccttaacaactgtcgtgactccagagaagccgatccccatttttattgaaagatgtattgagtacattgaagccacaggactgagcacggaaggcatctaccgggtcagcgggaacaagtctgagatggagagtctgcagagacagtttgatcaagaccacaacctggacctggcagagaaagactttacggtgaataccgtggctggtgccatgaagagctttttctcagaactgcctgaccccctggtcccgtataacatgcagatcgacttggtggaagcacacaaaatcaacgaccgggagcagaagttgcatgcccttaaggaggtattaaagaaatttccaaaggaaaaccacgaagtcttcaagtatgtcatctctcacctaaacaaggtcagccacaacaacaaggtgaatctcatgaccagcgagaacctctccatctgcttctggcccaccttgatgagacctgatttcagcactatggacgccctcacagccacgcgcacctaccagacaatcattgaactctttatccagcagtgccccttcttcttctacaatcggcccatcaccgagccccccggcgccaggcccagctccccctctgccgtggcttccaccgtccccttcctcacttccacgcctgtcacaagtcagccgtcgcccccacagtcgcctccacccaccccccagtccccaatgcagccactgcttccctcccagcttcaagccgaacacacgctgtgagccaccaagacctggggcgacaggagaaccggtcctctctctgacggggtggcatttggccttgaacaaaaccaagtccactggggacagaggcaggggcaagtggctctccccattaccttctcaagacctcagtgggagcaccagccaatggtaccatcggctgggctgccaggtaccctgggcctggcgctgcagacctgagctggcttggacccatttgaggactgaactaggcaggcaatggctccagtgccctccctctgttccctggaccaccaccccacgtagctgctcacaccagcctccgggtgcctccctctgcttgtacagagcccatggtcgggacagtgccctggcctttgccggggaggaggatgctctgagattcagggtggggctggcaacccctgaagagaacacttcctgttggtctgtctcttcccaccttccatctgcacacacccccaaggtaagggtacagcccggctggcggcctccttgggaacgtgtaggccacggctctgccaccactaggtacctgctgagggcgctggctctgcagatcagaacaacggaggatagctttgtgcctggacccagagagtgtgggactccccgcttcatccccaccgtcccactccacagccttcccgaaacattccctggcaaacaaaggaacactaggagaaaaaatggaaaaacccttccagtaattaaaaaggaagaaaccacagaaagaaaactacagacctcaagattccactctgtgcccgcctctgccgggagggagggaggcacacaggtggagctgaccctcgtctttgtggcagcaaaaccaggatgcctggagctgtggcctgagggcctgctggggtcccactcacccacttaggtctagtcgctagatcccccgttttcccaagaagagggttcgagcccttggtggggacagctggggagatggcagtgcaggctggaacctgggctgccccagaacacagtccattacgatagaaacactaattgagcatgtgcgtggggtgggggtgtgtgtgcacatgtgagtgtgagtgtgtgtgggcgcttggtggggggttggggacagctggaaggtgccaggtgcacttggggttggggttggtgtgttgggtgttgaagtggaatcgtttcatcccagccatggaggccaccagcaggagtgttcatggggatgtgggcgaggtggggcactttgaaggaatggcggtctgctggtgccctcgaaggggcatccttcctggtcttcgctgacccagaggcgctgtgcctgcatatcatccaccaccaccctagcccagccttcccactgccccaggaaaagctcttctcctggccacctctgccccccagcacctcaaacttgcatggctgggctgtggcctctgcggccaggaagcctgacactaggcaccccccaggcgagagctagtggggtgcagagggccccatgccagacagcccttggggctcgttgcactttaagaaataggatctgtggtgtattccagggggcctgatggacacctttcccgggcgtctgcagctgccctgcccgtgcccgcctgcagtggttggagacgggagtggcccttcggctcccgagctccctctggggacggctggctcactgtctccagttctcaatggccaacgaaggtgcttggaaacacctaaccttgcaagttttaccgccttttgaggaacacaaatcggagaacaaacccagggttcaggcgtgttttctgtgaatgttggatgatgaatttttgtctcttctggtggagctgtgcctggccctgtaggcccagggttggctggaaggtgacatctgtgtttcgttttagctgaggttggcagaaacgttcccaaactcccccagccctggaccccagcagatgaggaaacggccccatttactgaccccgcccccttttcgaggttatgctcacctggtcagctcctcacgtaattgggggtggagggaaagcatggtggtgccctgggccgtccctgtgtgaacgcaggcaaaagcagcccagtccccctcactgcttgagctaacactgccacctcttttgtgtgagcacaaaagccacgtcccaagccacctggcccgattccacagatgtatgtgcggccagtgacttccccaggagtgtggagggggtggtgaggaggagcacctgggctctctacccctctcctcacagaagtacctgaaactaggtctggggcactcccaatgcagcgccttgtcagccaaggtgggcaggcagggactgtggcagcttatgtccaaagggagcccccatgcacaggaagccacagggttcctcttgtttcccccgctaacttcagcctctcatctgctgctccgggctgagggactagaggacatctcggtcgtttgaggggcatggccagtcgtggcaggccggccttcagcgtccggtcagggaagcgtgcagcccaaatgggcacttgcatgggagccacagaggagcgtccctggggattgttgggaccatgctgcccccactcccgcttttgttggggctctaagttctggaaggtgtgtgcacagagggtgctcatgggactcgcatgcagctctcagcactgggtgggagggcgttggcttgtccagaatggggacgtggggcagccacccctgcccagcgagagcgcagacaccgtgtgaggggacagcagcccttggtgcaaagccagagactgatcctggctctgacggctgaagagggaagacccaaggctgggtggcgtggctcgtgaatccacttagaattcttggcttgtgtcgcatactgggtgtcacggcacacatttactctgcattgtccccgtctttcccatcgcctagcgtttggggaggaacagggagagagcttcggggcgtctgtctccgtgctctcctgcctccaccgccttggttttgcttcctgctggaggcagggcacctgctgcgacccagattcttctgcaggatgtgtctgtctttgtcacggtggacagagggtgacatcataggagcagctcgctggccagaaggggatgggggcatccctgtgcctcactcagctcctgctgctcttagggaaaggaggcctgggtcaagccagcatccccttggtaaagacccccgcaggccaccaggcattctggacacgcacacacacacacacacacacacacacacacaaaacttcacagcaggccagctgcagtgacttgtcatcaagagtcacctcagctgcgcccccctcccatcctttcctatgagaagccactgctttgggggcgccggctagaaaaagtagggtgcggtggccaggagggcccctgccgcgcggggggctgggtctggttgagtcgctgctttcccgagggcagcgcagggatccggggaagctgcggcagggagcgggcgccggcttcgtggctctgaggtgtaacgggggtgggctccctccctcggaggacatcgtctgtgtccaggtcagaaagtggcccaggaagggggcagtttctgtcgcgggtccggtgggggcgcggccgcggtgcggtcggtgcagcgtggccaatgcgcggcgcgcgcgggggacagagcaggaggcggtctgtcacctcggccactgctgacctgggctggcctcccccagccctcccgtggcggagccggcagcgatgctacaggcctaagttattgtttgcataaaaagaatcatgttccctgtgtacatttaagaaaaaaacaaaaaaacggaaatgtcagaattgtatggaaataaaacttgtttgaaaatttggaatagtgctgctgccagcttatttttctggtacttgtattttcacatgttaaatgatctttatatatgttgaattaacaaatattttgagtttctgagaaaaaacaaaacatattaatggtattgaaatgtgttagtagtctggctgtgtgcccaaaattctgtttcgcagcaaaagtgaagacctgtatgtaaagaaagtataacaattatttctttgtattttaggggctttaaccggaacatcgtctagctggtgttaggaatgtttgcttaatttccagacttttttttaaaaacacatcgtgggttttttgaggctccaacctgattagtgcatggtcagccctcaatgaaggctgaggcatctctgactgaggtgtttttgtttggttttgttttttaaaatcatgtatttgctacaaagtattgtacttgtctcaatgggaatggtgtaaaaaacaaaaggccttatgtgatctgtatcatagttaataaatgaatcttgtaaaaaaccaaa

SEQ ID NO: 175811 - DNA, 2713 bp, Homo sapiens
  Payload ID: 14522
  Gene Symbol: ARHGAP35
  Gene Name: Rho GTPase activating protein 35
  ENST ID: ENST00000615647
  CDS Start-End: 1-2250
atgatgatggcaagaaagcaagatgtccgaattcccacctacaacatcagtgtggtgggattatctgggaccgagaaggaaaagggccagtgtgggattggaaagtcttgtttgtgcaaccgcttcgtgcgcccgagtgctgacgagtttcacttggaccatacctccgtcctcagcaccagtgactttggagggcgagtggtcaataatgaccactttctctactggggagaagttagccgctccctggaggattgtgtggaatgtaagatgcacattgtggagcagactgaatttattgatgatcagacttttcaacctcatcgaagcacggccctgcagccctatatcaagagagctgctgcgaccaagcttgcatcagctgaaaaactcatgtacttttgcactgaccagctggggctggagcaggactttgagcagaaacaaatgccagacggaaagctgctggttgatggttttcttcttggtattgatgttagcaggggcatgaataggaactttgatgaccagctcaagtttgtctccaatctctacaatcagcttgcaaaaacaaaaaagcccatagtggtggtcctgactaagtgtgacgaaggtgttgagcggtacattagagatgcacatacttttgccttaagcaaaaagaacctccaggttgtggagacctcagcgagatccaatgtaaacgtggacttggctttcagcaccttagtgcaactcattgataaaagtcggggaaagacaaaaatcattccttattttgaagctctcaagcagcagagtcagcagatagctacagcaaaagacaagtatgagtggctggtgagtcgcattgtgaaaaaccacaatgagaactggctgagtgtcagccgaaagatgcaggcctctccagaataccaggactatgtctacctggaagggactcagaaagccaagaagctgtttctacagcacatccaccgcctcaagcatgagcatatcgagcgtaggagaaagctgtacctggcagccctgccattagcttttgaagctcttatacctaatctagatgaaatagaccacctaagctgcataaaagccaaaaagctcttagaaaccaagccagaattcttgaagtggtttgttgtgcttgaagagaccccatgggatgccaccagtcacattgacaacatggaaaacgaacggattccctttgatttaatggataccgtccctgcagagcagctatacgaggcccacttagagaagctgaggaacgaaaggaaaagagttgagatgcgaagggcgtttaaagaaaacctggagacttctcctttcataactcccggaaagccttgggaagaggcccgtagttttattatgaatgaggatttctaccagtggctggaggaatctgtatacatggatatttatggcaaacaccaaaagcaaattatagataaagcaaaggaagaatttcaggagttgcttttggaatattcagaattgttttatgaactggagctggatgctaagcccagcaaggagaagatgggtgttattcaggatgttctgggagaggaacagcgatttaaagcattacaaaagctccaagcagagcgtgatgcccttattctgaaacacattcattttgtgtaccacccaacaaaggagacatgccccagctgcccagcttgtgtggacgctaagattgagcacttgattagttctcggtttatccggccgtctgaccggaatcagaaaaattcactctctgaccctaacattgatagaatcaacttggttatattgggcaaagacggccttgcccgagagttggccaatgagattcgagctctttgtacaaatgatgacaagtatgtgatagatggtaaaatgtatgagctttccctgaggccaatagaggggaatgtcaggcttcctgtgaactctttccagacgccaacatttcagccccacggctgtctctgcctttacaattcaaaggaatcgctatcctatgtagtggaaagtatagagaagagtagagagtccacgctgggccggcgggataatcatttagtccatctcccccttacattaattttggttaacaagagaggagacaccagtggagagactctgcatagcttaatacagcaaggtcaacaaattgctagcaaacttcagtgtgtctttctcgaccctgcttctgctggcgctgcagacctgagctggcttggacccatttgaggactgaactaggcaggcaatggctccagtgccctccctctgttccctggaccaccaccccacgtagctgctcacaccagcctccgggtgcctccctctgcttgtacagagcccatggtcgggacagtgccctggcctttgccggggaggaggatgctctgagattcagggtggggctggcaacccctgaagagaacacttcctgttggtctgtctcttcccaccttccatctgcacacacccccaaggtaagggtacagcccggctggcggcctccttgggaacgtgtaggccacggctctgccaccactaggtacctgctgagggcgctggctctgcagatcagaacaacggaggatagctttgtgcctggacccagagagtgtgggactccccgcttcatccccaccgtcccactccacagccttcccgaaacattccctggcaaacaaaggaacactag

SEQ ID NO: 175812 - DNA, 7696 bp, Homo sapiens
  Payload ID: 14522
  Gene Symbol: ARHGAP35
  Gene Name: Rho GTPase activating protein 35
  Uniprot ID: Q9NRY4
  ENST ID: ENST00000614079
  CDS Start-End: 1-4500
atgatgatggcaagaaagcaagatgtccgaattcccacctacaacatcagtgtggtgggattatctgggaccgagaaggaaaagggccagtgtgggattggaaagtcttgtttgtgcaaccgcttcgtgcgcccgagtgctgacgagtttcacttggaccatacctccgtcctcagcaccagtgactttggagggcgagtggtcaataatgaccactttctctactggggagaagttagccgctccctggaggattgtgtggaatgtaagatgcacattgtggagcagactgaatttattgatgatcagacttttcaacctcatcgaagcacggccctgcagccctatatcaagagagctgctgcgaccaagcttgcatcagctgaaaaactcatgtacttttgcactgaccagctggggctggagcaggactttgagcagaaacaaatgccagacggaaagctgctggttgatggttttcttcttggtattgatgttagcaggggcatgaataggaactttgatgaccagctcaagtttgtctccaatctctacaatcagcttgcaaaaacaaaaaagcccatagtggtggtcctgactaagtgtgacgaaggtgttgagcggtacattagagatgcacatacttttgccttaagcaaaaagaacctccaggttgtggagacctcagcgagatccaatgtaaacgtggacttggctttcagcaccttagtgcaactcattgataaaagtcggggaaagacaaaaatcattccttattttgaagctctcaagcagcagagtcagcagatagctacagcaaaagacaagtatgagtggctggtgagtcgcattgtgaaaaaccacaatgagaactggctgagtgtcagccgaaagatgcaggcctctccagaataccaggactatgtctacctggaagggactcagaaagccaagaagctgtttctacagcacatccaccgcctcaagcatgagcatatcgagcgtaggagaaagctgtacctggcagccctgccattagcttttgaagctcttatacctaatctagatgaaatagaccacctaagctgcataaaagccaaaaagctcttagaaaccaagccagaattcttgaagtggtttgttgtgcttgaagagaccccatgggatgccaccagtcacattgacaacatggaaaacgaacggattccctttgatttaatggataccgtccctgcagagcagctatacgaggcccacttagagaagctgaggaacgaaaggaaaagagttgagatgcgaagggcgtttaaagaaaacctggagacttctcctttcataactcccggaaagccttgggaagaggcccgtagttttattatgaatgaggatttctaccagtggctggaggaatctgtatacatggatatttatggcaaacaccaaaagcaaattatagataaagcaaaggaagaatttcaggagttgcttttggaatattcagaattgttttatgaactggagctggatgctaagcccagcaaggagaagatgggtgttattcaggatgttctgggagaggaacagcgatttaaagcattacaaaagctccaagcagagcgtgatgcccttattctgaaacacattcattttgtgtaccacccaacaaaggagacatgccccagctgcccagcttgtgtggacgctaagattgagcacttgattagttctcggtttatccggccgtctgaccggaatcagaaaaattcactctctgaccctaacattgatagaatcaacttggttatattgggcaaagacggccttgcccgagagttggccaatgagattcgagctctttgtacaaatgatgacaagtatgtgatagatggtaaaatgtatgagctttccctgaggccaatagaggggaatgtcaggcttcctgtgaactctttccagacgccaacatttcagccccacggctgtctctgcctttacaattcaaaggaatcgctatcctatgtagtggaaagtatagagaagagtagagagtccacgctgggccggcgggataatcatttagtccatctcccccttacattaattttggttaacaagagaggagacaccagtggagagactctgcatagcttaatacagcaaggtcaacaaattgctagcaaacttcagtgtgtctttctcgaccctgcttctgctggcattggttacggacgcaacattaatgaaaagcaaatcagtcaagttttgaagggactcctggactctaagcgtaacttaaacctggtcagttctactgctagcatcaaagatttggctgatgttgatctgcgaattgttatgtgtctgatgtgtggagatccttttagtgcagatgacatactttttcctgtccttcagtcccaaacctgtaaatcttcccattgtggaagcaacaactctgttttacttgaactaccaatcggactgcacaagaagcggattgaactgtctgttctttcataccattcctcctttagcatcagaaagagccggttggttcatgggtacattgttttttattcagccaaacgtaaggcctctttggctatgttacgtgcctttctttgtgaagtgcaggatattatccctattcagcttgtagcactcactgatggcgctgtagatgtcctggacaatgacttaagtagggaacagctaactgagggggaggagattgctcaagaaattgacggaaggttcacaagcatcccctgtagccaaccccagcataaacttgagatctttcacccattttttaaagatgtggtggaaaaaaagaacataatcgaggctactcatatgtacgataatgctgccgaggcctgtagcaccaccgaagaggtgtttaactccccccgggcaggatcaccgctctgcaactcaaacctgcaggattcagaagaagatatcgagccatcttacagcctgtttcgagaagacacatcactgccttctctgtccaaagaccattctaagctctctatggaactggagggaaatgatgggctgtctttcattatgagcaattttgagagtaaactgaacaacaaagtacctccgccagtcaaaccaaagcctcctgtccattttgaaattacaaagggggatctatcttatttagaccaaggccatagggatggacagaggaagtctgtgtcttctagcccctggctgcctcaggatgggtttgatccttctgactatgctgaacccatggatgctgtggtgaagccaaggaatgaagaagaaaacatatactccgtgccccatgacagcacccaaggcaaaatcatcaccattcggaatatcaacaaagcccagtccaacggcagcgggaatggttctgacagtgaaatggacaccagctctctagagcgagggcgcaaggtttccatcgtgagcaagccagtgctgtacaggacgagatgcacccggctggggcggtttgctagttaccggaccagcttcagcgtggggagtgatgatgagctggggcccatccggaagaaagaggaggatcaggcatcccagggttataaaggggacaatgctgtcattccatacgaaacagacgaagacccgcggaggaggaatattcttcgcagcctaaggaggaacactaagaaaccaaagcccaaaccccggccatccatcacaaaggcaacctgggagagtaactattttggggtgcccttaacaactgtcgtgactccagagaagccgatccccatttttattgaaagatgtattgagtacattgaagccacaggactgagcacggaaggcatctaccgggtcagcgggaacaagtctgagatggagagtctgcagagacagtttgatcaagaccacaacctggacctggcagagaaagactttacggtgaataccgtggctggtgccatgaagagctttttctcagaactgcctgaccccctggtcccgtataacatgcagatcgacttggtggaagcacacaaaatcaacgaccgggagcagaagttgcatgcccttaaggaggtattaaagaaatttccaaaggaaaaccacgaagtcttcaagtatgtcatctctcacctaaacaaggtcagccacaacaacaaggtgaatctcatgaccagcgagaacctctccatctgcttctggcccaccttgatgagacctgatttcagcactatggacgccctcacagccacgcgcacctaccagacaatcattgaactctttatccagcagtgccccttcttcttctacaatcggcccatcaccgagccccccggcgccaggcccagctccccctctgccgtggcttccaccgtccccttcctcacttccacgcctgtcacaagtcagccgtcgcccccacagtcgcctccacccaccccccagtccccaatgcagccactgcttccctcccagcttcaagccgaacacacgctgtgagccaccaagacctggggcgacaggagaaccggtcctctctctgacggggtggcatttggccttgaacaaaaccaagtccactggggacagaggcaggggcaagtggctctccccattaccttctcaagacctcagtgggagcaccagccaatggtaccatcggctgggctgccaggtaccctgggcctggcgctgcagacctgagctggcttggacccatttgaggactgaactaggcaggcaatggctccagtgccctccctctgttccctggaccaccaccccacgtagctgctcacaccagcctccgggtgcctccctctgcttgtacagagcccatggtcgggacagtgccctggcctttgccggggaggaggatgctctgagattcagggtggggctggcaacccctgaagagaacacttcctgttggtctgtctcttcccaccttccatctgcacacacccccaaggtaagggtacagcccggctggcggcctccttgggaacgtgtaggccacggctctgccaccactaggtacctgctgagggcgctggctctgcagatcagaacaacggaggatagctttgtgcctggacccagagagtgtgggactccccgcttcatccccaccgtcccactccacagccttcccgaaacattccctggcaaacaaaggaacactaggagaaaaaatggaaaaacccttccagtaattaaaaaggaagaaaccacagaaagaaaactacagacctcaagattccactctgtgcccgcctctgccgggagggagggaggcacacaggtggagctgaccctcgtctttgtggcagcaaaaccaggatgcctggagctgtggcctgagggcctgctggggtcccactcacccacttaggtctagtcgctagatcccccgttttcccaagaagagggttcgagcccttggtggggacagctggggagatggcagtgcaggctggaacctgggctgccccagaacacagtccattacgatagaaacactaagcaccccccaggcgagagctagtggggtgcagagggccccatgccagacagcccttggggctcgttgcactttaagaaataggatctgtggtgtattccagggggcctgatggacacctttcccgggcgtctgcagctgccctgcccgtgcccgcctgcagtggttggagacgggagtggcccttcggctcccgagctccctctggggacggctggctcactgtctccagttctcaatggccaacgaaggtgcttggaaacacctaaccttgcaagttttaccgccttttgaggaacacaaatcggagaacaaacccagggttcaggcgtgttttctgtgaatgttggatgatgaatttttgtctcttctggtggagctgtgcctggccctgtaggcccagggttggctggaaggtgacatctgtgtttcgttttagctgaggttggcagaaacgttcccaaactcccccagccctggaccccagcagatgaggaaacggccccatttactgaccccgcccccttttcgaggttatgctcacctggtcagctcctcacgtaattgggggtggagggaaagcatggtggtgccctgggccgtccctgtgtgaacgcaggcaaaagcagcccagtccccctcactgcttgagctaacactgccacctcttttgtgtgagcacaaaagccacgtcccaagccacctggcccgattccacagatgtatgtgcggccagtgacttccccaggagtgtggagggggtggtgaggaggagcacctgggctctctacccctctcctcacagaagtacctgaaactaggtctggggcactcccaatgcagcgccttgtcagccaaggtgggcaggcagggactgtggcagcttatgtccaaagggagcccccatgcacaggaagccacagggttcctcttgtttcccccgctaacttcagcctctcatctgctgctccgggctgagggactagaggacatctcggtcgtttgaggggcatggccagtcgtggcaggccggccttcagcgtccggtcagggaagcgtgcagcccaaatgggcacttgcatgggagccacagaggagcgtccctggggattgttgggaccatgctgcccccactcccgcttttgttggggctctaagttctggaaggtgtgtgcacagagggtgctcatgggactcgcatgcagctctcagcactgggtgggagggcgttggcttgtccagaatggggacgtggggcagccacccctgcccagcgagagcgcagacaccgtgtgaggggacagcagcccttggtgcaaagccagagactgatcctggctctgacggctgaagagggaagacccaaggctgggtggcgtggctcgtgaatccacttagaattcttggcttgtgtcgcatactgggtgtcacggcacacatttactctgcattgtccccgtctttcccatcgcctagcgtttggggaggaacagggagagagcttcggggcgtctgtctccgtgctctcctgcctccaccgccttggttttgcttcctgctggaggcagggcacctgctgcgacccagattcttctgcaggatgtgtctgtctttgtcacggtggacagagggtgacatcataggagcagctcgctggccagaaggggatgggggcatccctgtgcctcactcagctcctgctgctcttagggaaaggaggcctgggtcaagccagcatccccttggtaaagacccccgcaggccaccaggcattctggacacgcacacacacacacacacacacacacacacacaaaacttcacagcaggccagctgcagtgacttgtcatcaagagtcacctcagctgcgcccccctcccatcctttcctatgagaagccactgctttgggggcgccggctagaaaaagtagggtgcggtggccaggagggcccctgccgcgcggggggctgggtctggttgagtcgctgctttcccgagggcagcgcagggatccggggaagctgcggcagggagcgggcgccggcttcgtggctctgaggtgtaacgggggtgggctccctccctcggaggacatcgtctgtgtccaggtcagaaagtggcccaggaagggggcagtttctgtcgcgggtccggtgggggcgcggccgc

SEQ ID NO: 175813 - DNA, 3083 bp, Homo sapiens
  Payload ID: 14523
  Gene Symbol: ARHGAP36
  Gene Name: Rho GTPase activating protein 36
  Uniprot ID: Q6ZRI8
  ENST ID: ENST00000276211
  CDS Start-End: 346-1989
atgctcgaggtgtccggtgaccgaaacactcttagctgggtgcagggtgcggctcagggcgtggtcaccgggggctacttagggccgccggtgcgggggacgacgcaaaggttaactgcgagctgccgggcactcagcgcgggtcatggcgtggatactggactgccttttcgcctcggcctttgagccccgcccccgccgtgcaaaaacaaccagaggctgctctgcttgagggtgaagccgcctcccagttttccctccccctctacccccacccccatagttctctccaccaggtccagtgacaattggatgatgcagccttgataatcatccgattccagaatgggtggctgcattccttttctgaaggcagcaagggcactgtgccccagaatcatgccccctttgctgttgttgtccgccttcatttttttagtgagtgtcttgggaggagccccaggacacaaccccgaccgcaggacgaagatggtatcgatacacagcctctctgagctggagcgtctgaagctgcaagagactgcttaccacgaactcgtggccagacatttcctctccgaattcaaacctgacagagctctgcctattgaccgtccgaacaccttggataagtggtttctgattttgagaggacagcagagggctgtatcacacaagacatttggcattagcctggaagaggtcctggtgaacgagtttacccgccgcaagcatcttgaactgacagccacgatgcaggttgaagaagccaccggtcaggctgcgggccgtcgtcggggaaacgtggtgcgaagggtgtttggccgcatccggcgctttttcagtcgcaggcggaatgagcccaccttgccccgggagttcactcgccgtgggcgtcgaggtgcagtgtctgtggatagtctggctgagctggaagacggagccctgctgctgcagaccctgcagctttcaaaaatttcctttccaattggccaacgacttctgggatccaaaaggaagatgagtctcaatccgattgcgaaacaaatcccccaggttgttgaggcttgctgccaattcattgaaaaacatggcttaagcgcagtggggatttttacccttgaatactccgtgcagcgagtgcgtcagctccgtgaagaatttgatcaaggtctggatgtagtgctggatgacaatcagaatgtgcatgatgtggctgcactcctcaaggagtttttccgtgacatgaaggattctctgctgccagatgatctgtacatgtcattcctcctgacagcaactttaaagccccaggatcagctttctgccctgcagttgctggtctacctgatgccaccctgccacagtgataccctggagcgtctgctgaaggccctgcataaaatcactgagaactgcgaggactcaattggcattgatggacagttggtcccaggcaaccgtatgacttccactaacttggccttggtgtttggatctgctctcctgaaaaaaggaaagtttggcaagagagagtccaggaaaacaaagctggggattgatcactatgttgcttctgtcaatgtggtccgtgccatgattgataactgggatgtcctcttccaggtgcctccccatattcagaggcaggttgctaagcgcgtgtggaagtccagcccggaagcacttgattttatcagacgcaggaacttgaggaagatccagagtgcacgcataaagatggaagaggatgcactactttctgatccagtggaaacctctgctgaagcccgggctgctgtccttgctcaaagcaagccttctgatgaaggttcctctgaggagccagctgtgccttccggcactgcccgttcccatgacgatgaggaaggagcgggtaaccctcccattccggagcaagaccgcccattgctccgtgtgccccgggagaaggaggccaaaactggcgtcagctacttctttccttagatgtttttccttctataaggtgccagacaggggaaaagggtgggggtacatctgggatgtcacaggaaacattaaggagagagttgaaggtaaagatctgaaggtaagaaggagttccacctgatgctcgggtcaggatgagaattccaaacacactgccagccccttcactggggatgcttggtctcttctgctggtaaaagcagagatgtttctgtgtcatgcccaagctccccggtgctaccttgcctttctcttttacccctgatcttggctttctctctctctctgcagactttcctttaattgatgtgacatttgtggtaaacacctttcccagggaacctcacaaatcttgagatgctttcccttccccagatgggattgcatgatttccctgactttcctaccctcctccagagagctcagttggaaaggccctcaagaggcatgctagaacgttaggtcagcctactgacagctgacaaacaattaatgcgaaatcatgtcacaccaacccatagccgtgtccacgcagcaactccaccaccttaggatttccccctccaaattattcagaccaatggcttgccaaatggcctctcccaaaattctgtacagttttgctcaggtcacgccaacagggaaacctcaagtgtaggtctaattagtgtttctgggatccaaagttagaggaaaatttagattttattgcctggatctgctttaaagacaattggtgtttacaccctcttgtcagcaaaacagctagttaggtaaggacatatagttccaagtaggtaaagtcacttgattacaaatgttcttaactatcgtctctgtaattcctttatacaggacagtacaaaattgtgggacatgctctggtaacacacagatatgggttgcatatgatccagaattacagctgatattatggatgacaactgctaaggtccataaaatgaagactgtattgtattgagggatagaaattgatcatttaatgggtaacaactgctgagctcaaagatttgtgattgttaaaacttctctggcatttaatcattaataaacatctgtattgtgacagc

SEQ ID NO: 175814 - DNA, 2447 bp, Homo sapiens
  Payload ID: 14523
  Gene Symbol: ARHGAP36
  Gene Name: Rho GTPase activating protein 36
  Uniprot ID: Q6ZRI8
  ENST ID: ENST00000370921
  CDS Start-End: 114-1349
attctttctctcgtggctccccagctgtatcacacaagacatttggcattagcctggaagaggtcctggtgaacgagtttacccgccgcaagcatcttgaactgacagccacgatgcaggttgaagaagccaccggtcaggctgcgggccgtcgtcggggaaacgtggtgcgaagggtgtttggccgcatccggcgctttttcagtcgcaggcggaatgagcccaccttgccccgggagttcactcgccgtgggcgtcgaggtgcagtgtctgtggatagtctggctgagctggaagacggagccctgctgctgcagaccctgcagctttcaaaaatttcctttccaattggccaacgacttctgggatccaaaaggaagatgagtctcaatccgattgcgaaacaaatcccccaggttgttgaggcttgctgccaattcattgaaaaacatggcttaagcgcagtggggatttttacccttgaatactccgtgcagcgagtgcgtcagctccgtgaagaatttgatcaaggtctggatgtagtgctggatgacaatcagaatgtgcatgatgtggctgcactcctcaaggagtttttccgtgacatgaaggattctctgctgccagatgatctgtacatgtcattcctcctgacagcaactttaaagccccaggatcagctttctgccctgcagttgctggtctacctgatgccaccctgccacagtgataccctggagcgtctgctgaaggccctgcataaaatcactgagaactgcgaggactcaattggcattgatggacagttggtcccaggcaaccgtatgacttccactaacttggccttggtgtttggatctgctctcctgaaaaaaggaaagtttggcaagagagagtccaggaaaacaaagctggggattgatcactatgttgcttctgtcaatgtggtccgtgccatgattgataactgggatgtcctcttccaggtgcctccccatattcagaggcaggttgctaagcgcgtgtggaagtccagcccggaagcacttgattttatcagacgcaggaacttgaggaagatccagagtgcacgcataaagatggaagaggatgcactactttctgatccagtggaaacctctgctgaagcccgggctgctgtccttgctcaaagcaagccttctgatgaaggttcctctgaggagccagctgtgccttccggcactgcccgttcccatgacgatgaggaaggagcgggtaaccctcccattccggagcaagaccgcccattgctccgtgtgccccgggagaaggaggccaaaactggcgtcagctacttctttccttagatgtttttccttctataaggtgccagacaggggaaaagggtgggggtacatctgggatgtcacaggaaacattaaggagagagttgaaggtaaagatctgaaggtaagaaggagttccacctgatgctcgggtcaggatgagaattccaaacacactgccagccccttcactggggatgcttggtctcttctgctggtaaaagcagagatgtttctgtgtcatgcccaagctccccggtgctaccttgcctttctcttttacccctgatcttggctttctctctctctctgcagactttcctttaattgatgtgacatttgtggtaaacacctttcccagggaacctcacaaatcttgagatgctttcccttccccagatgggattgcatgatttccctgactttcctaccctcctccagagagctcagttggaaaggccctcaagaggcatgctagaacgttaggtcagcctactgacagctgacaaacaattaatgcgaaatcatgtcacaccaacccatagccgtgtccacgcagcaactccaccaccttaggatttccccctccaaattattcagaccaatggcttgccaaatggcctctcccaaaattctgtacagttttgctcaggtcacgccaacagggaaacctcaagtgtaggtctaattagtgtttctgggatccaaagttagaggaaaatttagattttattgcctggatctgctttaaagacaattggtgtttacaccctcttgtcagcaaaacagctagttaggtaaggacatatagttccaagtaggtaaagtcacttgattacaaatgttcttaactatcgtctctgtaattcctttatacaggacagtacaaaattgtgggacatgctctggtaacacacagatatgggttgcatatgatccagaattacagctgatattatggatgacaactgctaaggtccataaaatgaagactgtattgtattgagggatagaaattgatcatttaatgggtaacaactgctgagctcaaagatttgtgattgttaaaacttctctggcatttaatcattaataaacatctgtattgtgacagcagca

SEQ ID NO: 175815 - DNA, 2736 bp, Homo sapiens
  Payload ID: 14523
  Gene Symbol: ARHGAP36
  Gene Name: Rho GTPase activating protein 36
  Uniprot ID: Q6ZRI8
  ENST ID: ENST00000370922
  CDS Start-End: 31-1638
ctgcgagctgccgggcactcagcgcgggtcatggcgtggatactggactgccttttcgcctcggcctttgagccccgcccccgccgtgtgagtgtcttgggaggagccccaggacacaaccccgaccgcaggacgaagatggtatcgatacacagcctctctgagctggagcgtctgaagctgcaagagactgcttaccacgaactcgtggccagacatttcctctccgaattcaaacctgacagagctctgcctattgaccgtccgaacaccttggataagtggtttctgattttgagaggacagcagagggctgtatcacacaagacatttggcattagcctggaagaggtcctggtgaacgagtttacccgccgcaagcatcttgaactgacagccacgatgcaggttgaagaagccaccggtcaggctgcgggccgtcgtcggggaaacgtggtgcgaagggtgtttggccgcatccggcgctttttcagtcgcaggcggaatgagcccaccttgccccgggagttcactcgccgtgggcgtcgaggtgcagtgtctgtggatagtctggctgagctggaagacggagccctgctgctgcagaccctgcagctttcaaaaatttcctttccaattggccaacgacttctgggatccaaaaggaagatgagtctcaatccgattgcgaaacaaatcccccaggttgttgaggcttgctgccaattcattgaaaaacatggcttaagcgcagtggggatttttacccttgaatactccgtgcagcgagtgcgtcagctccgtgaagaatttgatcaaggtctggatgtagtgctggatgacaatcagaatgtgcatgatgtggctgcactcctcaaggagtttttccgtgacatgaaggattctctgctgccagatgatctgtacatgtcattcctcctgacagcaactttaaagccccaggatcagctttctgccctgcagttgctggtctacctgatgccaccctgccacagtgataccctggagcgtctgctgaaggccctgcataaaatcactgagaactgcgaggactcaattggcattgatggacagttggtcccaggcaaccgtatgacttccactaacttggccttggtgtttggatctgctctcctgaaaaaaggaaagtttggcaagagagagtccaggaaaacaaagctggggattgatcactatgttgcttctgtcaatgtggtccgtgccatgattgataactgggatgtcctcttccaggtgcctccccatattcagaggcaggttgctaagcgcgtgtggaagtccagcccggaagcacttgattttatcagacgcaggaacttgaggaagatccagagtgcacgcataaagatggaagaggatgcactactttctgatccagtggaaacctctgctgaagcccgggctgctgtccttgctcaaagcaagccttctgatgaaggttcctctgaggagccagctgtgccttccggcactgcccgttcccatgacgatgaggaaggagcgggtaaccctcccattccggagcaagaccgcccattgctccgtgtgccccgggagaaggaggccaaaactggcgtcagctacttctttccttagatgtttttccttctataaggtgccagacaggggaaaagggtgggggtacatctgggatgtcacaggaaacattaaggagagagttgaaggtaaagatctgaaggtaagaaggagttccacctgatgctcgggtcaggatgagaattccaaacacactgccagccccttcactggggatgcttggtctcttctgctggtaaaagcagagatgtttctgtgtcatgcccaagctccccggtgctaccttgcctttctcttttacccctgatcttggctttctctctctctctgcagactttcctttaattgatgtgacatttgtggtaaacacctttcccagggaacctcacaaatcttgagatgctttcccttccccagatgggattgcatgatttccctgactttcctaccctcctccagagagctcagttggaaaggccctcaagaggcatgctagaacgttaggtcagcctactgacagctgacaaacaattaatgcgaaatcatgtcacaccaacccatagccgtgtccacgcagcaactccaccaccttaggatttccccctccaaattattcagaccaatggcttgccaaatggcctctcccaaaattctgtacagttttgctcaggtcacgccaacagggaaacctcaagtgtaggtctaattagtgtttctgggatccaaagttagaggaaaatttagattttattgcctggatctgctttaaagacaattggtgtttacaccctcttgtcagcaaaacagctagttaggtaaggacatatagttccaagtaggtaaagtcacttgattacaaatgttcttaactatcgtctctgtaattcctttatacaggacagtacaaaattgtgggacatgctctggtaacacacagatatgggttgcatatgatccagaattacagctgatattatggatgacaactgctaaggtccataaaatgaagactgtattgtattgagggatagaaattgatcatttaatgggtaacaactgctgagctcaaagatttgtgattgttaaaacttctctggcatttaatcattaataaacatctgtattgtgacagcagca

SEQ ID NO: 175816 - DNA, 2686 bp, Homo sapiens
  Payload ID: 14523
  Gene Symbol: ARHGAP36
  Gene Name: Rho GTPase activating protein 36
  Uniprot ID: Q6ZRI8
  ENST ID: ENST00000412432
  CDS Start-End: 38-1588
attgtatgctactggcaccttgagaaggttgaaagcaatgagtgtcttgggaggagccccaggacacaaccccgaccgcaggacgaagatggtatcgatacacagcctctctgagctggagcgtctgaagctgcaagagactgcttaccacgaactcgtggccagacatttcctctccgaattcaaacctgacagagctctgcctattgaccgtccgaacaccttggataagtggtttctgattttgagaggacagcagagggctgtatcacacaagacatttggcattagcctggaagaggtcctggtgaacgagtttacccgccgcaagcatcttgaactgacagccacgatgcaggttgaagaagccaccggtcaggctgcgggccgtcgtcggggaaacgtggtgcgaagggtgtttggccgcatccggcgctttttcagtcgcaggcggaatgagcccaccttgccccgggagttcactcgccgtgggcgtcgaggtgcagtgtctgtggatagtctggctgagctggaagacggagccctgctgctgcagaccctgcagctttcaaaaatttcctttccaattggccaacgacttctgggatccaaaaggaagatgagtctcaatccgattgcgaaacaaatcccccaggttgttgaggcttgctgccaattcattgaaaaacatggcttaagcgcagtggggatttttacccttgaatactccgtgcagcgagtgcgtcagctccgtgaagaatttgatcaaggtctggatgtagtgctggatgacaatcagaatgtgcatgatgtggctgcactcctcaaggagtttttccgtgacatgaaggattctctgctgccagatgatctgtacatgtcattcctcctgacagcaactttaaagccccaggatcagctttctgccctgcagttgctggtctacctgatgccaccctgccacagtgataccctggagcgtctgctgaaggccctgcataaaatcactgagaactgcgaggactcaattggcattgatggacagttggtcccaggcaaccgtatgacttccactaacttggccttggtgtttggatctgctctcctgaaaaaaggaaagtttggcaagagagagtccaggaaaacaaagctggggattgatcactatgttgcttctgtcaatgtggtccgtgccatgattgataactgggatgtcctcttccaggtgcctccccatattcagaggcaggttgctaagcgcgtgtggaagtccagcccggaagcacttgattttatcagacgcaggaacttgaggaagatccagagtgcacgcataaagatggaagaggatgcactactttctgatccagtggaaacctctgctgaagcccgggctgctgtccttgctcaaagcaagccttctgatgaaggttcctctgaggagccagctgtgccttccggcactgcccgttcccatgacgatgaggaaggagcgggtaaccctcccattccggagcaagaccgcccattgctccgtgtgccccgggagaaggaggccaaaactggcgtcagctacttctttccttagatgtttttccttctataaggtgccagacaggggaaaagggtgggggtacatctgggatgtcacaggaaacattaaggagagagttgaaggtaaagatctgaaggtaagaaggagttccacctgatgctcgggtcaggatgagaattccaaacacactgccagccccttcactggggatgcttggtctcttctgctggtaaaagcagagatgtttctgtgtcatgcccaagctccccggtgctaccttgcctttctcttttacccctgatcttggctttctctctctctctgcagactttcctttaattgatgtgacatttgtggtaaacacctttcccagggaacctcacaaatcttgagatgctttcccttccccagatgggattgcatgatttccctgactttcctaccctcctccagagagctcagttggaaaggccctcaagaggcatgctagaacgttaggtcagcctactgacagctgacaaacaattaatgcgaaatcatgtcacaccaacccatagccgtgtccacgcagcaactccaccaccttaggatttccccctccaaattattcagaccaatggcttgccaaatggcctctcccaaaattctgtacagttttgctcaggtcacgccaacagggaaacctcaagtgtaggtctaattagtgtttctgggatccaaagttagaggaaaatttagattttattgcctggatctgctttaaagacaattggtgtttacaccctcttgtcagcaaaacagctagttaggtaaggacatatagttccaagtaggtaaagtcacttgattacaaatgttcttaactatcgtctctgtaattcctttatacaggacagtacaaaattgtgggacatgctctggtaacacacagatatgggttgcatatgatccagaattacagctgatattatggatgacaactgctaaggtccataaaatgaagactgtattgtattgagggatagaaattgatcatttaatgggtaacaactgctgagctcaaagatttgtgattgttaaaacttctctggcatttaatcattaataaacatctgtattgtgacagcagca

SEQ ID NO: 175817 - DNA, 728 bp, Homo sapiens
  Payload ID: 14523
  Gene Symbol: ARHGAP36
  Gene Name: Rho GTPase activating protein 36
  ENST ID: ENST00000423277
  CDS Start-End: 75-728
ccggaccaagaggctcgccaagagtgagtgtcttgggaggagccccaggacacaaccccgaccgcaggacgaagatggtatcgatacacagcctctctgagctggagcgtctgaagctgcaagagactgcttaccacgaactcgtggccagacatttcctctccgaattcaaacctgacagagctctgcctattgaccgtccgaacaccttggataagtggtttctgattttgagaggacagcagagggctgtatcacacaagacatttggcattagcctggaagaggtcctggtgaacgagtttacccgccgcaagcatcttgaactgacagccacgatgcaggttgaagaagccaccggtcaggctgcgggccgtcgtcggggaaacgtggtgcgaagggtgtttggccgcatccggcgctttttcagtcgcaggcggaatgagcccaccttgccccgggagttcactcgccgtgggcgtcgaggtgcagtgtctgtggatagtctggctgagctggaagacggagccctgctgctgcagaccctgcagctttcaaaaatttcctttccaattggccaacgacttctgggatccaaaaggaagatgagtctcaatccgattgcgaaacaaatcccccaggttgttgaggcttgctgccaattcattgaaaaacatggcttaagcgcagtggggatttttacccttgaatactccgtgcagcgagtg

SEQ ID NO: 175818 - DNA, 4697 bp, Homo sapiens
  Payload ID: 14524
  Gene Symbol: ARHGAP39
  Gene Name: Rho GTPase activating protein 39
  Uniprot ID: Q9C0H5
  ENST ID: ENST00000276826
  CDS Start-End: 203-3454
cacgggtgccgtggagtccatcgtcatcctgcccagccagtctgcggcggtgggctgggccgggtgattggtgtggtgaggcgtcttccatatcagcactgttgcttctcccctcttgcagtgcggcaccttcccgtctgatgctggcgttgtgcgtatggtgccctgacgtctgtccacgtgggcgcggaagcaaacagcgatgtcccagacgcaggactacgagtgcaggagccataatgtcgacctgccggagtcgaggattccagggtcgaacactcggttggagtgggtggagatcatcgaaccgcgcacccgcgagcgcatgtacgccaacctggtcaccggtgagtgcgtgtgggacccgccggccggcgtccgcatcaagcgcaccagcgagaaccagtggtgggagctgttcgaccccaacacgtcccgcttctactactacaatgccagcacgcagcgcacggtgtggcaccggccgcagggctgcgacatcatcccgctggccaagctgcagacgctgaagcagaacacggagtccccgcgcgcctcggcggagagcagccccgggcgcggcagcagcgtcagccgtgagggcagcaccagctcctccctggagcccgagcccgacactgagaaagcgcaggagttgccagcgagggccgggcggcccgcggcgtttgggacagtgaaggaggacagcggcagctcttcaccaccaggagtgttccttgagaaggactatgagatttaccgggattacagtgcggacggccagcttcttcactacaggacctcctcgctgcggtggaactcgggcgccaaagagcgcatgctcatcaaggtcgctgatcgggagcccagcttcctcgccgcccagggcaatggctacgccccagacggcccacctggggtccgctcccgcagaccctccggcagccagcactcacccagcctgcagaccttcgccccggaggctgacggcaccatcttcttcccagagaggaggccgtcacccttcctgaagagggccgagctcccagggagcagctccccgctgctggcccagccccgaaagccctccggggactcgcagccctcctccccgcgctatggctatgaacccccgctctacgaggagcccccagtggagtaccaggcccccatctacgatgagccccccatggacgtgcaattcgaggctggcgggggctaccaggccggctctccccagcggtcgccgggccgtaagccccggccgttcctccagcccaacaagcagggccccccctcgccctgccagcagctggtgctcaccaagcagaagtgtcccgagcgcttcctgagcctggagtacagtcccgccggcaaggagtacgtgcggcagctggtctacgtggagcaggcgggctccagccccaagctgcgcgccggcccgcggcacaagtacgcgcccaaccccggcggtggttcgtactccttgcagcccagcccctgcctgctgagggaccagcgcctgggcgtcaagtccggagactacagcaccatggagggacctgagctgcggcacagccagccgcccacgccgctgccacaggcccaggaggatgccatgtcctggtccagccagcaggacaccctgtcctccacaggctactccccgggcacgcgcaagcggaagagcagaaagccctctttgtgccaagccaccagcgccacccccactgagggccccggggacctgcttgtggagcagcccctggccgaggaacagcccccgtgcgggaccagcctcgcccccgtgaagcgagcggaaggtgaggccgaaggggcgcggggcgcggccgagcccttcctggcgcaggctcggctggcctgggaggcgcagcaggcccacttccacatgaagcagaggagcagctgggactcccagcaggacggctctggctacgagagcgacggcgccctgccactgcccatgcccgggccggtggtgcgggccttcagcgaggacgaggcgctggcccagcaggagaacaggcactggaggaggggcaccttcgagaagctaggcttcccccagatcctgctggagaagagcgtctccgtgcagaccaacctggcctcaccagagccctacctccacccctcacagtctgaggacctcgctgcctgtgcccagttcgagagcagccggcagagccgcagcggcgttcccagctccagctgcgtcttccccactttcacgctgcgcaagccctcctcggagacggacatcgagaactgggcctccaagcacttcaacaagcacacgcagggcctcttccggcggaaggtgtccatcgccaacatgctggcctggagcagcgagtccatcaagaagcccatgatcgtgacaagcgaccggcacgtgaagaaggaggcctgcgagctcttcaagctgatccagatgtacatgggtgaccggcgggccaaggccgacccactgcacgtggccctggaggtggccaccaagggctggagcgtgcagggcctgcgggacgagctctacatccagctgtgccggcagaccaccgagaacttccgcctggagagcctggcccgcggctgggagctcatggccatctgcctggcctttttcccgcccacccccaagttccactcctacctggaaggctacatctaccggcacatggaccccgtcaatgacactaaaggggtggcgataagcacgtatgccaagtactgttaccacaagctacagaaggcagccctgaccggggccaagaaggggctgaagaagcccaacgtggaggagatccggcatgccaagaacgccgtgttcagcccgtccatgttcggcagcgcactgcaggaggtcatgggcatgcagagagagcgctaccccgagcgccagctgccctgggtgcagacacggctctctgaggaggtgctggcgctcaacggtgaccagacagagggcatcttcagggtccctggggacattgacgaggtgaatgccctgaagctgcaggtggaccagtggaaggtgcccacaggcctggaagacccccacgtccctgcgtccctgctgaagctgtggtaccgggagctggaggagcccctgatcccgcacgagttctacgagcagtgcatcgcgcactacgacagccccgaggcggcggtggccgtggtgcacgcgctgccccgcatcaaccgcatggtgctgtgctacctcatccgcttcctgcaggtcttcgtgcagccggccaacgtcgcggtcaccaagatggatgtcagcaacctggccatggtgatggcgcccaactgcttgcgctgccagtccgacgacccgcgcgtcatcttcgagaacacccgcaaggagatgtccttcctgcgggtgctcatccagcacctggacaccagcttcatggagggtgtgctgtagcgggggcgcccggggacaggagggatgtcctgccgcccccagccaggccgaactccgcactcgctctcccggcagaggggccagaatcgcccggcccagccctggagccccctccactcccccaggcccctggccccggcgctccccacgtcttctgcctggtctgagggtgcagccagggcacagcagcggcggggagggcgcctctggccccccacctcacggccagttcccgcgggcaccgcctcgccctccgctggccgcgggtcagctccgagaaagtgccttctgtgtcctggagccgagcgacgctgcctccttggggccgggctgcctccctgtggctcctgcgcgccctggcctgggccttgcccagccgccccggtctctccttccctttctcctgtcctcgtcctggcctgcagctcttcccagccccgagagagcttcccgacctgtccccgcctcctctccctccctcggcccgtggtccccagctggtgactgctcaggagtttgggggctccaggacagtgggcccggggcctggcaggctctcggtgggtggggtgggggcccccaaaccaaagtcctctggggtagggagcagggctgggcaggcattctgggggcagggtgggggaggggcgagagtatttttttcttcgtgtaactgtaaatccagaatctatcctgcatcgcagcccaccgtgtatagagatataaatagagggaaagatataagaactaaatttgctaatgacatagttttaacctaaatgctatttatctctgagccgtccccgtcctccgtgcagagcaagttgaggtcattccttcttttcttctccgatcttttttcttggcttctgaccaaaaaccaagctctaccccatccccatcccagacctgcaggagacgagcgagcgggaaggcgccgggcccgggactgtccgttctcggggccagagctgctgggggaccgagtttgtacattttccattttggaattttgagttccaattgttgtaaaacttaatttctccccagtttttatatatatattttttagagttccgtttttatttattaaaaacaaaagccccagccctgccgaggcctgggcggcgtcctcagtcgggtggtcccggggcctttgcggtcccgcccggctgagacgctcgccccgacgcatggacccgagaggcgacgacacgagtgaataaagtgcacatggaccctg

SEQ ID NO: 175819 - DNA, 4673 bp, Homo sapiens
  Payload ID: 14524
  Gene Symbol: ARHGAP39
  Gene Name: Rho GTPase activating protein 39
  Uniprot ID: Q9C0H5
  ENST ID: ENST00000377307
  CDS Start-End: 86-3430
gcagtgcggcaccttcccgtctgatgctggcgttgtgcgtatggtgccctgacgtctgtccacgtgggcgcggaagcaaacagcgatgtcccagacgcaggactacgagtgcaggagccataatgtcgacctgccggagtcgaggattccagggtcgaacactcggttggagtgggtggagatcatcgaaccgcgcacccgcgagcgcatgtacgccaacctggtcaccggtgagtgcgtgtgggacccgccggccggcgtccgcatcaagcgcaccagcgagaaccagtggtgggagctgttcgaccccaacacgtcccgcttctactactacaatgccagcacgcagcgcacggtgtggcaccggccgcagggctgcgacatcatcccgctggccaagctgcagacgctgaagcagaacacggagtccccgcgcgcctcggcggagagcagccccgggcgcggcagcagcgtcagccgtgagggcagcaccagctcctccctggagcccgagcccgacactgagaaagcgcaggagttgccagcgagggccgggcggcccgcggcgtttgggacagtgaaggaggacagcggcagctcttcaccaccaggagtgttccttgagaaggactatgagatttaccgggattacagtgcggacggccagcttcttcactacaggacctcctcgctgcggtggaactcgggcgccaaagagcgcatgctcatcaaggtcgctgatcgggagcccagcttcctcgccgcccagggcaatggctacgccccagacggcccacctggggtccgctcccgcagaccctccggcagccagcactcacccagcctgcagaccttcgccccggaggctgacggcaccatcttcttcccagagaggaggccgtcacccttcctgaagagggccgagctcccagggagcagctccccgctgctggcccagccccgaaagccctccggggactcgcagccctcctccccgcgctatggctatgaacccccgctctacgaggagcccccagtggagtaccaggcccccatctacgatgagccccccatggacgtgcaattcgaggctggcgggggctaccaggccggctctccccagcggtcgccgggccgtaagccccggccgttcctccagcccaacaagcagggccccccctcgccctgccagcagctggtgctcaccaagcagaagtgtcccgagcgcttcctgagcctggagtacagtcccgccggcaaggagtacgtgcggcagctggtctacgtggagcaggcgggctccagccccaagctgcgcgccggcccgcggcacaagtacgcgcccaaccccggcggtggttcgtactccttgcagcccagcccctgcctgctgagggaccagcgcctgggcgtcaagtccggagactacagcaccatggagggacctgagctgcggcacagccagccgcccacgccgctgccacaggcccaggaggatgccatgtcctggtccagccagcaggacaccctgtcctccacaggctactccccgggcacgcgcaagcggaagagcagaaagccctctttgtgccaagccaccagcgccacccccactgagggccccggggacctgcttgtggagcagcccctggccgaggaacagcccccgtgcgggaccagcctcgcccccgtgaagcgagcggaaggtgaggccgaaggggcgcggggcgcggccgagcccttcctggcgcaggctcggctggcctgggaggcgcagcaggcccacttccacatgaagcagaggagcagctgggactcccagcaggacggctctggctacgagagcgacggcgccctgccactgcccatgcccgggccggtggtgcgggccttcagcgaggacgaggcgctggcccagcaggagaacaggcactggaggaggggcaccttcgagaagctaggcttcccccagatcctgctggagaagagcgtctccgtgcagaccaacctggcctcaccagagccctacctccacccctcacagtctgaggacctcgctgcctgtgcccagttcgagagcagccggcagagccgcagcggcgttcccagctccagctgcgtcttccccactttcacgctgcgcaagccctcctcggagacggacatcgagaactgggcctccaagcacttcaacaagcacacgcagggcctcttccggcggaaggtgtccatcgccaacatgctggcctggagcagcgagtccatcaagaagcccatgatcgtgacaagcgaccggcacgtgaagaaggaggcctgcgagctcttcaagctgatccagatgtacatgggtgaccggcgggccaaggccgacccactgcacgtggccctggaggtggccaccaagggctggagcgtgcagggcctgcgggacgagctctacatccagctgtgccggcagaccaccgagaacttccgcctggagagcctggcccgcggctgggagctcatggccatctgcctggcctttttcccgcccacccccaagttccactcctacctggaaggctacatctaccggcacatggaccccgtcaatgacactaaagtgacacagcacataaaagagctcctggaaagaaacactaagaagaagtccaaattgagaaagaaacccaagccttatgttgaagagccggatggggtggcgataagcacgtatgccaagtactgttaccacaagctacagaaggcagccctgaccggggccaagaaggggctgaagaagcccaacgtggaggagatccggcatgccaagaacgccgtgttcagcccgtccatgttcggcagcgcactgcaggaggtcatgggcatgcagagagagcgctaccccgagcgccagctgccctgggtgcagacacggctctctgaggaggtgctggcgctcaacggtgaccagacagagggcatcttcagggtccctggggacattgacgaggtgaatgccctgaagctgcaggtggaccagtggaaggtgcccacaggcctggaagacccccacgtccctgcgtccctgctgaagctgtggtaccgggagctggaggagcccctgatcccgcacgagttctacgagcagtgcatcgcgcactacgacagccccgaggcggcggtggccgtggtgcacgcgctgccccgcatcaaccgcatggtgctgtgctacctcatccgcttcctgcaggtcttcgtgcagccggccaacgtcgcggtcaccaagatggatgtcagcaacctggccatggtgatggcgcccaactgcttgcgctgccagtccgacgacccgcgcgtcatcttcgagaacacccgcaaggagatgtccttcctgcgggtgctcatccagcacctggacaccagcttcatggagggtgtgctgtagcgggggcgcccggggacaggagggatgtcctgccgcccccagccaggccgaactccgcactcgctctcccggcagaggggccagaatcgcccggcccagccctggagccccctccactcccccaggcccctggccccggcgctccccacgtcttctgcctggtctgagggtgcagccagggcacagcagcggcggggagggcgcctctggccccccacctcacggccagttcccgcgggcaccgcctcgccctccgctggccgcgggtcagctccgagaaagtgccttctgtgtcctggagccgagcgacgctgcctccttggggccgggctgcctccctgtggctcctgcgcgccctggcctgggccttgcccagccgccccggtctctccttccctttctcctgtcctcgtcctggcctgcagctcttcccagccccgagagagcttcccgacctgtccccgcctcctctccctccctcggcccgtggtccccagctggtgactgctcaggagtttgggggctccaggacagtgggcccggggcctggcaggctctcggtgggtggggtgggggcccccaaaccaaagtcctctggggtagggagcagggctgggcaggcattctgggggcagggtgggggaggggcgagagtatttttttcttcgtgtaactgtaaatccagaatctatcctgcatcgcagcccaccgtgtatagagatataaatagagggaaagatataagaactaaatttgctaatgacatagttttaacctaaatgctatttatctctgagccgtccccgtcctccgtgcagagcaagttgaggtcattccttcttttcttctccgatcttttttcttggcttctgaccaaaaaccaagctctaccccatccccatcccagacctgcaggagacgagcgagcgggaaggcgccgggcccgggactgtccgttctcggggccagagctgctgggggaccgagtttgtacattttccattttggaattttgagttccaattgttgtaaaacttaatttctccccagtttttatatatatattttttagagttccgtttttatttattaaaaacaaaagccccagccctgccgaggcctgggcggcgtcctcagtcgggtggtcccggggcctttgcggtcccgcccggctgagacgctcgccccgacgcatggacccgagaggcgacgacacgagtgaataaagtgcacatggaccctg

SEQ ID NO: 175820 - DNA, 3235 bp, Homo sapiens
  Payload ID: 14525
  Gene Symbol: ARHGAP4
  Gene Name: Rho GTPase activating protein 4
  Uniprot ID: P98171
  ENST ID: ENST00000350060
  CDS Start-End: 43-2883
cgtgggagcagtggggttcgacggcgcggccgcgaggccgccatggccgctcacgggaagctgcggcgggagcgggggctgcaggctgagtatgagacgcaagtcaaagagatgcgctggcagctgagcgagcagctgcgctgcctggagctgcagggcgagctgcggcgggagttgctgcaggagctggcagagttcatgcggcgccgcgctgaggtggagctggaatactcccggggcctggaaaagctggccgagcgcttctccagccgtggaggccgcctggggagcagccgggagcaccaaagcttccggaaggagccgtccctcctgtcgcccttgcactgctgggcggtgctgctgcagcacacgcggcagcagagccgggagagcgcggccctgagtgaggtgctggccgggcccctggcccagcgcctgagtcacattgcagaggacgtggggcgcctggtcaagaagagcagggatctggagcagcagctgcaggatgagctcctggaggtggtctcagagctccagacggccaagaagacgtaccaggcatatcacatggagagcgtgaatgccgaggccaagctccgggaggccgagcggcaggaggagaagcgggcaggccggagtgtccccaccaccaccgctggtgccactgaggcagggcccctccgcaagagctccctcaagaagggagggaggctggtggagaagcggcaggccaagttcatggagcacaaactcaagtgcacaaaggcgcgcaacgagtacctgcttagcctggctagtgtcaacgctgctgtcagtaactactacctgcatgacgtcttggacctcatggactgctgtgacacagggttccacctggccctggggcaggtgctccggagctacacggccgctgagagccgcacccaagcctcccaagtgcagggcctgggcagcctggaagaagctgtggaggccctggatcctccaggggacaaagccaaggttctcgaggtgcatgctaccgtcttctgtcccccgctgcgctttgactaccacccccatgatggggatgaggtggctgagatctgcgttgaaatggagctgcgggacgagattctgcccagagcccagaacatccagagccgcctggaccgacagaccattgagacagaggaggtgaacaagactctgaaggcgacactgcaggccctgctggaggtggtggcctcggatgacggggatgtgcttgattccttccagaccagcccctccaccgagtccctcaagtccaccagctcagacccaggcagccggcaggcgggccggaggcgcggccagcagcaggagaccgaaaccttctacctcacgaagctccaggagtatctgagtggacggagcatcctcgccaagctgcaggccaagcacgagaagctgcaggaggcccttcagcgaggtgacaaggaggagcaggaggtgtcttggacccagtacacacagagaaaattccagaagagccgccagccccgccccagctcccagtataaccagagactctttgggggagacatggagaagtttatccagagctcaggccagcctgtgcccctggtggtggagagctgcattcgcttcatcaacctcaatggcctgcagcatgaaggcatcttccgggtatcgggtgcccagctccgggtctcagagatccgtgatgccttcgagagaggggaggacccactggtggagggctgcactgcccatgacctggactcggtggccggggtgctgaagctctacttccggagcctggagcccccactcttccccccagacctgttcggcgagctgctggcttcttcggagctggaggccacagcggagagggtggagcacgtgagccgcctgctgtggcggctgcccgcgccggtgctggtggttctgcgctacctcttcaccttcctcaaccacctggcccagtacagcgatgagaacatgatggacccctacaacctggccgtgtgcttcgggcccacgctgctaccggtgcccgctgggcaggacccggtggcgctgcagggccgggtgaaccagctggtgcagacgctcatagtgcagcccgatcgggtcttcccgcccctgacctcgctgcctggccccgtctacgagaagtgcatggcaccgccttccgccagctgcctgggggacgcccagctggagagcctgggggcggacaatgagccggagctggaagccgagatgcccgcacaggaggatgacctggagggggtcgtggaggctgtggcctgctttgcctacacgggccgcacagcccaggagctgagcttccggcggggggacgtactgcggctgcacgagagggcctcgagcgactggtggcggggggagcacaacggcatgcggggcctcatcccccacaagtatatcacgctgcccgccgggacggagaagcaggtggtgggcgcagggctgcagactgcaggggagtctgggagcagtcccgagggcctcctggcatcggagctggtccaccggccagagccatgcacctcacctgaggccatgggaccctctggacacagacgacgctgcttggtcccagcctccccagagcaacacgtggaggtggataaggctgtggcacagaacatggactctgtgtttaaggagctcttgggaaagacctctgtccgccagggccttgggccagcatctaccacctctcccagtcctgggccccgaagcccaaaggccccgcccagcagccgcctgggcaggaacaaaggcttctcccggggccctggggccccagcctcaccctcagcttcccacccccagggcctagacacgacccccaagccacactgaggtgccgctgctggagatgcgtgcccccggcggctacccgctggaccggccactctccccagcccccttgcttctctccagccctgtccagcaagtgcagggtgcctgcacttcaccctgtgcagagaggtgggatggggccgtgcacacagggatgcccgctccacatcctgcctgcccctcagccctggcccaggccccttttggaggcagctgaggaaggatgctggggaaagccctcttctgcagctttgtggaaggctgatcagtggctgctgggtggcgggtacccttgctcagatgcctggcagggctgggtggcgattcataaagacctcgtgttgattccccg

SEQ ID NO: 175821 - DNA, 3095 bp, Homo sapiens
  Payload ID: 14525
  Gene Symbol: ARHGAP4
  Gene Name: Rho GTPase activating protein 4
  ENST ID: ENST00000370016
  CDS Start-End: 43-2820
cgtgggagcagtggggttcgacggcgcggccgcgaggccgccatggccgctcacgggaagctgcggcgggagcgggggctgcaggctgagtatgagacgcaagtcaaagagatgcgctggcagctgagcgagcagctgcgctgcctggagctgcagggcgagctgcggcgggagttgctgcaggagctggcagagttcatgcggcgccgcgctgaggtggagctggaatactcccggggcctggaaaagctggccgagcgcttctccagccgtggaggccgcctggggagcagccgggagcaccaaagcttccggaaggagccgtccctcctgtcgcccttgcactgctgggcggtgctgctgcagcacacgcggcagcagagccgggagagcgcggccctgagtgaggtgctggccgggcccctggcccagcgcctgagtcacattgcagaggacgtggggcgcctggtcaagaaggccaagaagacgtaccaggcatatcacatggagagcgtgaatgccgaggccaagctccgggaggccgagcggcaggaggagaagcgggcaggccggagtgtccccaccaccaccgctggtgccactgaggcagggcccctccgcaagagctccctcaagaagggagggaggctggtggagaagcggcaggccaagttcatggagcacaaactcaagtgcacaaaggcgcgcaacgagtacctgcttagcctggctagtgtcaacgctgctgtcagtaactactacctgcatgacgtcttggacctcatggactgctgtgacacagggttccacctggccctggggcaggtgctccggagctacacggccgctgagagccgcacccaagcctcccaagtgcagggcctgggcagcctggaagaagctgtggaggccctggatcctccaggggacaaagccaaggttctcgaggtgcatgctaccgtcttctgtcccccgctgcgctttgactaccacccccatgatggggatgaggtggctgagatctgcgttgaaatggagctgcgggacgagattctgcccagagcccagaacatccagagccgcctggaccgacagaccattgagacagaggaggtgaacaagactctgaaggcgacactgcaggccctgctggaggtggtggcctcggatgacggggatgtgcttgattccttccagaccagcccctccaccgagtccctcaagtccaccagctcagacccaggcagccggcaggcgggccggaggcgcggccagcagcaggagaccgaaaccttctacctcacgaagctccaggagtatctgagtggacggagcatcctcgccaagctgcaggccaagcacgagaagctgcaggaggcccttcagcgaggtgacaaggaggagcaggaggtgtcttggacccagtacacacagagaaaattccagaagagccgccagccccgccccagctcccagtataaccagagactctttgggggagacatggagaagtttatccagagctcaggccagcctgtgcccctggtggtggagagctgcattcgcttcatcaacctcaatggcctgcagcatgaaggcatcttccgggtatcgggtgcccagctccgggtctcagagatccgtgatgccttcgagagaggggaggacccactggtggagggctgcactgcccatgacctggactcggtggccggggtgctgaagctctacttccggagcctggagcccccactcttccccccagacctgttcggcgagctgctggcttcttcggagctggaggccacagcggagagggtggagcacgtgagccgcctgctgtggcggctgcccgcgccggtgctggtggttctgcgctacctcttcaccttcctcaaccacctggcccagtacagcgatgagaacatgatggacccctacaacctggccgtgtgcttcgggcccacgctgctaccggtgcccgctgggcaggacccggtggcgctgcagggccgggtgaaccagctggtgcagacgctcatagtgcagcccgatcgggtcttcccgcccctgacctcgctgcctggccccgtctacgagaagtgcatggcaccgccttccgccagctgcctgggggacgcccagctggagagcctgggggcggacaatgagccggagctggaagccgagatgcccgcacaggaggatgacctggagggggtcgtggaggctgtggcctgctttgcctacacgggccgcacagcccaggagctgagcttccggcggggggacgtactgcggctgcacgagagggcctcgagcgactggtggcggggggagcacaacggcatgcggggcctcatcccccacaagtatatcacgctgcccgccgggacggagaagcaggtggtgggcgcagggctgcagactgcaggggagtctgggagcagtcccgagggcctcctggcatcggagctggtccaccggccagagccatgcacctcacctgaggccatgggaccctctggacacagacgacgctgcttggtcccagcctccccagagcaacacgtggaggtggataaggctgtggcacagaacatggactctgtgtttaaggagctcttgggaaagacctctgtccgccagggccttgggccagcatctaccacctctcccagtcctgggccccgaagcccaaaggccccgcccagcagccgcctgggcaggaacaaaggcttctcccggggccctggggccccagcctcaccctcagcttcccacccccagggcctagacacgacccccaagccacactgaggtgccgctgctggagatgcgtgcccccggcggctacccgctggaccggccactctccccagcccccttgcttctctccagccctgtccagcaagtgcagggtgcctgcacttcaccctgtgcagagaggtgggatggggccgtgcacacagggatgcccgctccacatcctgcctgcccctcagccctggcccaggccccttttggaggcagctgaggaaggatgctggggaaagccctcttctgcagctttgtggaaggctgatcagtggctg

SEQ ID NO: 175822 - DNA, 3372 bp, Homo sapiens
  Payload ID: 14525
  Gene Symbol: ARHGAP4
  Gene Name: Rho GTPase activating protein 4
  Uniprot ID: P98171
  ENST ID: ENST00000370028
  CDS Start-End: 59-3019
ggcccgctcacggccgcgtgggagcagtggggttcgacggcgcggccgcgaggccgccatggccgctcacgggaagctgcggcgggagcgggggctgcaggctgagtatgagacgcaagtcaaagagatgcgctggcagctgagcgagcagctgcgctgcctggagctgcagggcgagctgcggcgggagttgctgcaggagctggcagagttcatgcggcgccgcgctgaggtggagctggaatactcccggggcctggaaaagctggccgagcgcttctccagccgtggaggccgcctggggagcagccgggagcaccaaagcttccggaaggagccgtccctcctgtcgcccttgcactgctgggcggtgctgctgcagcacacgcggcagcagagccgggagagcgcggccctgagtgaggtgctggccgggcccctggcccagcgcctgagtcacattgcagaggacgtggggcgcctggtcaagaagagcagggatctggagcagcagctgcaggatgagctcctggaggtggtctcagagctccagacggccaagaagacgtaccaggcatatcacatggagagcgtgaatgccgaggccaagctccgggaggccgagcggcaggaggagaagcgggcaggccggagtgtccccaccaccaccgctggtgccactgaggcagggcccctccgcaagagctccctcaagaagggagggaggctggtggagaagctctggcccccgcagaggcctgtggccgcttccagctgtgcacctgtgtgctggctccaagctgggtttctcgtgcaccctccatggtggggtgccatgtgcgcaccttccactcatcagcggcaggccaagttcatggagcacaaactcaagtgcacaaaggcgcgcaacgagtacctgcttagcctggctagtgtcaacgctgctgtcagtaactactacctgcatgacgtcttggacctcatggactgctgtgacacagggttccacctggccctggggcaggtgctccggagctacacggccgctgagagccgcacccaagcctcccaagtgcagggcctgggcagcctggaagaagctgtggaggccctggatcctccaggggacaaagccaaggttctcgaggtgcatgctaccgtcttctgtcccccgctgcgctttgactaccacccccatgatggggatgaggtggctgagatctgcgttgaaatggagctgcgggacgagattctgcccagagcccagaacatccagagccgcctggaccgacagaccattgagacagaggaggtgaacaagactctgaaggcgacactgcaggccctgctggaggtggtggcctcggatgacggggatgtgcttgattccttccagaccagcccctccaccgagtccctcaagtccaccagctcagacccaggcagccggcaggcgggccggaggcgcggccagcagcaggagaccgaaaccttctacctcacgaagctccaggagtatctgagtggacggagcatcctcgccaagctgcaggccaagcacgagaagctgcaggaggcccttcagcgaggtgacaaggaggagcaggaggtgtcttggacccagtacacacagagaaaattccagaagagccgccagccccgccccagctcccagtataaccagagactctttgggggagacatggagaagtttatccagagctcaggccagcctgtgcccctggtggtggagagctgcattcgcttcatcaacctcaatggcctgcagcatgaaggcatcttccgggtatcgggtgcccagctccgggtctcagagatccgtgatgccttcgagagaggggaggacccactggtggagggctgcactgcccatgacctggactcggtggccggggtgctgaagctctacttccggagcctggagcccccactcttccccccagacctgttcggcgagctgctggcttcttcggagctggaggccacagcggagagggtggagcacgtgagccgcctgctgtggcggctgcccgcgccggtgctggtggttctgcgctacctcttcaccttcctcaaccacctggcccagtacagcgatgagaacatgatggacccctacaacctggccgtgtgcttcgggcccacgctgctaccggtgcccgctgggcaggacccggtggcgctgcagggccgggtgaaccagctggtgcagacgctcatagtgcagcccgatcgggtcttcccgcccctgacctcgctgcctggccccgtctacgagaagtgcatggcaccgccttccgccagctgcctgggggacgcccagctggagagcctgggggcggacaatgagccggagctggaagccgagatgcccgcacaggaggatgacctggagggggtcgtggaggctgtggcctgctttgcctacacgggccgcacagcccaggagctgagcttccggcggggggacgtactgcggctgcacgagagggcctcgagcgactggtggcggggggagcacaacggcatgcggggcctcatcccccacaagtatatcacgctgcccgccgggacggagaagcaggtggtgggcgcagggctgcagactgcaggggagtctgggagcagtcccgagggcctcctggcatcggagctggtccaccggccagagccatgcacctcacctgaggccatgggaccctctggacacagacgacgctgcttggtcccagcctccccagagcaacacgtggaggtggataaggctgtggcacagaacatggactctgtgtttaaggagctcttgggaaagacctctgtccgccagggccttgggccagcatctaccacctctcccagtcctgggccccgaagcccaaaggccccgcccagcagccgcctgggcaggaacaaaggcttctcccggggccctggggccccagcctcaccctcagcttcccacccccagggcctagacacgacccccaagccacactgaggtgccgctgctggagatgcgtgcccccggcggctacccgctggaccggccactctccccagcccccttgcttctctccagccctgtccagcaagtgcagggtgcctgcacttcaccctgtgcagagaggtgggatggggccgtgcacacagggatgcccgctccacatcctgcctgcccctcagccctggcccaggccccttttggaggcagctgaggaaggatgctggggaaagccctcttctgcagctttgtggaaggctgatcagtggctgctgggtggcgggtacccttgctcagatgcctggcagggctgggtggcgattcataaagacctcgtgttgattccccga

SEQ ID NO: 175823 - DNA, 2721 bp, Homo sapiens
  Payload ID: 14525
  Gene Symbol: ARHGAP4
  Gene Name: Rho GTPase activating protein 4
  ENST ID: ENST00000393721
  CDS Start-End: 53-2359
ctcacggccgcgtgggagcagtggggttcgacggcgcggccgcgaggccgccatggccgctcacgggaagctgcggcgggagcgggggctgcaggctgagtatgagacgcaagtcaaagagatgcgctggcagctgagcgagcagctgcgctgcctggagctgcagggcgagctgcggcgggagttgctgcaggagctggcagagttcatgcggcgccgcgctgaggtggagctggaatactcccggggcctggaaaagctggccgagcgcttctccagccgtggaggccgcctggggagcagccgggagcaccaaagcttccggaaggagccgtccctcctgtcgcccttgcactgctgggcggtgctgctgcagcacacgcggcagcagagccgggagagcgcggccctgagtgaggtgctggccgggcccctggcccagcgcctgagtcacattgcagaggacgtggggcgcctggtcaagaagagcagggatctggagcagcagctgcaggatgagctcctggaggtggtctcagagctccagacggtggctgagatctgcgttgaaatggagctgcgggacgagattctgcccagagcccagaacatccagagccgcctggaccgacagaccattgagacagaggaggtgaacaagactctgaaggcgacactgcaggccctgctggaggtggtggcctcggatgacggggatgtgcttgattccttccagaccagcccctccaccgagtccctcaagtccaccagctcagacccaggcagccggcaggcgggccggaggcgcggccagcagcaggagaccgaaaccttctacctcacgaagctccaggagtatctgagtggacggagcatcctcgccaagctgcaggccaagcacgagaagctgcaggaggcccttcagcgaggtgacaaggaggagcaggaggtgtcttggacccagtacacacagagaaaattccagaagagccgccagccccgccccagctcccagtataaccagagactctttgggggagacatggagaagtttatccagagctcaggccagcctgtgcccctggtggtggagagctgcattcgcttcatcaacctcaatggcctgcagcatgaaggcatcttccgggtatcgggtgcccagctccgggtctcagagatccgtgatgccttcgagagaggggaggacccactggtggagggctgcactgcccatgacctggactcggtggccggggtgctgaagctctacttccggagcctggagcccccactcttccccccagacctgttcggcgagctgctggcttcttcggagctggaggccacagcggagagggtggagcacgtgagccgcctgctgtggcggctgcccgcgccggtgctggtggttctgcgctacctcttcaccttcctcaaccacctggcccagtacagcgatgagaacatgatggacccctacaacctggccgtgtgcttcgggcccacgctgctaccggtgcccgctgggcaggacccggtggcgctgcagggccgggtgaaccagctggtgcagacgctcatagtgcagcccgatcgggtcttcccgcccctgacctcgctgcctggccccgtctacgagaagtgcatggcaccgccttccgccagctgcctgggggacgcccagctggagagcctgggggcggacaatgagccggagctggaagccgagatgcccgcacaggaggatgacctggagggggtcgtggaggctgtggcctgctttgcctacacgggccgcacagcccaggagctgagcttccggcggggggacgtactgcggctgcacgagagggcctcgagcgactggtggcggggggagcacaacggcatgcggggcctcatcccccacaagtatatcacgctgcccgccgggacggagaagcaggtggtgggcgcagggctgcagactgcaggggagtctgggagcagtcccgagggcctcctggcatcggagctggtccaccggccagagccatgcacctcacctgaggccatgggaccctctggacacagacgacgctgcttggtcccagcctccccagagcaacacgtggaggtggataaggctgtggcacagaacatggactctgtgtttaaggagctcttgggaaagacctctgtccgccagggccttgggccagcatctaccacctctcccagtcctgggccccgaagcccaaaggccccgcccagcagccgcctgggcaggaacaaaggcttctcccggggccctggggccccagcctcaccctcagcttcccacccccagggcctagacacgacccccaagccacactgaggtgccgctgctggagatgcgtgcccccggcggctacccgctggaccggccactctccccagcccccttgcttctctccagccctgtccagcaagtgcagggtgcctgcacttcaccctgtgcagagaggtgggatggggccgtgcacacagggatgcccgctccacatcctgcctgcccctcagccctggcccaggccccttttggaggcagctgaggaaggatgctggggaaagccctcttctgcagctttgtggaaggctgatcagtggctgctgggtggcgggtacccttgctcagatgcctggcagggctgggtggcgattcataaagacctcgtgttgattccccgatgggagcca

SEQ ID NO: 175824 - DNA, 3232 bp, Homo sapiens
  Payload ID: 14525
  Gene Symbol: ARHGAP4
  Gene Name: Rho GTPase activating protein 4
  ENST ID: ENST00000404127
  CDS Start-End: 104-757
gcccgcgcagggtgctggccgcagcgcccccaagtcccggcgccgggcccgctcacggccgcgtgggagcagtggggttcgacggcgcggccgcgaggccgccatggccgctcacgggaagctgcggcgggagcgggggctgcaggctgagtatgagacgcaagtcaaagagatgcgctggcagctgagcgagcagctgcgctgcctggagctgcagggcgagctgcggcgggagttgctgcaggagctggcagagttcatgcggcgccgcgctgaggtggagctggaatactcccggggcctggaaaagctggccgagcgcttctccagccgtggaggccgcctggggagcagccgggagcaccaaagcttccggaaggagccgtccctcctgtcgcccttgcactgctgggcggtgctgctgcagcacacgcggcagcagagccgggagagcgcggccctgagtgaggtgctggccgggcccctggcccagcgcctgagtcacattgcagaggacgtggggcgcctggtcaagaagagcagggatctggagcagcagctgcaggatgagctcctggaggtggtctcagagctccagacgcaccaccttgctttgggtctccctgcaggccaagaagacgtaccaggcatatcacatggagagcgtgaatgccgaggccaagctccgggaggccgagcggcaggaggagaagcgggcaggccggagtgtccccaccaccaccgctggtgccactgaggcagggcccctccgcaagagctccctcaagaagggagggaggctggtggagaagcggcaggccaagttcatggagcacaaactcaagtgcacaaaggcgcgcaacgagtacctgcttagcctggctagtgtcaacgctgctgtcagtaactactacctgcatgacgtcttggacctcatggactgctgtgacacagggttccacctggccctggggcaggtgctccggagctacacggccgctgagagccgcacccaagcctcccaagtgcagggcctgggcagcctggaagaagctgtggaggccctggatcctccaggggacaaagccaaggttctcgaggtgcatgctaccgtcttctgtcccccgctgcgctttgactaccacccccatgatggggatgaggtggctgagatctgcgttgaaatggagctgcgggacgagattctgcccagagcccagaacatccagagccgcctggaccgacagaccattgagacagaggaggtgaacaagactctgaaggcgacactgcaggccctgctggaggtggtggcctcggatgacggggatgtgcttgattccttccagaccagcccctccaccgagtccctcaagtccaccagctcagacccaggcagccggcaggcgggccggaggcgcggccagcagcaggagaccgaaaccttctacctcacgaagctccaggagtatctgagtggacggagcatcctcgccaagctgcaggccaagcacgagaagctgcaggaggcccttcagcgaggtgacaaggaggagcaggaggtgtcttggacccagtacacacagagaaaattccagaagagccgccagccccgccccagctcccagtataaccagagactctttgggggagacatggagaagtttatccagagctcaggccagcctgtgcccctggtggtggagagctgcattcgcttcatcaacctcaatggcctgcagcatgaaggcatcttccgggtatcgggtgcccagctccgggtctcagagatccgtgatgccttcgagagaggggaggacccactggtggagggctgcactgcccatgacctggactcggtggccggggtgctgaagctctacttccggagcctggagcccccactcttccccccagacctgttcggcgagctgctggcttcttcggagctggaggccacagcggagagggtggagcacgtgagccgcctgctgtggcggctgcccgcgccggtgctggtggttctgcgctacctcttcaccttcctcaaccacctggcccagtacagcgatgagaacatgatggacccctacaacctggccgtgtgcttcgggcccacgctgctaccggtgcccgctgggcaggacccggtggcgctgcagggccgggtgaaccagctggtgcagacgctcatagtgcagcccgatcgggtcttcccgcccctgacctcgctgcctggccccgtctacgagaagtgcatggcaccgccttccgccagctgcctgggggacgcccagctggagagcctgggggcggacaatgagccggagctggaagccgagatgcccgcacaggaggatgacctggagggggtcgtggaggctgtggcctgctttgcctacacgggccgcacagcccaggagctgagcttccggcggggggacgtactgcggctgcacgagagggcctcgagcgactggtggcggggggagcacaacggcatgcggggcctcatcccccacaagtatatcacgctgcccgccgggacggagaagcaggtggtgggcgcagggctgcagactgcaggggagtctgggagcagtcccgagggcctcctggcatcggagctggtccaccggccagagccatgcacctcacctgaggccatgggaccctctggacacagacgacgctgcttggtcccagcctccccagagcaacacgtggaggtggataaggctgtggcacagaacatggactctgtgtttaaggagctcttgggaaagacctctgtccgccagggccttgggccagcatctaccacctctcccagtcctgggccccgaagcccaaaggccccgcccagcagccgcctgggcaggaacaaaggcttctcccggggccctggggccccagcctcaccctcagcttcccacccccagggcctagacacgacccccaagccacactgaggtgccgctgctggagatgcgtgcccccggcggctacccgctggaccggccactctccccagcccccttgcttctctccagccctgtccagcaagtgcagggtgcctgcacttcaccctgtgcagagaggtgggatggggccgtgcacacagggatgcccgctccacatcctgcctgcccctcagccctggcccaggccccttttggaggcagctgaggaaggatgctggggaaagccctcttctgcagctttgtggaag

SEQ ID NO: 175825 - DNA, 2817 bp, Homo sapiens
  Payload ID: 14525
  Gene Symbol: ARHGAP4
  Gene Name: Rho GTPase activating protein 4
  ENST ID: ENST00000420383
  CDS Start-End: 43-1920
cgtgggagcagtggggttcgacggcgcggccgcgaggccgccatggccgctcacgggaagctgcggcgggagcgggggctgcaggctgagtatgagacgcaagtcaaagagatgcgctggcagctgagcgagcagctgcgctgcctggagctgcagggcgagctgcggcgggagttgctgcaggagctggcagagttcatgcggcgccgcgctgaggtggagctggaatactcccggggcctggaaaagctggccgagcgcttctccagccgtggaggccgcctggggagcagccgggagcaccaaagcttccggaaggagccgtccctcctgtcgcccttgcactgctgggcggtgctgctgcagcacacgcggcagcagagccgggagagcgcggccctgagtgaggtgctggccgggcccctggcccagcgcctgagtcacattgcagaggacgtggggcgcctggtcaagaagagcagggatctggagcagcagctgcaggatgagctcctggaggtggtctcagagctccagacggccaagaagacgtaccaggcatatcacatggagagcgtgaatgccgaggccaagctccgggaggccgagcggcaggaggagaagcgggcaggccggagtgtccccaccaccaccgctggtgccactgaggcagggcccctccgcaagagctccctcaagaagggagggaggctggtggagaagcggcaggccaagttcatggagcacaaactcaagtgcacaaaggcgcgcaacgagtacctgcttagcctggctagtgtcaacgctgctgtcagtaactactacctgcatgacgtcttggacctcatggactgctgtgacacagggttccacctggccctggggcaggtgctccggagctacacggccgctgagagccgcacccaagcctcccaagtgcagggcctgggcagcctggaagaagctgtggaggccctggatcctccaggggacaaagccaaggttctcgaggtgcatgctaccgtcttctgtcccccgctgcgctttgactaccacccccatgatggggatgaggtggctgagatctgcgttgaaatggagctgcgggacgagattctgcccagagcccagaacatccagagccgcctggaccgacagaccattgagacagaggaggtgaacaagactctgaaggcgacactgcaggccctgctggaggtggtggcctcggatgacggggatgtgcttgattccttccagaccagcccctccaccgagtccctcaagtccaccagctcagacccaggcagccggcaggcgggccggaggcgcggccagcagcaggagaccgaaaccttctacctcacgaagctccaggagtatctgagtggacggagcatcctcgccaagctgcaggccaagcacgagaagctgcaggaggcccttcagcgaggtgacaaggaggagcaggaggtgtcttggacccagtacacacagagaaaattccagaagagccgccagccccgccccagctcccagtataaccagagactctttgggggagacatggagaagtttatccagagctcaggccagcctgtgcccctggtggtggagagctgcattcgcttcatcaacctcaatggggaggacccactggtggagggctgcactgcccatgacctggactcggtggccggggtgctgaagctctacttccggagcctggagcccccactcttccccccagacctgttcggcgagctgctggcttcttcggggacgcccagctggagagcctgggggcggacaatgagccggagctggaagccgagatgcccgcacaggaggatgacctggagggggtcgtggaggctgtggcctgctttgcctacacgggccgcacagcccaggagctgagcttccggcggggggacgtactgcggctgcacgagagggcctcgagcgactggtggcggggggagcacaacggcatgcggggcctcatcccccacaagtatatcacgctgcccgccgggacggagaagcaggtggtgggcgcagggctgcagactgcaggggagtctgggagcagtcccgagggcctcctggcatcggagctggtccaccggccagagccatgcacctcacctgaggccatgggaccctctggacacagacgacgctgcttggtcccagcctccccagagcaacacgtggaggtggataaggctgtggcacagaacatggactctgtgtttaaggagctcttgggaaagacctctgtccgccagggccttgggccagcatctaccacctctcccagtcctgggccccgaagcccaaaggccccgcccagcagccgcctgggcaggaacaaaggcttctcccggggccctggggccccagcctcaccctcagcttcccacccccagggcctagacacgacccccaagccacactgaggtgccgctgctggagatgcgtgcccccggcggctacccgctggaccggccactctccccagcccccttgcttctctccagccctgtccagcaagtgcagggtgcctgcacttcaccctgtgcagagaggtgggatggggccgtgcacacagggatgcccgctccacatcctgcctgcccctcagccctggcccaggccccttttggaggcagctgaggaaggatgctggggaaagccctcttctgcagctttgtggaaggctgatcagtggctgctgggtggcgggtacccttgctcagatgcctggcagggctgggtggcgattcataaagacctcgtgttgattccccg

SEQ ID NO: 175826 - DNA, 642 bp, Homo sapiens
  Payload ID: 14525
  Gene Symbol: ARHGAP4
  Gene Name: Rho GTPase activating protein 4
  ENST ID: ENST00000422918
  CDS Start-End: 1-642
gagaagcggcaggccaagttcatggagcacaaactcaagtgcacaaaggcgcgcaacgagtacctgcttagcctggctagtgtcaacgctgctgtcagtaactactacctgcatgacgtcttggacctcatggactgctgtgacacagggttccacctggccctggggcaggtgctccggagctacacggccgctgagagccgcacccaagcctcccaagtgcagggcctgggcagcctggaagaagctgtggaggccctggatcctccaggggacaaagccaaggttctcgaggtgcatgctaccgtcttctgtcccccgctgcgctttgactaccacccccatgatggggatgaggtggctgagatctgcgttgaaatggagctgcgggacgagattctgcccagagcccagaacatccagagccgcctggaccgacagaccattgagacagaggagaccagcccctccaccgagtccctcaagtccaccagctcagacccaggcagccggcaggcgggccggaggcgcggccagcagcaggagaccgaaaccttctacctcacgaagctccaggagtatctgagtggacggagcatcctcgccaagctgcaggccaagcacgagaagctgcaggaggcc

SEQ ID NO: 175827 - DNA, 625 bp, Homo sapiens
  Payload ID: 14525
  Gene Symbol: ARHGAP4
  Gene Name: Rho GTPase activating protein 4
  ENST ID: ENST00000442262
  CDS Start-End: 96-625
gacgtgggcttccctttgtatgggccggaggcggagtcctgtcccgccccgcgcctggcggcagtgtcttccggttcgcaagcccgcggcgagagatgcgctggcagctgagcgagcagctgcgctgcctggagctgcagggcgagctgcggcgggagttgctgcaggagctggcagagttcatgcggcgccgcgctgaggtggagctggaatactcccggggcctggaaaagctggccgagcgcttctccagccgtggaggccgcctggggagcagccgggagcaccaaagcttccggaaggagccgtccctcctgtcgcccttgcactgctgggcggtgctgctgcagcacacgcggcagcagagccgggagagcgcggccctgagtgaggtgctggccgggcccctggcccagcgcctgagtcacattgcagaggacgtggggcgcctggtcaagaagagcagggatctggagcagcagctgcaggatgagctcctggaggtggtctcagagctccagacggccaagaagacgtaccaggcatatcacatggagagcgtgaatgccgaggccaagctccgggaggccgagcggcaggaggagaagcgggcaggccggagtgt

SEQ ID NO: 175828 - DNA, 880 bp, Homo sapiens
  Payload ID: 14525
  Gene Symbol: ARHGAP4
  Gene Name: Rho GTPase activating protein 4
  ENST ID: ENST00000442172
  CDS Start-End: 1-880
gaaaattccagaagagccgccagccccgccccagctcccagtataaccagagactctttgggggagacatggagaagtttatccagagctcaggccagcctgtgcccctggtggtggagagctgcattcgcttcatcaacctcaatggggaggacccactggtggagggctgcactgcccatgacctggactcggtggccggggtgctgaagctctacttccggagcctggagcccccactcttccccccagacctgttcggcgagctgctggcttcttcggagctggaggccacagcggagagggtggagcacgtgagccgcctgctgtggcggctgcccgcgccggtgctggtggttctgcgctacctcttcaccttcctcaaccacctggcccagtacagcgatgagaacatgatggacccctacaacctggccgtgtgcttcgggcccacgctgctaccggtgcccgctgggcaggacccggtggcgctgcagggccgggtgaaccagctggtgcagacgctcatagtgcagcccgatcgggtcttcccgcccctgacctcgctgcctggccccgtctacgagaagtgcatggcaccgccttccgccagctgcctgggggacgcccagctggagagcctgggggcggacaatgagccggagctggaagccgagatgcccgcacaggaggatgacctggagggggtcgtggaggctgtggcctgctttgcctacacgggccgcacagcccaggagctgagcttccggcggggggacgtactgcggctgcacgagagggcctcgagcgactggtggcggggggagcacaacggcatgcggggcctcatcccccacaagtatatcacgctgcccgccgg

SEQ ID NO: 175829 - DNA, 586 bp, Homo sapiens
  Payload ID: 14525
  Gene Symbol: ARHGAP4
  Gene Name: Rho GTPase activating protein 4
  ENST ID: ENST00000418750
  CDS Start-End: 1-586
gagtcacattgcagaggacgtggggcgcctggtcaagaaggccaagaagacgtaccaggcatatcacatggagagcgtgaatgccgaggccaagctccgggaggccgagcggcaggaggagaagcgggcaggccggagtgtccccaccaccaccgctggtgccactgaggcagggcccctccgcaagagctccctcaagaagggagggaggctggtggagaagctctggcccccgcagaggcctgtggccgcttccagctgtgcacctgtgtgctggctccaagctgggtttctcgtgcaccctccatggtggggtgccatgtgcgcaccttccactcatcagcggcaggccaagttcatggagcacaaactcaagtgcacaaaggcgcgcaacgagtacctgcttagcctggctagtgtcaacgctgctgtcagtaactactacctgcatgacgtcttggacctcatggactgctgtgacacagggttccacctggccctggggcaggtgctccggagctacacggccgctgagagccgcacccaagcctcccaagtgcagggcctgggcagcctggaagaagct

SEQ ID NO: 175830 - DNA, 747 bp, Homo sapiens
  Payload ID: 14525
  Gene Symbol: ARHGAP4
  Gene Name: Rho GTPase activating protein 4
  ENST ID: ENST00000454164
  CDS Start-End: 1-747
tcctggcacccagcacccagttcccagcacctggcatgggaggccatcctggaggggctggggaagatgctcagtgcccaccagctccttgtcctcccacaggcctgcagcatgaaggcatcttccgggtatcgggtgcccagctccgggtctcagagatccgtgatgccttcgagagaggggaggacccactggtggagggctgcactgcccatgacctggactcggtggccggggtgctgaagctctacttccggagcctggagcccccactcttccccccagacctgttcggcgagctgctggcttcttcggagctggaggccacagcggagagggtggagcacgtgagccgcctgctgtggcggctgcccgcgccggtgctggtggttctgcgctacctcttcaccttcctcaaccaggacgcccagctggagagcctgggggcggacaatgagccggagctggaagccgagatgcccgcacaggaggatgacctggagggggtcgtggaggctgtggcctgctttgcctacacgggccgcacagcccaggagctgagcttccggcggggggacgtactgcggctgcacgagagggcctcgagcgactggtggcggggggagcacaacggcatgcggggcctcatcccccacaagtatatcacgctgcccgccgggacggagaagcaggtggtgggcgcagggctgcagactgcaggggagtctgggagcagtcccgagggcc

SEQ ID NO: 175831 - DNA, 570 bp, Homo sapiens
  Payload ID: 14525
  Gene Symbol: ARHGAP4
  Gene Name: Rho GTPase activating protein 4
  ENST ID: ENST00000422091
  CDS Start-End: 48-570
tcccctaccaagggggcctggagggaacggcagccagctgctgagagatgcgctggcagctgagcgagcagctgcgctgcctggagctgcagggcgagctgcggcgggagttgctgcaggagctggcagagttcatgcggcgccgcgctgaggtggagctggaatactcccggggcctggaaaagctggccgagcgcttctccagccgtggaggccgcctggggagcagccgggagcaccaaagcttccggaaggagccgtccctcctgtcgcccttgcactgctgggcggtgctgctgcagcacacgcggcagcagagccgggagagcgcggccctgagtgaggtgctggccgggcccctggcccagcgcctgagtcacattgcagaggacgtggggcgcctggtcaagaagagcagggatctggagcagcagctgcaggatgagctcctggaggtggtctcagagctccagacggccaagaagacgtaccaggcatatcacatggagagcgtgaatgccgaggccaagctccgggaggccgagcggcaggaggagaagcgggcaggcc

SEQ ID NO: 175832 - DNA, 1123 bp, Homo sapiens
  Payload ID: 14525
  Gene Symbol: ARHGAP4
  Gene Name: Rho GTPase activating protein 4
  ENST ID: ENST00000461052
  CDS Start-End: 171-1123
tctcaaggctccctggggctccctgggcctctctgggggctgacttgggaagggaggaccccatcggatgtctgggggaaggaggcaacccagggggagtccagagcctggggcagcaatggtgttcatggccactggtacagtgggccagcggccccgctgtgaatgagatgcgctggcagctgagcgagcagctgcgctgcctggagctgcagggcgagctgcggcgggagttgctgcaggagctggcagagttcatgcggcgccgcgctgaggtggagctggaatactcccggggcctggaaaagctggccgagcgcttctccagccgtggaggccgcctggggagcagccgggagcaccaaagcttccggaaggagccgtccctcctgtcgcccttgcactgctgggcggtgctgctgcagcacacgcggcagcagagccgggagagcgcggccctgagtgaggtgctggccgggcccctggcccagcgcctgagtcacattgcagaggacgtggggcgcctggtcaagaagagcagggatctggagcagcagctgcaggatgagctcctggaggtggtctcagagctccagacggccaagaagacgtaccaggcatatcacatggagagcgtgaatgccgaggccaagctccgggaggccgagcggcaggaggagaagcgggcaggccggagtgtccccaccaccaccgctggtgccactgaggcagggcccctccgcaagagctccctcaagaagggagggaggctggtggagaagcggcaggccaagttcatggagcacaaactcaagtgcacaaaggcgcgcaacgagtacctgcttagcctggctagtgtcaacgctgctgtcagtaactactacctgcatgacgtcttggacctcatggactgctgtgacacagggttccacctggccctggggcaggtgctccggagctacacggccgctgagagccgcacccaagcctcccaagtgcagggcctgggcagcctggaagaagctgtggaggccctggatcctccaggggacaaagccaaggttctcgaggtgcatgctaccgtcttctgtcccccgctgcgctttgactaccacccccatga

SEQ ID NO: 175833 - DNA, 960 bp, Homo sapiens
  Payload ID: 14525
  Gene Symbol: ARHGAP4
  Gene Name: Rho GTPase activating protein 4
  ENST ID: ENST00000488269
  CDS Start-End: 128-960
tccgtgtgtttgcaagggaggctgccacctcccggagcctgggtaccggcgggaaaggaagtcgcaggggaaaccattcagaggctttccaggaacgagggagagacaggaagccaaactgaaagagatgcgctggcagctgagcgagcagctgcgctgcctggagctgcagggcgagctgcggcgggagttgctgcaggagctggcagagttcatgcggcgccgcgctgaggtggagctggaatactcccggggcctggaaaagctggccgagcgcttctccagccgtggaggccgcctggggagcagccgggagcaccaaagcttccggaaggagccgtccctcctgtcgcccttgcactgctgggcggtgctgctgcagcacacgcggcagcagagccgggagagcgcggccctgagtgaggtgctggccgggcccctggcccagcgcctgagtcacattgcagaggacgtggggcgcctggtcaagaagagcagggatctggagcagcagctgcaggatgagctcctggaggtggtctcagagctccagacggccaagaagacgtaccaggcatatcacatggagagcgtgaatgccgaggccaagctccgggaggccgagcggcaggaggagaagcgggcaggccggagtgtccccaccaccaccgctggtgccactgaggcagggcccctccgcaagagctccctcaagaagggagggaggctggtggagaagcggcaggccaagttcatggagcacaaactcaagtgcacaaaggcgcgcaacgagtacctgcttagcctggctagtgtcaacgctgctgtcagtaactactacctgcatgacgtcttggacctcatggactgctgtgacacagggttccacctggccctggggcaggtgctccggagctacacggccgctgagagccgcacccaagcctcccaagtgcaggg

SEQ ID NO: 175834 - DNA, 1825 bp, Homo sapiens
  Payload ID: 14526
  Gene Symbol: ARHGAP40
  Gene Name: Rho GTPase activating protein 40
  ENST ID: ENST00000243967
  CDS Start-End: 1-1777
aggggaagctgaatcccagtggctgcaggacacaggcctgtcgggcctccttggtggcctgggcttggatggtgatcaccaggagctcctgtccaccctgacacagacccaggtggccgctgtgtgccgccggctggacatctatgctcgctcagtgcgaagacaacacaagacacctgtcagagatgtcagggatgtctttggggtcttcaattcagggaaaatgtcgtcagagaatggcgactccggtatgaagggggcccagctcagttccggggcctctaagtttcctccagcagcagagcctggggggctgcaggagcaggctgggagggaagaagccttcaacatggactctgcctactcagaacaagctgcggtgctcctgcagaggagcaggccatcccggggaggcacctctgcctggggcaagtgttccctgccgaagtttaccgtccccaaaggcagacttggcgtgacgaggataggagacttgtccctgcaggatatgaggaaggtaccttctctggccctcatagagctgaccgcgctctgtgacatcctcggcttggacctgaagaggagcaaggcggggaagtggaaagcggcagaaactcgcctctttggtgtgccccttgacagcctgctagaagctgaccacaaagtcctccccagcacacaggtcccgctggtccttcaagccctgctgtcctgtttggaaaagagaggactggacatggaaggcattctcagggtgcccggatcccaggccagggtcaaggggctggaacagaaactggagagagacttctatgctggcctttttagctgggacgaggttcatcacaatgacgcctctgatttgctcaaaaggttcatccggaagctgccgacacctttgctcacggctgagtacctcccggccttcgccgtggtgcctaacatccccaacctgaagcagcgcctgcaggttcttcacctgctcatcctcatcctcccagaacccaacagaaatgccttaaaggcactgctggaattcctcaggaaggtggtggcccgggaacagcacaacaagatgactctgaggaatgtttccaccgtgatggcccctaacctctttctgcaccaagggcggccccccaagctccccaaaggcaaggagaagcagctggcagaaggggcagccgaggtggtgcagataatggtgcactaccaggatctgctgtggacggtcgcctctttcctggtcgcccaggtgcgaaaactgaacgacagtagcagcaggcgcccccagctctgcgacgcaggcctcaagacttggctgcggaggatgcacgcagacagggacaaggcgggggacggcctcgaggcgactcccaaggtggcaaagatccaggtggtctggcctatcaaggaccccttgaaggtgcctctcacccccagcaccaaagtggcccacgtcctgaggcagttcacagagcacctcagccctggttccaagggtcaagaagacagtgaggacatggacagcctccttctacaccataggtccatggagtcagccaacatcctcctctatgaagttggagggaatatcaatgagcatcgcctggacccagatgcctacctcttagatctgtaccgtgccaacccgcatggcaaaattgtttcgaaagtggccctacaatgtgtagtagcagcagcaccagagacaaaaccaggagagctctgtgaccttggacaagccccttgccctctcagaatcctttcaggatgaggggctagggcctcagggagaggaagccaagattgtagccatgaccag

SEQ ID NO: 175835 - DNA, 2841 bp, Homo sapiens
  Payload ID: 14526
  Gene Symbol: ARHGAP40
  Gene Name: Rho GTPase activating protein 40
  Uniprot ID: Q5TG30
  ENST ID: ENST00000373345
  CDS Start-End: 169-2037
tgccagcccatggccgagcctgccctcctccccgccgcccagatggagaggctggccccagggcccctagcctcaccgtgtcctcggatcccgcgggcccgcattgccaggcgctgcgcccagcgctgggccgacctgggctgcagctctggcccctcctcaggccgaatggatcagcttccccagaagaatctcctgcgactacaccctgctggctctgctggctgttccactggagtggagagctccagcatggatggcttttggatggaggtggaacagatccaacagagagatgagctgagggaagaggacagtggcgggaatgaaggccagcttccagaggaaggggaagctgaatcccagtggctgcaggacacaggcctgtcgggcctccttggtggcctgggcttggatggtgatcaccaggagctcctgtccaccctgacacagacccaggtggccgctgtgtgccgccggctggacatctatgctcgctcagtgcgaagacaacacaagacacctgtcagagatgtcagggatgtctttggggtcttcaattcagggaaaatgtcgtcagagaatggcgactccggtatgaagggggcccagctcagttccggggcctctaagtttcctccagcagcagagcctggggggctgcaggagcaggctgggagggaagaagccttcaacatggactctgcctactcagaacaagctgcggtgctcctgcagaggagcaggccatcccggggaggcacctctgcctggggcaagtgttccctgccgaagtttaccgtccccaaaggcagacttggcgtgacgaggataggagacttgtccctgcaggatatgaggaaggtaccttctctggccctcatagagctgaccgcgctctgtgacatcctcggcttggacctgaagaggagcaaggcggggaagtggaaagcggcagaaactcgcctctttggtgtgccccttgacagcctgctagaagctgaccacaaagtcctccccagcacacaggtcccgctggtccttcaagccctgctgtcctgtttggaaaagagaggactggacatggaaggcattctcagggtgcccggatcccaggccagggtcaaggggctggaacagaaactggagagagacttctatgctggcctttttagctgggacgaggttcatcacaatgacgcctctgatttgctcaaaaggttcatccggaagctgccgacacctttgctcacggctgagtacctcccggccttcgccgtggtgcctaacatccccaacctgaagcagcgcctgcaggttcttcacctgctcatcctcatcctcccagaacccaacagaaatgccttaaaggcactgctggaattcctcaggaaggtggtggcccgggaacagcacaacaagatgactctgaggaatgtttccaccgtgatggcccctaacctctttctgcaccaagggcggccccccaagctccccaaaggcaaggagaagcagctggcagaaggggcagccgaggtggtgcagataatggtgcactaccaggatctgctgtggacggtcgcctctttcctggtcgcccaggtgcgaaaactgaacgacagtagcagcaggcgcccccagctctgcgacgcaggcctcaagacttggctgcggaggatgcacgcagacagggacaaggcgggggacggcctcgaggcgactcccaaggtggcaaagatccaggtggtctggcctatcaaggaccccttgaaggtgcctctcacccccagcaccaaagtggcccacgtcctgaggcagttcacagagcacctcagccctggttccaagggtcaagaagacagtgaggacatggacagcctccttctacaccataggtccatggagtcagccaacatcctcctctatgaagttggagggaatatcaatgagcatcgcctggacccagatgcctacctcttagatctgtaccgtgccaacccgcatggtgagtgggtccttaaacagaaccccacctaaaccctgcgagtctcaggagcagcctggatgcctcctcctctcccctgctggctctgtgtccatgtacccagcatgagaacaaagctattccaggggagggtctgagttttattccaaggcttccttttctgaaatgcctctcagacccctcagaaatagactcaggggtggtgctctctccactcagaggggatgaggggctagggcctcagggaggggaggccaacactgtagccatgatcagccctggaagaactggacagaggaagaacttcccttcacagctctcatgttttaaccgtgcacacaatgccctcactcccctccaccctccagccctccagagagttgcttcctacaccaagcttgctgtatgacgccaccacttggggcgcttggatctccatgggcttctgtctgtggcttccagactggaggaaaattaaaaatgcagtacctttatcaagaggtagttggggtcttttccccccaggcaaaattgtttcgaaagtggccctacaatgtgtagtagcagcagcaccagagacaaaaccaggagagctctgtgaccttggacaagccccttgccctctcagaatcctttcaggatgaggggctagggcctcagggagaggaagccaagattgtagccatgaccagccccgggagaaatggacagaggaagactttgcttcacagctctcatgctttacatgttgatttgtacaatcttgtcattttgtaatatgatataatatgtaaacgtaattgtttaaacagtaaaggcacaacaagttcaatgtc

SEQ ID NO: 175836 - DNA, 994 bp, Homo sapiens
  Payload ID: 14526
  Gene Symbol: ARHGAP40
  Gene Name: Rho GTPase activating protein 40
  ENST ID: ENST00000373346
  CDS Start-End: 1-463
gacggtcgcctctttcctggtcgcccaggtgcgaaaactgaacgacagtagcagcaggcgcccccagctctgcgacgcaggcctcaagacttggctgcggaggatgcacgcagacagggacaaggcgggggacggcctcgaggcgactcccaaggtggcaaagatccaggtggtctggcctatcaaggaccccttgaaggtgcctctcacccccagcaccaaagtggcccacgtcctgaggcagttcacagagcacctcagccctggttccaagggtcaagaagacagtgaggacatggacagcctccttctacaccataggtccatggagtcagccaacatcctcctctatgaagttggagggaatatcaatgagcatcgcctggacccagatgcctacctcttagatctgtaccgtgccaacccgcatggtgagtgggtccttaaacagaaccccacctaaaccctgcgagtctcaggagcagcctggatgcctcctcctctcccctgctggctctgtgtccatgtacccagcatgagaacaaagctattccaggggagggtctgagttttattccaaggcttccttttctgaaatgcctctcagacccctcagaaatagactcaggggtggtgctctctccactcagaggggatgaggggctagggcctcagggaggggaggccaacactgtagccatgatcagccctggaagaactggacagaggaagaacttcccttcacagctctcatgttttaaccgtgcacacaatgccctcactcccctccaccctccagccctccagagagttgcttcctacaccaagcttgctgtatgacgccaccacttggggcgcttggatctccatgggcttctgtctgtggcttccagactggaggaaaattaaaaatgcagtacctttatcaagaggtagttggggtcttttccccccaggcaaaattgtttcgaaagtggccctacaatgtgtagta

SEQ ID NO: 175837 - DNA, 534 bp, Homo sapiens
  Payload ID: 14526
  Gene Symbol: ARHGAP40
  Gene Name: Rho GTPase activating protein 40
  ENST ID: ENST00000414158
  CDS Start-End: 1-218
agcacctcagccctggttccaagggtcaagaagacagtgaggacatggacagcctccttctacaccataggtccatggagtcagccaacatcctcctctatgaagttggagggaatatcaatgagcatcgcctggacccagatgcctacctcttagatctgtaccgtgccaacccgcatgtccagtgctcggtaggtgttgtccttccagcgagttgacgtgggagcttggtgacgagagcatcttgctgagctgctcaaagggctctggcccatgtgatccagccacgccttgaacccacaaccaccgggggcgggagggcaggaagagaactcagaatggggaggcatggagtaatgatacccattgctgaagggtgggggcattgcagggacagcctctctgggaatcctctcatctcctacagtcccaggtctcacccttcctcttctcctctgccctgggtctgtatcctcaggccaggtgaggcttcgcttatttgttcacttaacaatgagtttactgagcatttaa

SEQ ID NO: 175838 - DNA, 4752 bp, Homo sapiens
  Payload ID: 14527
  Gene Symbol: ARHGAP42
  Gene Name: Rho GTPase activating protein 42
  Uniprot ID: A6NI28
  ENST ID: ENST00000298815
  CDS Start-End: 4-2628
gccatggggctgcccactctggagttcagcgattcctacttggacagcccagatttcagggagcgcttgcagtgtcacgagattgagctggagcgaaccaacaagttcatcaaggagctcattaaggacggctctctgctcattggggcgttgaggaatctgtctatggcagtgcagaaattttcccagtcattgcaagatttccagtttgaatgtattggtgatgctgaaacagatgatgaaattagtattgctcagtcactaaaagaatttgcaagactactcattgcagtagaagaagaaaggcgaagactgatccaaaacgctaacgatgtattaattgcaccacttgagaaatttcgaaaagaacagataggtgcagcaaaagatggaaagaagaagtttgacaaagagagtgaaaaatattactctatccttgaaaagcatttaaatttgtccgcaaagaaaaaggagtctcatttacaagaggcagatacacaaattgaccgagaacatcagaacttctatgaagcatcattagaatatgtctttaaaattcaagaggtccaagaaaaaaagaagtttgaatttgttgaaccgcttttgtcatttcttcagggcttatttactttttaccatgagggatatgaacttgcccaggaatttgcaccgtataagcaacagctgcagttcaacttgcagaatacaaggaataattttgaaagtactcgacaagaggtagagcggttgatgcaaaggatgaaatctgctaaccaggactacagaccacccagccagtggacgatggaaggctatctgtatgtccaggagaaacgaccgcttggttttacatggattaaacattattgtacatatgataagggaagtaaaacatttacaatgagtgtttcagaaatgaaatccagtgggaaaatgaatggccttgttactagctcaccggaaatgtttaaattaaaatcttgtatccgacgaaagacagattcaattgacaaacgattctgctttgacatagaagtagttgaaaggcatgggatcatcacgttacaggccttctcagaagctaataggaaactctggcttgaagccatggatgggaaggaaccgatttatactctgcctgccattataagcaagaaagaagaaatgtatttgaatgaagcagggttcaactttgtgagaaaatgcattcaagctgtggaaacaagaggtatcaccattttaggactctaccgaataggaggagtgaactccaaagttcaaaaactcatgaataccacattttctcctaaatcccctcctgatattgatattgatattgaactgtgggacaataagacgataacaagtgggctgaaaaactacctcaggtgccttgcagaaccactgatgacttacaagttgcacaaagattttatcattgctgttaaatctgatgatcaaaactacagggtggaggctgtacatgcattggtgcacaaattgccggagaaaaacagagagatgctggacatcttaataaagcatctggtcaaagtatcactacacagccaacaaaatctcatgactgtctcaaatcttggtgtcatatttggcccaactctaatgagagcacaggaagaaactgtggctgctatgatgaatattaaatttcagaatattgtggtagaaattctgatagagcactatgaaaagatttttcatactgctccagacccaagcattcctcttcctcagcctcagtctcgatctggatcccgaaggacacgagcaatctgcctctctacagggtctaggaagcccagagggaggtatactccatgcctggccgaacctgatagtgactcctatagcagcagcccagacagcacacctatggggagcattgagtcactctcttctcattcctctgaacaaaatagcactacaaagtcagcttcctgccagcccagggagaaatctggagggattccttggattgcaaccccatcatcttccaatggacagaaaagccttggtctgtggacaactagtcctgaatcaagttccagagaagatgcaaccaagacagatgcagaatcagactgccagagtgttgcttcagtcactagcccaggagacgtttccccacccatagacctagtcaagaaagagccttatgggctttcaggactgaaaagagcttctgcttcttctctcagatccatctctgcagctgaaggaaacaagagctacagtggatctattcaaagcttaacttctgtaggttccaaggagacacccaaagcttcaccaaacccagacctgcctccgaaaatgtgcaggagattaagactagacactgcctcaagcaatggctatcagcggcctggctcagtagtggcagcaaaagctcaactgtttgaaaatgttggttcacctaaaccagtttcttctgggcgccaagccaaagccatgtactcctgtaaagcagagcacagtcatgagctttccttcccacaaggagcaatattttctaatgtgtacccatcagtggaaccaggatggttaaaggcaacttatgaaggcaaaacaggactagttccagaaaattatgttgtcttcctctaatactatttagtggatggcagtatcttcatggtatccatggtaacgaataaatgctatgattttatctgacacagatacacggggatcagcccactaagtgaaaacagtcaatttctatcaagttcttcaccagcagactatgtagctccttattaatggaaaaaaagatttaaattgttggccattcttttttggttggtttcttattttaaaatatcttacttgtgaaaaatgtgtttttggataatatgtaactctccacaatgtcgcttccgtagcaattgtagagtttcaaatactgtgttaaatactgtatcccagaaatttggaaaccagaaatctgctatatggattttgagatctgtcctttactgcctggcattctctgaggatctctgaaattgttacttaaaaatgtaatttaaattgttcatttattgttttttttttcttagaaatatactgcttttatatatgattgttttgctggtcctaaacatttcaaggatgtaagtctttgttttaatataactttatttgttttccaagtagatgataatattcaaaagcaataatgtatatgatatctataaaggaagcaaaattaagtcatacactgattccactgtaaacaatctgtccagaattccagacaccttcagcaaactttttctgtaaaggcctgatagcaaatatttttgtggtgggttgaatttggcttatgggttatagtttgctgacacctagtttagagggtgtgtaaaactatcttcataactttgagatttttataaaattttacatgaaaatatactgataaattatatgcacatattttctaccagtagcattatagtggcatcatagaagaatatttaccaatgatggggaaactgtaaaactacagtatcaaggcatacaacttaaattccacttggaagattgtaaagtgtcaaagtattttaatgataatttaatttgggcttttgaaatgttcttctacaaatgaaaaagatgtttaaaaacgttacaagggaagctatgccttctgaagtctatccttagttgaaacagaaaataaacacaaaggtacaagatccttaaattattttgaaccacagaggttgaaattgttttgtgatcttcagcagaaataaaatctgtacatgattttcttttatgccttttagtttacagtctttattagcaatttcagtgaatttgtagagcatagtaataggtatttactgtccacttatatatatcagcatctggtcatgcacgaaccattaattctatatttctatttcaataattctaatatattatttctataaatgtaatatctgtatgtggcaaagagcctttcttctcaagatcctgaaaagctggttacctgccctttgagtgccacagtcctgaactgcttgttcttgacatcttgcatattacttcagagttccccactgtgcagactctcaggtattaactgtaaaaaactctttacatgccattattatctgtaatctctatctcttctactttaaattaatgtttctagaattaataggttaaatacacatacacacacacaactatgcctcagaaaagttaggcttttacaaataaaaagaataagattagaattaacaagtagagagaataacggtaggcagagtcagaatcaggaataaatatcagtgaatcaaaagaatgaaaaatattatgtaataaaaattagcaatgtaatgtaaacgtttgataaaagagtatctttttcttttatctcttactgttgacctctgtgcactgtaataaggtgtgttgctggatcttcttggtcgaggtccttggtgaccttagtagtaataacagcattgctgacaccctaattgccctctgctggaacagaaggtagttttccagtgtaccagtcccttagtctatacagcacccttggtttaagcacacttgccatcatctggtatcctgctagactagaatctcttaaaagcaaattggttttctttcaaagaccaacttgactccaaagagagattcagaatcctacttctcctgctgctgcataaagaatctcaaccttcattttatttgaacacggac

SEQ ID NO: 175839 - DNA, 5685 bp, Homo sapiens
  Payload ID: 14527
  Gene Symbol: ARHGAP42
  Gene Name: Rho GTPase activating protein 42
  ENST ID: ENST00000524892
  CDS Start-End: 27-2549
cggccgccgctggcagcgcctgtgccatggggctgcccactctggagttcagcgattcctacttggacagcccagatttcagggagcgcttgcagtgtcacgagattgagctggagcgaaccaacaagttcatcaaggagctcattaaggacggctctctgctcattggggcgttgaggaatctgtctatggcagtgcagaaattttcccagtcattgcaagatttccagtttgaatgtattggtgatgctgaaacagatgatgaaattagtattgctcagtcactaaaagaatttgcaagactactcattgcagtagaagaagaaaggcgaagactgatccaaaacgctaacgatgtattaattgcaccacttgagaaatttcgaaaagaacagataggtgcagcaaaagcagatacacaaattgaccgagaacatcagaacttctatgaagcatcattagaatatgtctttaaaattcaagaggtccaagaaaaaaagaagtttgaatttgttgaaccgcttttgtcatttcttcagggcttatttactttttaccatgagggatatgaacttgcccaggaatttgcaccgtataagcaacagctgcagttcaacttgcagaatacaaggaataattttgaaagtactcgacaagaggtagagcggttgatgcaaaggatgaaatctgctaaccaggactacagaccacccagccagtggacgatggaaggctatctgtatgtccaggagaaacgaccgcttggttttacatggattaaacattattgtacatatgataagggaagtaaaacatttacaatgagtgtttcagaaatgaaatccagtgggaaaatgaatggccttgttactagctcaccggaaatgtttaaattaaaatcttgtatccgacgaaagacagattcaattgacaaacgattctgctttgacatagaagtagttgaaaggcatgggatcatcacgttacaggccttctcagaagctaataggaaactctggcttgaagccatggatgggaaggaaccgatttatactctgcctgccattataagcaagaaagaagaaatgtatttgaatgaagcagggttcaactttgtgagaaaatgcattcaagctgtggaaacaagaggtatcaccattttaggactctaccgaataggaggagtgaactccaaagttcaaaaactcatgaataccacattttctcctaaatcccctcctgatattgatattgatattgaactgtgggacaataagacgataacaagtgggctgaaaaactacctcaggtgccttgcagaaccactgatgacttacaagttgcacaaagattttatcattgctgttaaatctgatgatcaaaactacagggtggaggctgtacatgcattggtgcacaaattgccggagaaaaacagagagatgctggacatcttaataaagcatctggtcaaagtatcactacacagccaacaaaatctcatgactgtctcaaatcttggtgtcatatttggcccaactctaatgagagcacaggaagaaactgtggctgctatgatgaatattaaatttcagaatattgtggtagaaattctgatagagcactatgaaaagatttttcatactgctccagacccaagcattcctcttcctcagcctcagtctcgatctggatcccgaaggacacgagcaatctgcctctctacagggtctaggaagcccagagggaggtatactccatgcctggccgaacctgatagtgactcctatagcagcagcccagacagcacacctatggggagcattgagtcactctcttctcattcctctgaacaaaatagcactacaaagtcagcttcctgccagcccagggagaaatctggagggattccttggattgcaaccccatcatcttccaatggacagaaaagccttggtctgtggacaactagtcctgaatcaagttccagagaagatgcaaccaagacagatgcagaatcagactgccagagtgttgcttcagtcactagcccaggagacgtttccccacccatagacctagtcaagaaagagccttatgggctttcaggactgaaaagagcttctgcttcttctctcagatccatctctgcagctgaaggaaacaagagctacagtggatctattcaaagcttaacttctgtaggttccaaggagacacccaaagcttcaccaaacccagacctgcctccgaaaatgtgcaggagattaagactagacactgcctcaagcaatggctatcagcggcctggctcagtagtggcagcaaaagctcaactgtttgaaaatgttggttcacctaaaccagtttcttctgggcgccaagccaaagccatgtactcctgtaaagcagagcacagtcatgagctttccttcccacaaggagcaatattttctaatgtgtacccatcagtggaaccaggatggttaaaggcaacttatgaaggcaaaacaggactagttccagaaaattatgttgtcttcctctaatactatttagtggatggcagtatcttcatggtatccatggtaacgaataaatgctatgattttatctgacacagatacacggggatcagcccactaagtgaaaacagtcaatttctatcaagttcttcaccagcagactatgtagctccttattaatggaaaaaaagatttaaattgttggccattcttttttggttggtttcttattttaaaatatcttacttgtgaaaaatgtgtttttggataatatgtaactctccacaatgtcgcttccgtagcaattgtagagtttcaaatactgtgttaaatactgtatcccagaaatttggaaaccagaaatctgctatatggattttgagatctgtcctttactgcctggcattctctgaggatctctgaaattgttacttaaaaatgtaatttaaattgttcatttattgttttttttttcttagaaatatactgcttttatatatgattgttttgctggtcctaaacatttcaaggatgtaagtctttgttttaatataactttatttgttttccaagtagatgataatattcaaaagcaataatgtatatgatatctataaaggaagcaaaattaagtcatacactgattccactgtaaacaatctgtccagaattccagacaccttcagcaaactttttctgtaaaggcctgatagcaaatatttttgtggtgggttgaatttggcttatgggttatagtttgctgacacctagtttagagggtgtgtaaaactatcttcataactttgagatttttataaaattttacatgaaaatatactgataaattatatgcacatattttctaccagtagcattatagtggcatcatagaagaatatttaccaatgatggggaaactgtaaaactacagtatcaaggcatacaacttaaattccacttggaagattgtaaagtgtcaaagtattttaatgataatttaatttgggcttttgaaatgttcttctacaaatgaaaaagatgtttaaaaacgttacaagggaagctatgccttctgaagtctatccttagttgaaacagaaaataaacacaaaggtacaagatccttaaattattttgaaccacagaggttgaaattgttttgtgatcttcagcagaaataaaatctgtacatgattttcttttatgccttttagtttacagtctttattagcaatttcagtgaatttgtagagcatagtaataggtatttactgtccacttatatatatcagcatctggtcatgcacgaaccattaattctatatttctatttcaataattctaatatattatttctataaatgtaatatctgtatgtggcaaagagcctttcttctcaagatcctgaaaagctggttacctgccctttgagtgccacagtcctgaactgcttgttcttgacatcttgcatattacttcagagttccccactgtgcagactctcaggtattaactgtaaaaaactctttacatgccattattatctgtaatctctatctcttctactttaaattaatgtttctagaattaataggttaaatacacatacacacacacaactatgcctcagaaaagttaggcttttacaaataaaaagaataagattagaattaacaagtagagagaataacggtaggcagagtcagaatcaggaataaatatcagtgaatcaaaagaatgaaaaatattatgtaataaaaattagcaatgtaatgtaaacgtttgataaaagagtatctttttcttttatctcttactgttgacctctgtgcactgtaataaggtgtgttgctggatcttcttggtcgaggtccttggtgaccttagtagtaataacagcattgctgacaccctaattgccctctgctggaacagaaggtagttttccagtgtaccagtcccttagtctatacagcacccttggtttaagcacacttgccatcatctggtatcctgctagactagaatctcttaaaagcaaattggttttctttcaaagaccaacttgactccaaagagagattcagaatcctacttctcctgctgctgcataaagaatctcaaccttcattttatttgaacacggaccaaagtgttcctgcttctgagttgtctgtaagctaattctgcagatgttccattcagatttaaagcttttttactgcataggatgtggataggaagcctaactattgtatctgatggcaaggcatatgttgcagccacagtactggctatggtccctttgctgaaacaagctacagaagcactgattcaagttgtgcttgtgcttgaacttttaatcttctagatttgtgaggatggctctttttccttcataatggattacaatgtaagcaagtcatggccatatactggagacgggctaaagctgcttttcccttaaagtaagtttcctacagataaggtatttatgagcactgagaaagtcaggacatgtactctaaatcacacagaatgttaattccacaggaaggcaatgccagacattgaaagaggatcacattcaacttttaatagtagttcaataacaaaaccttagcttttcaggaacaatgtgaagatacattagaattgccacatccatatcttcaaaacacgcaacctctgcaccctaataactgcttacggtataatcagtatgatgatgagattgagggggtctaaatttaagttccttatctcctgagttatgtgaaaatatccctcagtacaaaacatttgtgtgtttcacagatgactctcttgttttgccgtaatgctaccaagtttatggaaactagtcaactgaaggatttttctgttgtgttatgtgtaaatgtctgaacagtaaaatcatctgtgtattcctgtaacattcacgaagtatgaggaagtgggtttctccttgtttgatgtgagtggttttgcttgttgcatgggttccctgtgctttgtaacttgcatgaacacaaccaggtttctcaacaatgatttgtctgctgactcttttcagagatagtgaaggaaaaaaaatgtattaaaaccccaaattatctaggtttccaagtaggaaaaataaagatacatatgactttta

SEQ ID NO: 175840 - DNA, 690 bp, Homo sapiens
  Payload ID: 14527
  Gene Symbol: ARHGAP42
  Gene Name: Rho GTPase activating protein 42
  ENST ID: ENST00000531183
  CDS Start-End: 1-690
cttgaaaagcatttaaatttgtccgcaaagaaaaaggagtctcatttacaagaggcagatacacaaattgaccgagaacatcagaacttctatgaagcatcattagaatatgtctttaaaattcaagaggtccaagaaaaaaagaagtttgaatttgttgaaccgcttttgtcatttcttcagggcttatttactttttaccatgagggatatgaacttgcccaggaatttgcaccgtataagcaacagctgcagttcaacttgcagaatacaaggaataattttgaaagtactcgacaagaggtagagcggttgatgcaaaggatgaaatctgctaaccaggactacagaccacccagccagtggacgatggaaggctatctgtatgtccaggagaaacgaccgcttggttttacatggattaaacattattgtacatatgataagggaagtaaaacatttacaatgagtgtttcagaaatgaaatccagtgggaaaatgaatggccttgttactagctcaccggaaatgtttaaattaaaatcttgtatccgacgaaagacagattcaattgacaaacgattctgctttgacatagaagtagttgaaaggcatgggatcatcacgttacaggccttctcagaagctaataggaaactctggcttgaagccatggatgggaaggaaccg

SEQ ID NO: 175841 - DNA, 1843 bp, Homo sapiens
  Payload ID: 14527
  Gene Symbol: ARHGAP42
  Gene Name: Rho GTPase activating protein 42
  ENST ID: ENST00000529535
  CDS Start-End: 1-1331
aaacacctaatgcgatttctctcttattttcagtgtatttgaatgaagcagggttcaactttgtgagaaaatgcattcaagctgtggaaacaagaggtatcaccattttaggactctaccgaataggaggagtgaactccaaagttcaaaaactcatgaataccacattttctcctaaatcccctcctgatattgatattgatattgaactgtgggacaataagacgataacaagtgggctgaaaaactacctcaggtgccttgcagaaccactgatgacttacaagttgcacaaagattttatcattgctgttaaatctgatgatcaaaactacagggtggaggctgtacatgcattggtgcacaaattgccggagaaaaacagagagatgctggacatcttaataaagcatctggtcaaagtatcactacacagccaacaaaatctcatgactgtctcaaatcttggtgtcatatttggcccaactctaatgagagcacaggaagaaactgtggctgctatgatgaatattaaatttcagaatattgtggtagaaattctgatagagcactatgaaaagatttttcatactgctccagacccaagcattcctcttcctcagcctcagtctcgatctggatcccgaaggacacgagcaatctgcctctctacagggtctaggaagcccagagggaggtatactccatgcctggccgaacctgatagtgactcctatagcagcagcccagacagcacacctatggggagcattgagtcactctcttctcattcctctgaacaaaatagcactacaaagtcagcttcctgccagcccagggagaaatctggagggattccttggattgcaaccccatcatcttccaatggacagaaaagccttggtctgtggacaactagtcctgaatcaagttccagagaagatgcaaccaagacagatgcagaatcagactgccagagtgttgcttcagtcactagcccaggagacgtttccccacccatagacctagtcaagaaagagccttatgggctttcaggactgaaaagagcttctgcttcttctctcagatccatctctgcagctgaaggaaacaagagctacagtggatctattcaaagcttaacttctgtaggttccaaggagacacccaaagcttcaccaaacccagacctgcctccgaaaatgtgcaggagattaagactagacactgcctcaagcaatggctatcagcggcctggctcagtagtggcagcaaaagctcaactgtttgaaaatgttggttcacctaaaccagtttcttctgggcgctaacatttcctgagttatactactaagcatcagacatcgttcgtggagattttattgtgtctaggggagaagataaaaatatcagcaataataacaaaataccagatactaacaccatgcagacttgaagcaggaagatatgatagttccctgggcagctatttcagagaaggcctgaccttcagcaaagttcttgaaatttaagatgaacctgaagtacatggccatgtgaagatcaagaggaaaacatctcaggacatggacatagctggcctgagccaagccaaagccatgtactcctgtaaagcagagcacagtcatgagctttccttcccacaaggagcaatattttctaatgtgtacccatcagtggaaccaggatggttaaaggcaacttatgaaggcaaaacaggactagttccagaaaattatgttgtcttcctctaatactatttagtggatggcagtatcttcatggtatccatggtaacgaataaatgctatgattttatctg

SEQ ID NO: 175842 - DNA, 3001 bp, Homo sapiens
  Payload ID: 14528
  Gene Symbol: ARHGAP44
  Gene Name: Rho GTPase activating protein 44
  ENST ID: ENST00000262444
  CDS Start-End: 80-2404
gagccatgtaaccctgcggcgggctccgggctgctccgtccttccccagctcccgggctagcgcggcagcggggccacgatgaagaagcagttcaatcgcatgcgccagctggccaaccagacggtgggcagggctgaaaagacagaagttttgagtgaagaccttcttcaggtggagaagcgtctggagctggtgaaacaggtgtcccacagcacgcacaagaagctcaccgcatgtctgcagggccagcaaggggcagaggctgacaagcgctccaaaaagttgcctttgacaacactggctcagtgtctgatggaggggtcagctatcctgggagatgacacacttcttgggaagatgctgaaactctgtggagagacggaggacaagctggctcaggagctgatacattttgagttgcaagtagagagagacgtgattgagcccctgtttttgctggcggaggtggaaatcccaaatattcaaaagcagaggaaacacttagccaagttggtgctggacatggattcctcacgaaccaggtggcagcagacttccaagtcttcaggtttgtccagcagcttacagcctgcgggtgccaaggctgatgccctcagggaagaaatggaagaggctgccaacagagtggagatttgcagggaccagctctcagctgatatgtacagttttgtggccaaagaaattgactatgcaaactactttcaaacgctaatagaagtgcaagctgaataccacaggaagtccctgacactattgcaggctgtattgcctcagatcaaagcacaacaggaggcctgggtagagaagccttccttcgggaagccgctggaggagcacctcaccatcagcggccgggagatcgccttccccatcgaggcgtgtgtgaccatgctgcttgagtgtgggatgcaggaggagggactcttccgagtagccccctctgcctccaaactgaagaagctgaaagcggccctggactgctgcgtggtggatgtgcaggagtactcggcagacccccacgcaattgcaggagctttgaaatcttacctccgagagttgccagaacctcttatgacctttgaactctatgatgagtggatccaggcttccaatgtccaggagcaagacaagaagcttcaggctctatggaatgcttgtgaaaagttgcccaaggccaatcacaacaacatccgatacttgataaaatttttatccaagctgtcagaatatcaagatgtaaacaagatgactcccagtaatatggcaattgttttaggacccaacctcctatggccacaagcagaagggaacattacagagatgatgaccacagtgtcgctgcaaattgttgggatcattgaacctatcatccagcatgcagactggttcttccctggggagatagagttcaacattactggcaattatgggagtccagtacacgtgaaccataatgccaactacagctcaatgccctccccagacatggaccctgctgaccggcgccagcccgagcaggcccgccggcccctcagcgtcgccacggataatatgatgctggagttttacaaaaaggatggccttaggaaaatccaaagcatgggtgtgagggtcatggacacaaactgggtggctcgaagaggctcctcggccggtcggaaagtgtcctgcgccccgccctccatgcagcctcccgccccgcccgccgagctggctgcgcccctgccttcgccgctgccggagcagcccctggacagccccgcggcccccgcgctctctccatccggcctgggcctccagcctgggcccgagcgcaccagcacaacaaaaagcaaggaactttctccaggctctgcacagaaaggaagtccaggctccagccagggcacagcctgtgcagggactcaaccaggggctcaacctggagctcagccgggcgccagccccagccccagccagccgcctgcagaccagagtcctcacaccctccggaaagtttcaaagaagctggcaccgattccacccaaggtcccctttggccagccgggggctatggcagaccagtccgctggccagccgtccccagtcagcctgtcccccaccccgcccagcaccccgtcaccctatggactgagctaccctcaggggtactccttggcctcgggccagctctccccagctgcagctcctcccctggcctctccttctgtctttacaagcactttgagcaaatcgcggcccactcctaagccgcgacagagacctactctgccgcctcctcagcctcccacagtaaacctctcggcctctagtccacagtccacggaggcccccatgctagatggcatgtcccctggggaaagcatgtctacagctgtgtgacatgagtggcgcagttttggatacgtgtgagggggattttcaggatcttgtccactttgatattccctcgatccacatagagctcgggtcgacgctccgcctgagtcccctggagcacatgcggcgacactcagtaactgacaagagggactcggaggaggagtctgagagcaccgccctctgacatgacaccgcccatcctgcctcgcgtgtacatacatcacgggccctaggaacgccgccaggagcagcgtccatgagcttgccaagtgttctctgctggctctttcctgccactgccaacacgaggttggaatttggcagaaaattgtgatctccagtccgtgtggtgatgctggtggtgcaggttttgtttgttcctttcgggtggtgacttcggccttttgtttgacctttgccttttgactttgtgcctcttttgatccactttcagcctccatgccagaaaacacccacctctccatccaaggctggtcaggaacgtcctttgcagggtcggggtggtgcgggagaggctcactttgcctggttagacccaagggctgctaccttttccttggacggctcatgtcaggt

SEQ ID NO: 175843 - DNA, 4211 bp, Homo sapiens
  Payload ID: 14528
  Gene Symbol: ARHGAP44
  Gene Name: Rho GTPase activating protein 44
  Uniprot ID: Q17R89
  ENST ID: ENST00000340825
  CDS Start-End: 301-2739
gactgggagcaggcagcccgggcggagcgggccggtgccgaggacggccccaggcattgctctgccccgggcattgcgcggcgcgcgtgagggggatgcggcaggaggcggcgcggcgggaggagtaggcggcggcgccctcgggagggagctgcgcgcgggccagacggcgcccggaggctccgcagtgccgccgccgtcgcccgggaggctccgcgcgggagccatgtaaccctgcggcgggctccgggctgctccgtccttccccagctcccgggctagcgcggcagcggggccacgatgaagaagcagttcaatcgcatgcgccagctggccaaccagacggtgggcagggctgaaaagacagaagttttgagtgaagaccttcttcaggtggagaagcgtctggagctggtgaaacaggtgtcccacagcacgcacaagaagctcaccgcatgtctgcagggccagcaaggggcagaggctgacaagcgctccaaaaagttgcctttgacaacactggctcagtgtctgatggaggggtcagctatcctgggagatgacacacttcttgggaagatgctgaaactctgtggagagacggaggacaagctggctcaggagctgatacattttgagttgcaagtagagagagacgtgattgagcccctgtttttgctggcggaggtggaaatcccaaatattcaaaagcagaggaaacacttagccaagttggtgctggacatggattcctcacgaaccaggtggcagcagacttccaagtcttcaggtttgtccagcagcttacagcctgcgggtgccaaggctgatgccctcagggaagaaatggaagaggctgccaacagagtggagatttgcagggaccagctctcagctgatatgtacagttttgtggccaaagaaattgactatgcaaactactttcaaacgctaatagaagtgcaagctgaataccacaggaagtccctgacactattgcaggctgtattgcctcagatcaaagcacaacaggaggcctgggtagagaagccttccttcgggaagccgctggaggagcacctcaccatcagcggccgggagatcgccttccccatcgaggcgtgtgtgaccatgctgcttgagtgtgggatgcaggaggagggactcttccgagtagccccctctgcctccaaactgaagaagctgaaagcggccctggactgctgcgtggtggatgtgcaggagtactcggcagacccccacgcaattgcaggagctttgaaatcttacctccgagagttgccagaacctcttatgacctttgaactctatgatgagtggatccaggcttccaatgtccaggagcaagacaagaagcttcaggctctatggaatgcttgtgaaaagttgcccaaggccaatcacaacaacatccgatacttgataaaatttttatccaagctgtcagaatatcaagatgtaaacaagatgactcccagtaatatggcaattgttttaggacccaacctcctatggccacaagcagaagggaacattacagagatgatgaccacagtgtcgctgcaaattgttgggatcattgaacctatcatccagcatgcagactggttcttccctggggagatagagttcaacattactggcaattatgggagtccagtacacgtgaaccataatgccaactacagctcaatgccctccccagacatggaccctgctgaccggcgccagcccgagcaggcccgccggcccctcagcgtcgccacggataatatgatgctggagttttacaaaaaggatggcatgggtgtgagggtcatggacacaaactgggtggctcgaagaggctcctcggccggtcggaaagtgtcctgcgccccgccctccatgcagcctcccgccccgcccgccgagctggctgcgcccctgccttcgccgctgccggagcagcccctggacagccccgcggcccccgcgctctctccatccggcctgggcctccagcctgggcccgagcgcaccagcacaacaaaaagcaaggaactttctccaggctctgcacagaaaggaagtccaggctccagccagggcacagcctgtgcagggactcaaccaggggctcaacctggagctcagccgggcgccagccccagccccagccagccgcctgcagaccagagtcctcacaccctccggaaagtttcaaagaagctggcaccgattccacccaaggtcccctttggccagccgggggctatggcagaccagtccgctggccagccgtccccagtcagcctgtcccccaccccgcccagcaccccgtcaccctatggactgagctaccctcaggggtactccttggcctcgggccagctctccccagctgcagctcctcccctggcctctccttctgtctttacaagcactttgagcaaatcgcggcccactcctaagccgcgacagagacctactctgccgcctcctcagcctcccacagtaaacctctcggcctctagtccacagtccacggaggcccccatgctagatggcatgtcccctggggaaagcatgtctacagatcttgtccactttgatattccctcgatccacatagagctcgggtcgacgctccgcctgagtcccctggagcacatgcggcgacactcagtaactgacaagagggactcggaggaggagtctgagagcaccgccctctgacatgacaccgcccatcctgcctcgcgtgtacatacatcacgggccctaggaacgccgccaggagcagcgtccatgagcttgccaagtgttctctgctggctctttcctgccactgccaacacgaggttggaatttggcagaaaattgtgatctccagtccgtgtggtgatgctggtggtgcaggttttgtttgttcctttcgggtggtgacttcggccttttgtttgacctttgccttttgactttgtgcctcttttgatccactttcagcctccatgccagaaaacacccacctctccatccaaggctggtcaggaacgtcctttgcagggtcggggtggtgcgggagaggctcactttgcctggttagacccaagggctgctaccttttccttggacggctcatgtcaggtcttgcaggatcagtttaatggccacagaaaggaagcaggacagcagggcccctctcacccacaactggaccaggtccaggattctagcagtcctggggcactgacctttgccagctacctgggggagggcttgccactggaaaacctttcaggccgcccccatcagtgggctccaaagtaaatggctgaaaacaaaaatgtttcacttcctaacagttttcctttttccactgtgtgactgaaagctcctatatcattttatatttctgaatctataaaacaaaacaaacaagcctgacagtgtctggaggagccaaaggtggcctccctgtccccaaatatattggctatatgagagtaattttacccctctacgtacctaaaggcacccagttcactagtctgtggggtcctggagcctgtctcttctttctggaggttcaaactgaatagcaataattacgttacccaaagcatgtggaggaaaagtgaaaccagccacggagacgctggcccacgggctcggcctgcggtgtggcctgctttgctcaccagcgtcagccgctcatttccttctcatgaagtcccatctggtcatggggacgagggccgggagggcaccgggtagccttttcacacttggggattaggggagtgagaaaagatttgggccatgcatgcaaagtcaaagtttaaaattttatccttttcaaatagatgatataatatacctatacatgatataatatttgtatatatgaaatctctctatatttgtttaatttgagccattcaatctaaaccaatgtacaggtgtacaatgaaaaatttaaatgcttagttatttttcccaacacagtgtaaagtcaccctcctctgagagtgggatgtgcagagttttgatgttgcagctttgctcacttcctggcaagggcaggtcatgcctcaatttgtaatgggagtctggggtaagggtgggggttgaaagttgttatctttaaatacatgtacaaatcgttgtcaaaagtaacgttattaaaatagatttattatccctga

SEQ ID NO: 175844 - DNA, 4228 bp, Homo sapiens
  Payload ID: 14528
  Gene Symbol: ARHGAP44
  Gene Name: Rho GTPase activating protein 44
  Uniprot ID: Q17R89
  ENST ID: ENST00000379672
  CDS Start-End: 301-2757
gactgggagcaggcagcccgggcggagcgggccggtgccgaggacggccccaggcattgctctgccccgggcattgcgcggcgcgcgtgagggggatgcggcaggaggcggcgcggcgggaggagtaggcggcggcgccctcgggagggagctgcgcgcgggccagacggcgcccggaggctccgcagtgccgccgccgtcgcccgggaggctccgcgcgggagccatgtaaccctgcggcgggctccgggctgctccgtccttccccagctcccgggctagcgcggcagcggggccacgatgaagaagcagttcaatcgcatgcgccagctggccaaccagacggtgggcagggctgaaaagacagaagttttgagtgaagaccttcttcaggtggagaagcgtctggagctggtgaaacaggtgtcccacagcacgcacaagaagctcaccgcatgtctgcagggccagcaaggggcagaggctgacaagcgctccaaaaagttgcctttgacaacactggctcagtgtctgatggaggggtcagctatcctgggagatgacacacttcttgggaagatgctgaaactctgtggagagacggaggacaagctggctcaggagctgatacattttgagttgcaagtagagagagacgtgattgagcccctgtttttgctggcggaggtggaaatcccaaatattcaaaagcagaggaaacacttagccaagttggtgctggacatggattcctcacgaaccaggtggcagcagacttccaagtcttcaggtttgtccagcagcttacagcctgcgggtgccaaggctgatgccctcagggaagaaatggaagaggctgccaacagagtggagatttgcagggaccagctctcagctgatatgtacagttttgtggccaaagaaattgactatgcaaactactttcaaacgctaatagaagtgcaagctgaataccacaggaagtccctgacactattgcaggctgtattgcctcagatcaaagcacaacaggaggcctgggtagagaagccttccttcgggaagccgctggaggagcacctcaccatcagcggccgggagatcgccttccccatcgaggcgtgtgtgaccatgctgcttgagtgtgggatgcaggaggagggactcttccgagtagccccctctgcctccaaactgaagaagctgaaagcggccctggactgctgcgtggtggatgtgcaggagtactcggcagacccccacgcaattgcaggagctttgaaatcttacctccgagagttgccagaacctcttatgacctttgaactctatgatgagtggatccaggcttccaatgtccaggagcaagacaagaagcttcaggctctatggaatgcttgtgaaaagttgcccaaggccaatcacaacaacatccgatacttgataaaatttttatccaagctgtcagaatatcaagatgtaaacaagatgactcccagtaatatggcaattgttttaggacccaacctcctatggccacaagcagaagggaacattacagagatgatgaccacagtgtcgctgcaaattgttgggatcattgaacctatcatccagcatgcagactggttcttccctggggagatagagttcaacattactggcaattatgggagtccagtacacgtgaaccataatgccaactacagctcaatgccctccccagacatggaccctgctgaccggcgccagcccgagcaggcccgccggcccctcagcgtcgccacggataatatgatgctggagttttacaaaaaggatggccttaggaaaatccaaagcatgggtgtgagggtcatggacacaaactgggtggctcgaagaggctcctcggccggtcggaaagtgtcctgcgccccgccctccatgcagcctcccgccccgcccgccgagctggctgcgcccctgccttcgccgctgccggagcagcccctggacagccccgcggcccccgcgctctctccatccggcctgggcctccagcctgggcccgagcgcaccagcacaacaaaaagcaaggaactttctccaggctctgcacagaaaggaagtccaggctccagccagggcacagcctgtgcagggactcaaccaggggctcaacctggagctcagccgggcgccagccccagccccagccagccgcctgcagaccagagtcctcacaccctccggaaagtttcaaagaagctggcaccgattccacccaaggtcccctttggccagccgggggctatggcagaccagtccgctggccagccgtccccagtcagcctgtcccccaccccgcccagcaccccgtcaccctatggactgagctaccctcaggggtactccttggcctcgggccagctctccccagctgcagctcctcccctggcctctccttctgtctttacaagcactttgagcaaatcgcggcccactcctaagccgcgacagagacctactctgccgcctcctcagcctcccacagtaaacctctcggcctctagtccacagtccacggaggcccccatgctagatggcatgtcccctggggaaagcatgtctacagatcttgtccactttgatattccctcgatccacatagagctcgggtcgacgctccgcctgagtcccctggagcacatgcggcgacactcagtaactgacaagagggactcggaggaggagtctgagagcaccgccctctgacatgacaccgcccatcctgcctcgcgtgtacatacatcacgggccctaggaacgccgccaggagcagcgtccatgagcttgccaagtgttctctgctggctctttcctgccactgccaacacgaggttggaatttggcagaaaattgtgatctccagtccgtgtggtgatgctggtggtgcaggttttgtttgttcctttcgggtggtgacttcggccttttgtttgacctttgccttttgactttgtgcctcttttgatccactttcagcctccatgccagaaaacacccacctctccatccaaggctggtcaggaacgtcctttgcagggtcggggtggtgcgggagaggctcactttgcctggttagacccaagggctgctaccttttccttggacggctcatgtcaggtcttgcaggatcagtttaatggccacagaaaggaagcaggacagcagggcccctctcacccacaactggaccaggtccaggattctagcagtcctggggcactgacctttgccagctacctgggggagggcttgccactggaaaacctttcaggccgcccccatcagtgggctccaaagtaaatggctgaaaacaaaaatgtttcacttcctaacagttttcctttttccactgtgtgactgaaagctcctatatcattttatatttctgaatctataaaacaaaacaaacaagcctgacagtgtctggaggagccaaaggtggcctccctgtccccaaatatattggctatatgagagtaattttacccctctacgtacctaaaggcacccagttcactagtctgtggggtcctggagcctgtctcttctttctggaggttcaaactgaatagcaataattacgttacccaaagcatgtggaggaaaagtgaaaccagccacggagacgctggcccacgggctcggcctgcggtgtggcctgctttgctcaccagcgtcagccgctcatttccttctcatgaagtcccatctggtcatggggacgagggccgggagggcaccgggtagccttttcacacttggggattaggggagtgagaaaagatttgggccatgcatgcaaagtcaaagtttaaaattttatccttttcaaatagatgatataatatacctatacatgatataatatttgtatatatgaaatctctctatatttgtttaatttgagccattcaatctaaaccaatgtacaggtgtacaatgaaaaatttaaatgcttagttatttttcccaacacagtgtaaagtcaccctcctctgagagtgggatgtgcagagttttgatgttgcagctttgctcacttcctggcaagggcaggtcatgcctcaatttgtaatgggagtctggggtaagggtgggggttgaaagttgttatctttaaatacatgtacaaatcgttgtcaaaagtaacgttattaaaatagatttattatccctg

SEQ ID NO: 175845 - DNA, 2533 bp, Homo sapiens
  Payload ID: 14528
  Gene Symbol: ARHGAP44
  Gene Name: Rho GTPase activating protein 44
  ENST ID: ENST00000544416
  CDS Start-End: 80-1855
gagccatgtaaccctgcggcgggctccgggctgctccgtccttccccagctcccgggctagcgcggcagcggggccacgatgaagaagcagttcaatcgcatgcgccagctggccaaccagacggtgggcagggctgaaaagacagaagttttgagtgaagaccttcttcaggtggagaagcgtctggagctggtgaaacaggtgtcccacagcacgcacaagaagctcaccgcatgtctgcagggccagcaaggggcagaggctgacaagcgctccaaaaagttgcctttgacaacactggctcagtgtctgatggaggggtcagctatcctgggagatgacacacttcttgggaagatgctgaaactctgtggagagacggaggacaagctggctcaggagctgatacattttgagttgcaagtagagagagacgtgattgagcccctgtttttgctggcggaggtggaaatcccaaatattcaaaagcagaggaaacacttagccaagttggtgctggacatggattcctcacgaaccaggtggcagcagacttccaagtcttcaggtttgtccagcagcttacagcctgcgggtgccaaggctgatgccctcagggaagaaatggaagaggctgccaacagagtggagatttgcagggaccagctctcagctgatatgtacagttttgtggccaaagaaattgactatgcaaactactttcaaacgctaatagaagtgcaagctgaataccacaggaagtccctgacactattgcaggctgtattgcctcagatcaaagcacaacaggaggcctgggtagagaagccttccttcgggaagccgctggaggagcacctcaccatcagcggccgggagatcgccttccccatcgaggcgtgtgtgaccatgctgcttgagtgtgggatgcaggaggagggactcttccgagtagccccctctgcctccaaactgaagaagctgaaagcggccctggactgctgcgtggtggatgtgcaggagtactcggcagacccccacgcaattgcaggagctttgaaatcttacctccgagagttgccagaacctcttatgacctttgaactctatgatgagtggatccaggcttccaatgtccaggagcaagacaagaagcttcaggctctatggaatgcttgtgaaaagttgcccaaggccaatcacaacaacatccgatacttgataaaatttttatccaagctgtcagaatatcaagatgtaaacaagatgactcccagtaatatggcaattgttttaggacccaacctcctatggccacaagcagaagggaacattacagagatgatgaccacagtgtcgctgcaaattgttgggatcattgaacctatcatccagcatgcagactggttcttccctggggagatagagttcaacattactggcaattatgggagtccagtacacgtgaaccataatgccaactacagctcaatgccctccccagacatggaccctgctgaccggcgccagcccgagcaggcccgccggcccctcagcgtcgccacggataatatgatgctggagttttacaaaaaggatggtttcaaagaagctggcaccgattccacccaaggtcccctttggccagccgggggctatggcagaccagtccgctggccagccgtccccagtcagcctgtcccccaccccgcccagcaccccgtcaccctatggactgagctaccctcaggggtactccttggcctcgggccagctctccccagctgcagctcctcccctggcctctccttctgtctttacaagcactttgagcaaatcgcggcccactcctaagccgcgacagagacctactctgccgcctcctcagcctcccacagtaaacctctcggcctctagtccacagtccacggaggcccccatgctagatggcatgtcccctggggaaagcatgtctacagatcttgtccactttgatattccctcgatccacatagagctcgggtcgacgctccgcctgagtcccctggagcacatgcggcgacactcagtaactgacaagagggactcggaggaggagtctgagagcaccgccctctgacatgacaccgcccatcctgcctcgcgtgtacatacatcacgggccctaggaacgccgccaggagcagcgtccatgagcttgccaagtgttctctgctggctctttcctgccactgccaacacgaggttggaatttggcagaaaattgtgatctccagtccgtgtggtgatgctggtggtgcaggttttgtttgttcctttcgggtggtgacttcggccttttgtttgacctttgccttttgactttgtgcctcttttgatccactttcagcctccatgccagaaaacacccacctctccatccaaggctggtcaggaacgtcctttgcagggtcggggtggtgcgggagaggctcactttgcctggttagacccaagggctgctaccttttccttggacggctcatgtcaggt

SEQ ID NO: 175846 - DNA, 4143 bp, Homo sapiens
  Payload ID: 14528
  Gene Symbol: ARHGAP44
  Gene Name: Rho GTPase activating protein 44
  ENST ID: ENST00000580768
  CDS Start-End: 300-836
actgggagcaggcagcccgggcggagcgggccggtgccgaggacggccccaggcattgctctgccccgggcattgcgcggcgcgcgtgagggggatgcggcaggaggcggcgcggcgggaggagtaggcggcggcgccctcgggagggagctgcgcgcgggccagacggcgcccggaggctccgcagtgccgccgccgtcgcccgggaggctccgcgcgggagccatgtaaccctgcggcgggctccgggctgctccgtccttccccagctcccgggctagcgcggcagcggggccacgatgaagaagcagttcaatcgcatgcgccagctggccaaccagacggtgggcagggctgaaaagacagaagttttgagtgaagaccttcttcaggtggagaagcgtctggagctggtgaaacaggtgtcccacagcacgcacaagaagctcaccgcatgtctgcagggccagcaaggggcagaggctgacaagcgctccaaaaagttgcctttgacaacactggctcagtgtctgatggaggggtcagctatcctgggagatgacacacttcttgggaagatgctgaaactctgtggagagacggaggacaagctggctcaggagctgatacattttgagttgcaagtagagagagacgtgattgagcccctgtttttgctggcggaggtggaaatcccaaatattcaaaagcagaggaaacacttagccaagttggtgctggacatggattcctcacgaaccaggaccagctctcagctgatatgtacagttttgtggccaaagaaattgactatgcaaactactttcaaacgctaatagaagtgcaagctgaataccacaggaagtccctgacactattgcaggctgtattgcctcagatcaaagcacaacaggaggcctgggtagagaagccttccttcgggaagccgctggaggagcacctcaccatcagcggccgggagatcgccttccccatcgaggcgtgtgtgaccatgctgcttgagtgtgggatgcaggaggagggactcttccgagtagccccctctgcctccaaactgaagaagctgaaagcggccctggactgctgcgtggtggatgtgcaggagtactcggcagacccccacgcaattgcaggagctttgaaatcttacctccgagagttgccagaacctcttatgacctttgaactctatgatgagtggatccaggcttccaatgtccaggagcaagacaagaagcttcaggctctatggaatgcttgtgaaaagttgcccaaggccaatcacaacaacatccgatacttgataaaatttttatccaagctgtcagaatatcaagatgtaaacaagatgactcccagtaatatggcaattgttttaggacccaacctcctatggccacaagcagaagggaacattacagagatgatgaccacagtgtcgctgcaaattgttgggatcattgaacctatcatccagcatgcagactggttcttccctggggagatagagttcaacattactggcaattatgggagtccagtacacgtgaaccataatgccaactacagctcaatgccctccccagacatggaccctgctgaccggcgccagcccgagcaggcccgccggcccctcagcgtcgccacggataatatgatgctggagttttacaaaaaggatggcatgggtgtgagggtcatggacacaaactgggtggctcgaagaggctcctcggccggtcggaaagtgtcctgcgccccgccctccatgcagcctcccgccccgcccgccgagctggctgcgcccctgccttcgccgctgccggagcagcccctggacagccccgcggcccccgcgctctctccatccggcctgggcctccagcctgggcccgagcgcaccagcacaacaaaaagcaaggaactttctccaggctctgcacagaaaggaagtccaggctccagccagggcacagcctgtgcagggactcaaccaggggctcaacctggagctcagccgggcgccagccccagccccagccagccgcctgcagaccagagtcctcacaccctccggaaagtttcaaagaagctggcaccgattccacccaaggtcccctttggccagccgggggctatggcagaccagtccgctggccagccgtccccagtcagcctgtcccccaccccgcccagcaccccgtcaccctatggactgagctaccctcaggggtactccttggcctcgggccagctctccccagctgcagctcctcccctggcctctccttctgtctttacaagcactttgagcaaatcgcggcccactcctaagccgcgacagagacctactctgccgcctcctcagcctcccacagtaaacctctcggcctctagtccacagtccacggaggcccccatgctagatggcatgtcccctggggaaagcatgtctacagctgtgtgacatgagtggcgcagttttggatacgtgtgagggggattttcaggatcttgtccactttgatattccctcgatccacatagagctcgggtcgacgctccgcctgagtcccctggagcacatgcggcgacactcagtaactgacaagagggactcggaggaggagtctgagagcaccgccctctgacatgacaccgcccatcctgcctcgcgtgtacatacatcacgggccctaggaacgccgccaggagcagcgtccatgagcttgccaagtgttctctgctggctctttcctgccactgccaacacgaggttggaatttggcagaaaattgtgatctccagtccgtgtggtgatgctggtggtgcaggttttgtttgttcctttcgggtggtgacttcggccttttgtttgacctttgccttttgactttgtgcctcttttgatccactttcagcctccatgccagaaaacacccacctctccatccaaggctggtcaggaacgtcctttgcagggtcggggtggtgcgggagaggctcactttgcctggttagacccaagggctgctaccttttccttggacggctcatgtcaggtcttgcaggatcagtttaatggccacagaaaggaagcaggacagcagggcccctctcacccacaactggaccaggtccaggattctagcagtcctggggcactgacctttgccagctacctgggggagggcttgccactggaaaacctttcaggccgcccccatcagtgggctccaaagtaaatggctgaaaacaaaaatgtttcacttcctaacagttttcctttttccactgtgtgactgaaagctcctatatcattttatatttctgaatctataaaacaaaacaaacaagcctgacagtgtctggaggagccaaaggtggcctccctgtccccaaatatattggctatatgagagtaattttacccctctacgtacctaaaggcacccagttcactagtctgtggggtcctggagcctgtctcttctttctggaggttcaaactgaatagcaataattacgttacccaaagcatgtggaggaaaagtgaaaccagccacggagacgctggcccacgggctcggcctgcggtgtggcctgctttgctcaccagcgtcagccgctcatttccttctcatgaagtcccatctggtcatggggacgagggccgggagggcaccgggtagccttttcacacttggggattaggggagtgagaaaagatttgggccatgcatgcaaagtcaaagtttaaaattttatccttttcaaatagatgatataatatacctatacatgatataatatttgtatatatgaaatctctctatatttgtttaatttgagccattcaatctaaaccaatgtacaggtgtacaatgaaaaatttaaatgcttagttatttttcccaacacagtgtaaagtcaccctcctctgagagtgggatgtgcagagttttgatgttgcagctttgctcacttcctggcaagggcaggtcatgcctcaatttgtaatgggagtctggggtaagggtgggggttgaaagttgttatctttaaatacatgtacaaatcgttgtcaaaagtaacgttattaaaatagatttattatccctg

SEQ ID NO: 175847 - DNA, 730 bp, Homo sapiens
  Payload ID: 14528
  Gene Symbol: ARHGAP44
  Gene Name: Rho GTPase activating protein 44
  ENST ID: ENST00000583608
  CDS Start-End: 156-730
agtcagtgagatatgtgacatgagagaagcttctgtccagtccccgggggacatggctggtgttgagccttggttaaacctggcccttctaattttcttttagatacttgataaaatttttatccaagctgtcagaatatcaagatgtaaacaagatgactcccagtaatatggcaattgttttaggacccaacctcctatggccacaagcagaagggaacattacagagatgatgaccacagtgtcgctgcaaattgttgggatcattgaacctatcatccagcatgcagactggttcttccctggggagatagagttcaacattactggcaattatgggagtccagtacacgtgaaccataatgccaactacagctcaatgccctccccagacatggaccctgctgaccggcgccagcccgagcaggcccgccggcccctcagcgtcgccacggataatatgatgctggagttttacaaaaaggatggccttaggaaaatccaaagcatgggtgtgagggtcatggacacaaactgggtggctcgaagaggctcctcggccggtcggaaagtgtcctgcgccccgccctccatgcagcctcccgccccgcccgccgagctggctgcgcccctgccttcgccgctgccggagcagcccctggacagccccgcggcccccgcgctctctccatccggcctgggcctccagcctgggcccgagcgcaccag

SEQ ID NO: 175848 - DNA, 629 bp, Homo sapiens
  Payload ID: 14528
  Gene Symbol: ARHGAP44
  Gene Name: Rho GTPase activating protein 44
  ENST ID: ENST00000581437
  CDS Start-End: 1-548
caggctccagccagggcacagcctgtgcagggactcaaccaggggctcaacctggagctcagccgggcgccagccccagccccagccagccgcctgcagaccagagtcctcacaccctccggaaagtttcaaagaagctggcaccgattccacccaaggtcccctttggccagccgggggctatggcagaccagtccgctggccagccgtccccagtcagcctgtcccccaccccgcccagcaccccgtcaccctatggactgagctaccctcaggggtactccttggcctcgggccagctctccccagctgcagctcctcccctggcctctccttctgtctttacaagcactttgagcaaatcgcggcccactcctaagccgcgacagagacctactctgccgcctcctcagcctcccacagtaaacctctcggcctctagtccacagtccacggaggcccccatgctagatggcatgtcccctggggaaagcatgtctacaggtaaccaagccacaggctccctcacttttttttatgaactttagtgaaatgtgcctaggggagggattgctagtgttactgccagtgaacacattcctgcgtgctttgggatgactgggctggca

SEQ ID NO: 175849 - DNA, 884 bp, Homo sapiens
  Payload ID: 14528
  Gene Symbol: ARHGAP44
  Gene Name: Rho GTPase activating protein 44
  ENST ID: ENST00000616670
  CDS Start-End: 48-398
ccatcagcggccgggagatcgccttccccatcgaggcgtgtgtgaccatgctgcttgagtgtgggatgcaggaggagggactcttccgagtagccccctctgcctccaaactgaagaagctgaaagcggccctggactgctgcgtggtggatgtgcaggagtactcggcagacccccacgcaattgcaggagctttgaaatcttacctccgagagttgccagaacctcttatgacctttgaactctatgatgagtggatccaggcttccaatgtccaggagcaagacaagaagcttcaggctctatggaatgcttgtgaaaagttgcccaaggccaatcacaacaacatccgatacttgataaaattttatccaagctgtcagaatatcaagatgtaaacaagatgactcccagtaatatggcaattgttttaggacccaacctcctatggccacaagcagaagggaacattacagagatgatgaccacagtgtcgctgcaaattgttgggatcattgaacctatcatccagcatgcagactggttcttccctggggagatagagttcaacattactggcaattatgggagtccagtacacgtgaaccataatgccaactacagctcaatgccctccccagacatggaccctgctgaccggcgccagcccgagcaggcccgccggcccctcagcgtcgccacggataatatgatgctggagttttacaaaaaggatgggtatgaactggtgtctctttctcagcactggggattaggggaggtggtgggggtggatgggtgacgcataagaaaaatacaattacgggaaggctgcactgactctcagcagtttaggtgactcgtagcaattaaactgtatctgc

SEQ ID NO: 175850 - DNA, 9604 bp, Homo sapiens
  Payload ID: 14529
  Gene Symbol: ARHGAP5
  Gene Name: Rho GTPase activating protein 5
  Uniprot ID: Q13017
  ENST ID: ENST00000345122
  CDS Start-End: 316-4824
ctcggtgagcgcgccgaggaagagaggcgagcggagagtggaggaggaggcggcggcggcgggagcggtccccaggaatgtcgctgccgccgccaccgccggggccgctgccgttgaggaggagacggaggagaccgacgttgttaggaagatgatccctatgatcttgaagatgtttctgcacagaaatgagggaaatacaaagaaccaaatacagttctgaaatttgggatctgtattttgagatgattttattttcagaatgagaagcatatctggttacctttatgaatgtagagacatgagaagagagttatgatggcaaaaaacaaagagcctcgtcccccatcctataccatcagtatagttggactctctgggactgaaaaagacaaaggtaactgtggagttggaaagtcttgtttgtgcaatagatttgtacgctcaaaagcagatgaatattatccagagcatacttctgtgcttagcaccattgactttggaggacgagtagtaaacaatgatcactttttgtactggggtgacataatacaaaatagtgaagatggagtagaatgcaaaattcatgtcattgaacaaacagagttcattgatgaccagactttcttgcctcatcggagtacgaatttgcaaccatatataaaacgtgcagctgcatctaaattgcagtcagcagaaaaactaatgtacatttgcactgatcagctaggcttagaacaagactttgaacagaagcaaatgcctgaagggaagctcaacgtagatggatttttattatgcattgatgtaagtcaaggatgcaataggaagtttgatgatcaacttaaatttgtgaataacctttttgtccagttatcaaaatcaaaaaaacctgtaataatagcagcaactaaatgtgatgaatgcgtggatcattatcttagagaagttcaggcatttgcttcaaataaaaagaaccttcttgtagtggaaacatcagcacgatttaatgtcaacattgaaacatgttttactgcactggtacaaatgttggataaaactcgtagcaagcctaaaattattccctatttggatgcttataaaacacagagacaacttgttgtcacagcaacagataagtttgaaaaacttgtgcagactgtgagagattatcatgcaacttggaaaactgttagtaataaattaaaaaatcatcctgattatgaagaatacatcaacttagagggaacaagaaaggccagaaatacattctcaaaacatatagaacaacttaaacaggaacatataagaaaaaggagagaagagtatataaatactttaccaagagcttttaacactcttttgccaaatctagaagagattgaacatttgaattggtcagaagctttgaagttaatggaaaagagagcagatttccagttatgttttgtggtgctagaaaaaactccttgggatgaaactgaccatatagacaaaattaatgataggcggattccatttgacctcctgagcactttagaagctgaaaaagtctatcagaaccatgtacagcatctgatatccgagaagaggagggtggaaatgaaggaaaaattcaaaaagactttggaaaaaattcaattcatttcaccagggcagccatgggaggaagttatgtgctttgttatggaggatgaagcctacaaatatatcactgaggctgatagcaaagaggtatatggtaggcatcagcgagaaatagttgaaaaagccaaagaagagtttcaagaaatgctttttgagcattctgaacttttttatgatttagatcttaatgcaacacctagttcagataaaatgagtgaaattcatacagttctgagtgaagaacctagatataaagctttacagaaacttgcacctgatagggaatcccttctacttaagcatataggatttgtttatcatcccactaaagaaacatgtcttagtggccaaaattgtacagacattaaagtggagcagttacttgctagtagtcttttacagttggatcatggccgcttaagattatatcacgatagtaccaatatagataaagttaacctttttattttagggaaggatggccttgcccaagaactagcaaatgagataaggacacaatccactgatgatgagtatgccttagatggaaaaatttatgaacttgatcttcggccggttgatgccaaatcgccttactttttgagtcagttatggactgccgcctttaaaccacatgggtgcttctgtgtatttaattccattgagtcattgagttttattggggaatttattgggaaaataagaactgaagcttctcagatcagaaaagataaatacatggctaatcttccatttacattaattctggctaatcagagagattccattagtaagaatctaccaattctcaggcaccaagggcagcagttggcaaacaagttgcaatgtccttttgtagatgtacctgctggtacatatcctcgtaaatttaatgaaacccaaataaagcaagctctcagaggagtattggaatcagttaaacacaatttggatgtggtgagcccaattcctgccaataaggacttatcagaagctgacttgagaattgtcatgtgcgccatgtgtggagatccatttagtgtggatcttattctttcacccttccttgattctcattcttgcagtgctgctcaagctggacagaataattccctaatgcttgataaaatcattggtgaaaaaaggaggcgaatacagatcacaatattatcataccactcttcaattggagtaagaaaagatgaactagttcatgggtatatattagtttactctgcaaaacggaaagcttcgatgggaatgcttcgagcatttctatcagaagttcaagacaccattcctgtacagctggtggcagttactgacagccaagcagatttttttgaaaatgaggctatcaaagagttaatgactgaaggagaacacattgcaactgagatcactgctaaatttacagcactgtattctttatctcagtatcatcggcaaactgaggtctttactctgttttttagtgatgttctagagaaaaaaaatatgatagaaaattcttatttgtctgataatacaagggaatcaacccatcaaagtgaagatgtttttctaccatctcccagagactgttttccctataataactaccctgattcagatgatgacacagaagcaccacctccttatagtccaattggggatgatgtacagttgcttccaacacctagtgaccgttccagatatagattagatttggaaggaaatgagtatcctattcatagtaccccaaactgtcatgaccatgaacgcaaccataaagtgcctccacctattaaacctaaaccagttgtacctaagacaaatgtgaaaaaactcgatccaaaccttttaaaaacaattgaagctggtattggtaaaaatccaagaaagcagacttcccgggtgcctttggcacatcctgaagatatggatccttcagataactatgcggaacccattgatacaattttcaaacagaagggctattctgatgagatttatgttgtcccagatgatagtcaaaatcgtattaaaattcgaaactcatttgtaaataacacccaaggagatgaagaaaatgggttttctgatagaacctcaaaaagtcatggggaacggaggccttcaaaatacaaatataaatctaaaaccttgtttagtaaagccaagtcatactatagaagaacacattcagatgccagtgatgatgaggctttcaccacttctaaaacaaaaagaaaaggaagacatcgtggaagtgaagaagatccacttctttctcctgttgaaacttggaaaggtggtattgataatcctgcaatcacttctgaccaggagttagatgataagaagatgaagaagaaaacccacaaagtgaaagaagataaaaagcagaaaaagaaaactaagaacttcaatccaccaacacgtagaaattgggaaagtaattactttgggatgcccctccaggatctggttacagctgagaagcccataccactatttgttgagaaatgtgtggaatttattgaagatacagggttatgtaccgaaggactctaccgtgtcagcgggaataaaactgaccaagacaatattcaaaagcagtttgatcaagatcataatatcaatctagtgtcaatggaagtaacagtaaatgctgtagctggagcccttaaagctttctttgcagatctgccagatcctttaattccatattctcttcatccagaactattggaagcagcaaaaatcccggataaaacagaacgtcttcatgccttgaaagaaattgttaagaaatttcatcctgtaaactatgatgtattcagatacgtgataacacatctaaacagggttagtcagcaacataaaatcaacctaatgacagcagacaacttatccatctgtttttggccaaccttgatgagacctgattttgaaaatcgagagtttctgtctactactaagattcatcaatctgttgttgaaacattcattcagcagtgtcagtttttcttttacaatggagaaattgtagaaacgacaaacattgtggctcctccaccaccttcaaacccaggacagttggtggaaccaatggtgccacttcagttgccgccaccattgcaacctcagctgatacaaccacaattacaaacggatcctcttggtattatatgagtaggaagtgattgcaaacaggctggatttggacaaaaagcaaatctagacatgcatgtttcagggttcagtagtatacttcatgtttcatacagataattcacattcaaaattacattttctctttgaactagatggtattccttattcacttacattacaaatctaagaccatgtgataagcatgactggagaggtttaatttttataaacaaaaatagctataaagtacaaagctgctgctgcatgcaaccttattgcaatcagtatatcattcctgtggcaatttctgtcaccttatattgtgaataaaatttttctatagaaattaaatgatttaaaaactcacctatatgaaacatttaatgcttttcagcctgctttctggctgattttgttatttgatgtgctaatttgggcaacttaatttacattctggcagtcggtgtagataactaaaagcccagttaagtattttataatttcaggctactgaggccatgcttgggatgttgtttgaaagaaagaaaaaatacacttgacatatttcacatttctgtaccttcatctttacttccaagtaaacccgtggatgatttgatgagggataaatgaacctatttcttttacacacataccaaggacatgcttgtggctaaagtgagttgataatgttgtgcaaaggatagttgtcaccaactcatttctttatggtccataatgaaataaaaattttgtatactgttaattctgtaaacagatgcatgttcaaaagatctatgatggtcttgtaatcttaatctaatatattttagatattttaattttttccctcttggggaacacatttagtatagtgtagaaaatacttccatgacattttcatataaggttatataacttttcatacataaacatgaaatttgttgtagaaaattctttaaaccaaacatttaaatctaggacttcaatttaatttgttccttgaatctatttttatgtggcccttaaaaaatatccaaaaaacccattgctaatatagcaataaaaatactttgggtactgacagactctttggagtgtttatattacaaatttgtattcatattcttttctgtgatgtgttgtactaaaatccaaaatggcttttgcaccatttttaagccaattttttcctttgatgttggtaccagaattactataagtgactgctgcttttgggggtaaacattttgttagtgaagataaaaccagaacactaaattatggataaaattttcagaataggtggcacaggtaaatttcactaggttatattttgtgtagtaaagaaaaaaattatttggtcaatgttatcttaattcatactacaatttaagattatcttatgtgtattatagtaaatagatgattttcagattcaaggctcctaagagtttgatttgctctgttttttcctaaaataaatattgtctctcccaactgttaagttctaggtattgtacttccaattttaacttcagaaccaagatgttggcatgaaccaggctgctgttgaagtacatgtatattataaattatcttatttgtgttatactcttacatgttatcttttctaagaaaacaaagtccctattattcctattgcaaagcacacaggaattaagaaagtacagtaatttttaaaaaaaaatccggtaaatgtagtattcttaacctgttctatattacttatacctattgtctatatagctttaatttatagttgtcagtttaactattggcatgtctggcaaagaaaattaaactttaagagttttataaactgtttctaggttgctaaagaatttatttttctactatatatggtatagacaaagcatcaaactatgtacaggaaaaaagcctgactatttctatttggaagtaggctgaaaagagaattttcaaaactgttcgtgtcttcagttcattctgtcataactttgctattgtaatatgtgaataccagtttatttaagctgttctcttttatactgtattaatttaatgttcatctgcgtttagtaccatttttgttattaaaactggcatttaccgtttttcacattaacccaccttgcaccttcccccaaacttatctccacttttctatgcattctatcattgatttgacacacttcatagtgagtcatttaaatactctacgtttggttcaattaaccagtaggttacagttattgaaaattaaagtacagtttaaagctcagtctgttacactgaattgattgtgtttgtttttgccaagggtttagatatgcttttaaatattagaaacatctaagaacagaataacataattaaacttttttctggtaagttactggaaggtttcactgtttagggacctatcatatgagacttcttaaaggattaaaagaataggatagtctcataattgtgagtaaacatcaaggcattatattttacaatactgaataaaatttcatctacacacatgttgccattgtttcatttaaggttcagtgcttatagttaactacaatattggacctaacaggatctagattagcaatataaagaagcatagtggtactctgtttcacactttcagtagatttattagaagtcaaattctattcaacagacacttattaggatatacaactaatttaagaataaaattccaggcacaatatattttttttaaatggtatttgttagtagtgcttcttccccttaacatttacagtgtaaatactgcaggtaaccgcaatctaagttagccaaaaagcagctttttttcccatactgtatgtaaataatgtagacctgggtttttttgtttatttgggtttgtttttttttttgaggtactggaatctaattaatatctcttaggtatcaacaaaagggaacaattggaatgagaatttaggccttagcttccatggtgatttttagttttttatacagtaataattgtgatgctatttgtcaactggatataaatacacatataattttaaaaagtcaaaagtgcttttgtttctttgtttaatgtaatttttgtgcttcacctacaggatgctgcagtaaattaaatatcagtgaagcttctgatgtataaagaatgctatgaataaaacattaagaagctgtgtaattttaagttatagttgcctctatttttaccatttcattggtaaaaattagctaatttttttcaagtgaaatgaaaaataaaaatataaatttatcaatatgatggaaatcttattaaggagatgtattattgaattttcactgtacctgaaaaggagattcaaaattttttctggggatgtatataggtgaaaatttgattttttaaattatcaggaaaacaagataatgcacagatttctaagactaagatcttacctggatgtgatttttgagctgtggctagacattctttagagccactggaaatattttgaaaactattctagttatagcagagctgctaatattaacgaatatatttgtgtcttcatggtttgtgactattaggccaaattttgtggtatatgttgtcagtctggatctggtgaggtctgttcaacatgaatctttgtgttatcttgaatttagtagtttcaaggtacttaaattcttaacagtttctaatttgtttcaatacatatgggacatggttgatttttttactgtattagaactcttggaagttcttagccttttcaggttatgaaatacctgaaagtaaaattttctaagatttaataagggaagatactattcaaatcattttcttaggatagcatctttacatacaatgagaggattgtacaagcattaatctcatattccaacatccagttacttgatgtgatccaagtaccctggtctttttgaagcagttaaaatctaattaattaactttgggagtcttcactattcaattgatcctcatcattgtcctatttgcatgactccattttttcctccactatatgagttttctttgtcagggggagaggagtgggaagagtcacagaatctcatattcacatcttaattaaattgtgtgaaattagtcttttgtggaaattctgtaggcagtatgattttgaaaagctaaccaatgataattagcattttagttaatactaaatgcataaaattataacccttgaaattaatttggtgctggcagttctggtttagtcatttttaccagtagttagtagtattaagacctgcagtatatgcactttttgagtagctgtcaaataattgtagttgagaaacaacttgtttattctcacaattcagattttctattcagttttgtctcaaatagtaagttattgtgaacaatttaataacggccctcctgttctagtttgcctaatattttagttaagatttagtgttttaacctatttttttaagtttattttttgtattagattttatttgaataagttatgtgggtttagtaattgacctatttattcattgcttcactaattcatccagattagttttaagtgtgtatatgtatttgctcaccagatcattttcttgggaccttgaactgtgaatgttttgtcctaaccatttaatattttctaggtacttgctgcaagttcttgaactattttaccagctttaactttggggctcttagtttcttttctccagattcttgttattttattttatccaaataaatatttaggtgttctaagaa

SEQ ID NO: 175851 - DNA, 5786 bp, Homo sapiens
  Payload ID: 14529
  Gene Symbol: ARHGAP5
  Gene Name: Rho GTPase activating protein 5
  Uniprot ID: Q13017
  ENST ID: ENST00000396582
  CDS Start-End: 293-1006
agagaaatccgtcagcgcgagggagcccgagtggccgccattactgagcccggcgcggcggcgggcgctggggaaggggggagggacgggccgccgctggtggcggggagggagggagggagggtgggtgagctggctgcgggagccgtggggctcagggtttcggggcgtgtgtgtcggggagggcggggggaggtggctgaagggacgcgccgctcggtgagcgcgccgaggaagagaggcgagcggagagtggaggaggaggcggcggcggcgggagcggtccccaggaatgtcgctgccgccgccaccgccggggccgctgccgttgaggaggagacggaggagaccgacgttgttagggttatgtaccgaaggactctaccgtgtcagcgggaataaaactgaccaagacaatattcaaaagcagtttgatcaagatcataatatcaatctagtgtcaatggaagtaacagtaaatgctgtagctggagcccttaaagctttctttgcagatctgccagatcctttaattccatattctcttcatccagaactattggaagcagcaaaaatcccggataaaacagaacgtcttcatgccttgaaagaaattgttaagaaatttcatcctgtaaactatgatgtattcagatacgtgataacacatctaaacagggttagtcagcaacataaaatcaacctaatgacagcagacaacttatccatctgtttttggccaaccttgatgagacctgattttgaaaatcgagagtttctgtctactactaagattcatcaatctgttgttgaaacattcattcagcagtgtcagtttttcttttacaatggagaaattgtagaaacgacaaacattgtggctcctccaccaccttcaaacccaggacagttggtggaaccaatggtgccacttcagttgccgccaccattgcaacctcagctgatacaaccacaattacaaacggatcctcttggtattatatgagtaggaagtgattgcaaacaggctggatttggacaaaaagcaaatctagacatgcatgtttcagggttcagtagtatacttcatgtttcatacagataattcacattcaaaattacattttctctttgaactagatggtattccttattcacttacattacaaatctaagaccatgtgataagcatgactggagaggtttaatttttataaacaaaaatagctataaagtacaaagctgctgctgcatgcaaccttattgcaatcagtatatcattcctgtggcaatttctgtcaccttatattgtgaataaaatttttctatagaaattaaatgatttaaaaactcacctatatgaaacatttaatgcttttcagcctgctttctggctgattttgttatttgatgtgctaatttgggcaacttaatttacattctggcagtcggtgtagataactaaaagcccagttaagtattttataatttcaggctactgaggccatgcttgggatgttgtttgaaagaaagaaaaaatacacttgacatatttcacatttctgtaccttcatctttacttccaagtaaacccgtggatgatttgatgagggataaatgaacctatttcttttacacacataccaaggacatgcttgtggctaaagtgagttgataatgttgtgcaaaggatagttgtcaccaactcatttctttatggtccataatgaaataaaaattttgtatactgttaattctgtaaacagatgcatgttcaaaagatctatgatggtcttgtaatcttaatctaatatattttagatattttaattttttccctcttggggaacacatttagtatagtgtagaaaatacttccatgacattttcatataaggttatataacttttcatacataaacatgaaatttgttgtagaaaattctttaaaccaaacatttaaatctaggacttcaatttaatttgttccttgaatctatttttatgtggcccttaaaaaatatccaaaaaacccattgctaatatagcaataaaaatactttgggtactgacagactctttggagtgtttatattacaaatttgtattcatattcttttctgtgatgtgttgtactaaaatccaaaatggcttttgcaccatttttaagccaattttttcctttgatgttggtaccagaattactataagtgactgctgcttttgggggtaaacattttgttagtgaagataaaaccagaacactaaattatggataaaattttcagaataggtggcacaggtaaatttcactaggttatattttgtgtagtaaagaaaaaaattatttggtcaatgttatcttaattcatactacaatttaagattatcttatgtgtattatagtaaatagatgattttcagattcaaggctcctaagagtttgatttgctctgttttttcctaaaataaatattgtctctcccaactgttaagttctaggtattgtacttccaattttaacttcagaaccaagatgttggcatgaaccaggctgctgttgaagtacatgtatattataaattatcttatttgtgttatactcttacatgttatcttttctaagaaaacaaagtccctattattcctattgcaaagcacacaggaattaagaaagtacagtaatttttaaaaaaaaatccggtaaatgtagtattcttaacctgttctatattacttatacctattgtctatatagctttaatttatagttgtcagtttaactattggcatgtctggcaaagaaaattaaactttaagagttttataaactgtttctaggttgctaaagaatttatttttctactatatatggtatagacaaagcatcaaactatgtacaggaaaaaagcctgactatttctatttggaagtaggctgaaaagagaattttcaaaactgttcgtgtcttcagttcattctgtcataactttgctattgtaatatgtgaataccagtttatttaagctgttctcttttatactgtattaatttaatgttcatctgcgtttagtaccatttttgttattaaaactggcatttaccgtttttcacattaacccaccttgcaccttcccccaaacttatctccacttttctatgcattctatcattgatttgacacacttcatagtgagtcatttaaatactctacgtttggttcaattaaccagtaggttacagttattgaaaattaaagtacagtttaaagctcagtctgttacactgaattgattgtgtttgtttttgccaagggtttagatatgcttttaaatattagaaacatctaagaacagaataacataattaaacttttttctggtaagttactggaaggtttcactgtttagggacctatcatatgagacttcttaaaggattaaaagaataggatagtctcataattgtgagtaaacatcaaggcattatattttacaatactgaataaaatttcatctacacacatgttgccattgtttcatttaaggttcagtgcttatagttaactacaatattggacctaacaggatctagattagcaatataaagaagcatagtggtactctgtttcacactttcagtagatttattagaagtcaaattctattcaacagacacttattaggatatacaactaatttaagaataaaattccaggcacaatatattttttttaaatggtatttgttagtagtgcttcttccccttaacatttacagtgtaaatactgcaggtaaccgcaatctaagttagccaaaaagcagctttttttcccatactgtatgtaaataatgtagacctgggtttttttgtttatttgggtttgtttttttttttgaggtactggaatctaattaatatctcttaggtatcaacaaaagggaacaattggaatgagaatttaggccttagcttccatggtgatttttagttttttatacagtaataattgtgatgctatttgtcaactggatataaatacacatataattttaaaaagtcaaaagtgcttttgtttctttgtttaatgtaatttttgtgcttcacctacaggatgctgcagtaaattaaatatcagtgaagcttctgatgtataaagaatgctatgaataaaacattaagaagctgtgtaattttaagttatagttgcctctatttttaccatttcattggtaaaaattagctaatttttttcaagtgaaatgaaaaataaaaatataaatttatcaatatgatggaaatcttattaaggagatgtattattgaattttcactgtacctgaaaaggagattcaaaattttttctggggatgtatataggtgaaaatttgattttttaaattatcaggaaaacaagataatgcacagatttctaagactaagatcttacctggatgtgatttttgagctgtggctagacattctttagagccactggaaatattttgaaaactattctagttatagcagagctgctaatattaacgaatatatttgtgtcttcatggtttgtgactattaggccaaattttgtggtatatgttgtcagtctggatctggtgaggtctgttcaacatgaatctttgtgttatcttgaatttagtagtttcaaggtacttaaattcttaacagtttctaatttgtttcaatacatatgggacatggttgatttttttactgtattagaactcttggaagttcttagccttttcaggttatgaaatacctgaaagtaaaattttctaagatttaataagggaagatactattcaaatcattttcttaggatagcatctttacatacaatgagaggattgtacaagcattaatctcatattccaacatccagttacttgatgtgatccaagtaccctggtctttttgaagcagttaaaatctaattaattaactttgggagtcttcactattcaattgatcctcatcattgtcctatttgcatgactccattttttcctccactatatgagttttctttgtcagggggagaggagtgggaagagtcacagaatctcatattcacatcttaattaaattgtgtgaaattagtcttttgtggaaattctgtaggcagtatgattttgaaaagctaaccaatgataattagcattttagttaatactaaatgcataaaattataacccttgaaattaatttggtgctggcagttctggtttagtcatttttaccagtagttagtagtattaagacctgcagtatatgcactttttgagtagctgtcaaataattgtagttgagaaacaacttgtttattctcacaattcagattttctattcagttttgtctcaaatagtaagttattgtgaacaatttaataacggccctcctgttctagtttgcctaatattttagttaagatttagtgttttaacctatttttttaagtttattttttgtattagattttatttgaataagttatgtgggtttagtaattgacctatttattcattgcttcactaattcatccagattagttttaagtgtgtatatgtatttgctcaccagatcattttcttgggaccttgaactgtgaatgttttgtcctaaccatttaatattttctaggtacttgctgcaagttcttgaactattttaccagctttaactttggggctcttagtttcttttctccagattcttgttattttattttatccaaataaatatttaggtgttctaagaa

SEQ ID NO: 175852 - DNA, 5003 bp, Homo sapiens
  Payload ID: 14529
  Gene Symbol: ARHGAP5
  Gene Name: Rho GTPase activating protein 5
  ENST ID: ENST00000432921
  CDS Start-End: 317-4813
ctcggtgagcgcgccgaggaagagaggcgagcggagagtggaggaggaggcggcggcggcgggagcggtccccaggaatgtcgctgccgccgccaccgccggggccgctgccgttgaggaggagacggaggagaccgacgttgttagggaagatgatccctatgatcttgaagatgtttctgcacagaaatgagggaaatacaaagaaccaaatacagttctgaaatttgggatctgtattttgagatgattttattttcagaatgagaagcatatctggttacctttatgaatgtagagacatgagaagagagttatgatggcaaaaaacaaagagcctcgtcccccatcctataccatcagtatagttggactctctgggactgaaaaagacaaaggtaactgtggagttggaaagtcttgtttgtgcaatagatttgtacgctcaaaagcagatgaatattatccagagcatacttctgtgcttagcaccattgactttggaggacgagtagtaaacaatgatcactttttgtactggggtgacataatacaaaatagtgaagatggagtagaatgcaaaattcatgtcattgaacaaacagagttcattgatgaccagactttcttgcctcatcggagtacgaatttgcaaccatatataaaacgtgcagctgcatctaaattgcagtcagcagaaaaactaatgtacatttgcactgatcagctaggcttagaacaagactttgaacagaagcaaatgcctgaagggaagctcaacgtagatggatttttattatgcattgatgtaagtcaaggatgcaataggaagtttgatgatcaacttaaatttgtgaataacctttttgtccagttatcaaaatcaaaaaaacctgtaataatagcagcaactaaatgtgatgaatgcgtggatcattatcttagagaagttcaggcatttgcttcaaataaaaagaaccttcttgtagtggaaacatcagcacgatttaatgtcaacattgaaacatgttttactgcactggtacaaatgttggataaaactcgtagcaagcctaaaattattccctatttggatgcttataaaacacagagacaacttgttgtcacagcaacagataagtttgaaaaacttgtgcagactgtgagagattatcatgcaacttggaaaactgttagtaataaattaaaaaatcatcctgattatgaagaatacatcaacttagagggaacaagaaaggccagaaatacattctcaaaacatatagaacaacttaaacaggaacatataagaaaaaggagagaagagtatataaatactttaccaagagcttttaacactcttttgccaaatctagaagagattgaacatttgaattggtcagaagctttgaagttaatggaaaagagagcagatttccagttatgttttgtggtgctagaaaaaactccttgggatgaaactgaccatatagacaaaattaatgataggcggattccatttgacctcctgagcactttagaagctgaaaaagtctatcagaaccatgtacagcatctgatatccgagaagaggagggtggaaatgaaggaaaaattcaaaaagactttggaaaaaattcaattcatttcaccagggcagccatgggaggaagttatgtgctttgttatggaggatgaagcctacaaatatatcactgaggctgatagcaaagaggtatatggtaggcatcagcgagaaatagttgaaaaagccaaagaagagtttcaagaaatgctttttgagcattctgaacttttttatgatttagatcttaatgcaacacctagttcagataaaatgagtgaaattcatacagttctgagtgaagaacctagatataaagctttacagaaacttgcacctgatagggaatcccttctacttaagcatataggatttgtttatcatcccactaaagaaacatgtcttagtggccaaaattgtacagacattaaagtggagcagttacttgctagtagtcttttacagttggatcatggccgcttaagattatatcacgatagtaccaatatagataaagttaacctttttattttagggaaggatggccttgcccaagaactagcaaatgagataaggacacaatccactgatgatgagtatgccttagatggaaaaatttatgaacttgatcttcggccggttgatgccaaatcgccttactttttgagtcagttatggactgccgcctttaaaccacatgggtgcttctgtgtatttaattccattgagtcattgagttttattggggaatttattgggaaaataagaactgaagcttctcagatcagaaaagataaatacatggctaatcttccatttacattaattctggctaatcagagagattccattagtaagaatctaccaattctcaggcaccaagggcagcagttggcaaacaagttgcaatgtccttttgtagatgtacctgctggtacatatcctcgtaaatttaatgaaacccaaataaagcaagctctcagaggagtattggaatcagttaaacacaatttggatgtggtgagcccaattcctgccaataaggacttatcagaagctgacttgagaattgtcatgtgcgccatgtgtggagatccatttagtgtggatcttattctttcacccttccttgattctcattcttgcagtgctgctcaagctggacagaataattccctaatgcttgataaaatcattggtgaaaaaaggaggcgaatacagatcacaatattatcataccactcttcaattggagtaagaaaagatgaactagttcatgggtatatattagtttactctgcaaaacggaaagcttcgatgggaatgcttcgagcatttctatcagaagttcaagacaccattcctgtacagctggtggcagttactgacagccaagcagatttttttgaaaatgaggctatcaaagagttaatgactgaaggagaacacattgcaactgagatcactgctaaatttacagcactgtattctttatctcagtatcatcggcaaactgaggtctttactctgttttttagtgatgttctagagaaaaaaaatatgatagaaaattcttatttgtctgataatacaagggaatcaacccatcaaagtgaagatgtttttctaccatctcccagagactgttttccctataataactaccctgattcagatgatgacacagaagcaccacctccttatagtccaattggggatgatgtacagttgcttccaacacctagtgaccgttccagatatagattagatttggaaggaaatgagtatcctattcatagtaccccaaactgtcatgaccatgaacgcaaccataaagtgcctccacctattaaacctaaaccagttgtacctaagacaaatgtgaaaaaactcgatccaaaccttttaaaaacaattgaagctggtattggtaaaaatccaagaaagcagacttcccgggtgcctttggcacatcctgaagatatggatccttcagataactatgcggaacccattgatacaattttcaaacagaagggctattctgatgagatttatgttgtcccagatgatagtcaaaatcgtattaaaattcgaaactcatttgtaaataacacccaaggagatgaagaaaatgggttttctgatagacctcaaaaagtcatggggaacggaggccttcaaaatacaaatataaatctaaaaccttgtttagtaaagccaagtcatactatagaagaacacattcagatgccagtgatgatgaggctttcaccacttctaaaacaaagaaaaggaagacatcgtggaagtgaagaagatccacttctttctcctgttgaaacttggaaaggtggtattgataatcctgcaatcacttctgaccaggagttagatgataagaagatgaagaagaaaacccacaaagtgaaagaagataaaaaaaagaaaactaagaacttcaatccaccaacacgtagaaattgggaaagtaattactttgggatgcccctccaggatctggttacagctgagaagcccataccactatttgttgagaaatgtgtggaatttattgaagatacagggttatgtaccgaaggactctaccgtgtcagcgggaataaaactgaccaagacaatattcaaaagcagtttgatcaagatcataatatcaatctagtgtcaatggaagtaacagtaaatgctgtagctggagcccttaaagctttctttgcagatctgccagatcctttaattccatattctcttcatccagaactattggaagcagcaaaaatcccggataaaacagaacgtcttcatgccttgaaagaaattgttaagaaatttcatcctgtaaactatgatgtattcagatacgtgataacacatctaaacagggttagtcagcaacataaaatcaacctaatgacagcagacaacttatccatctgtttttggccaaccttgatgagacctgatttgaaaatcgagtttctgtctactactaagattcatcaatctgttgttgaaacattcattcagcagtgtcagtttttcttttacaatggagaaattgtagaaacgacaaacattgtggctcctccaccaccttcaaacccaggacagttggtggaaccaatggtgccacttcagttgccgccaccattgcaacctcagctgatacaaccacaattacaaacggatcctcttggtattatatgagtaggaagtgattgcaaacaggctggatttggacaaaaagcaaatctagacatgcatgtttcagggttcagtagtatacttcatgtttcatacagataattcacattcaaaattacattttctctttgaactagatggtattccttattcacttacattacaaatctaagaccatgtgataagcatgact

SEQ ID NO: 175853 - DNA, 3047 bp, Homo sapiens
  Payload ID: 14529
  Gene Symbol: ARHGAP5
  Gene Name: Rho GTPase activating protein 5
  Uniprot ID: Q13017
  ENST ID: ENST00000433497
  CDS Start-End: 191-916
agagaggcgagcggagagtggaggaggaggcggcggcggcgggagcggtccccaggaatgtcgctgccgccgccaccgccggggccgctgccgttgaggaggagacggaggagaccgacgttgttagaaaaagaaaactaagaacttcaatccaccaacacgtagaaattgggaaagtaattactttgggatgcccctccaggatctggttacagctgagaagcccataccactatttgttgagaaatgtgtggaatttattgaagatacagggttatgtaccgaaggactctaccgtgtcagcgggaataaaactgaccaagacaatattcaaaagcagtttgatcaagatcataatatcaatctagtgtcaatggaagtaacagtaaatgctgtagctggagcccttaaagctttctttgcagatctgccagatcctttaattccatattctcttcatccagaactattggaagcagcaaaaatcccggataaaacagaacgtcttcatgccttgaaagaaattgttaagaaatttcatcctgtaaactatgatgtattcagatacgtgataacacatctaaacagggttagtcagcaacataaaatcaacctaatgacagcagacaacttatccatctgtttttggccaaccttgatgagacctgattttgaaaatcgagagtttctgtctactactaagattcatcaatctgttgttgaaacattcattcagcagtgtcagtttttcttttacaatggagaaattgtagaaacgacaaacattgtggctcctccaccaccttcaaacccaggacagttggtggaaccaatggtgccacttcagttgccgccaccattgcaacctcagctgatacaaccacaattacaaacggatcctcttggtattatatgagtaggaagtgattgcaaacaggctggatttggacaaaaagcaaatctagacatgcatgtttcagggttcagtagtatacttcatgtttcatacagataattcacattcaaaattacattttctctttgaactagatggtattccttattcacttacattacaaatctaagaccatgtgataagcatgactggagaggtttaatttttataaacaaaaatagctataaagtacaaagctgctgctgcatgcaaccttattgcaatcagtatatcattcctgtggcaatttctgtcaccttatattgtgaataaaatttttctatagaaattaaatgatttaaaaactcacctatatgaaacatttaatgcttttcagcctgctttctggctgattttgttatttgatgtgctaatttgggcaacttaatttacattctggcagtcggtgtagataactaaaagcccagttaagtattttataatttcaggctactgaggccatgcttgggatgttgtttgaaagaaagaaaaaatacacttgacatatttcacatttctgtaccttcatctttacttccaagtaaacccgtggatgatttgatgagggataaatgaacctatttcttttacacacataccaaggacatgcttgtggctaaagtgagttgataatgttgtgcaaaggatagttgtcaccaactcatttctttatggtccataatgaaataaaaattttgtatactgttaattctgtaaacagatgcatgttcaaaagatctatgatggtcttgtaatcttaatctaatatattttagatattttaattttttccctcttggggaacacatttagtatagtgtagaaaatacttccatgacattttcatataaggttatataacttttcatacataaacatgaaatttgttgtagaaaattctttaaaccaaacatttaaatctaggacttcaatttaatttgttccttgaatctatttttatgtggcccttaaaaaatatccaaaaaacccattgctaatatagcaataaaaatactttgggtactgacagactctttggagtgtttatattacaaatttgtattcatattcttttctgtgatgtgttgtactaaaatccaaaatggcttttgcaccatttttaagccaattttttcctttgatgttggtaccagaattactataagtgactgctgcttttgggggtaaacattttgttagtgaagataaaaccagaacactaaattatggataaaattttcagaataggtggcacaggtaaatttcactaggttatattttgtgtagtaaagaaaaaaattatttggtcaatgttatcttaattcatactacaatttaagattatcttatgtgtattatagtaaatagatgattttcagattcaaggctcctaagagtttgatttgctctgttttttcctaaaataaatattgtctctcccaactgttaagttctaggtattgtacttccaattttaacttcagaaccaagatgttggcatgaaccaggctgctgttgaagtacatgtatattataaattatcttatttgtgttatactcttacatgttatcttttctaagaaaacaaagtccctattattcctattgcaaagcacacaggaattaagaaagtacagtaatttttaaaaaaaaatccggtaaatgtagtattcttaacctgttctatattacttatacctattgtctatatagctttaatttatagttgtcagtttaactattggcatgtctggcaaagaaaattaaactttaagagttttataaactgtttctaggttgctaaagaatttatttttctactatatatggtatagacaaagcatcaaactatgtacaggaaaaaagcctgactatttctatttggaagtaggctgaaaagagaattttcaaaactgttcgtgtcttcagttcattctgtcataactttgctattgtaatatgtgaataccagtttatttaagctgttctcttttatactgtattaatttaatgttcatctgcgtttagtaccatttttgttattaaaactggcatttaccgtttttcacattaacccaccttgcaccttccc

SEQ ID NO: 175854 - DNA, 4881 bp, Homo sapiens
  Payload ID: 14529
  Gene Symbol: ARHGAP5
  Gene Name: Rho GTPase activating protein 5
  Uniprot ID: Q13017
  ENST ID: ENST00000539826
  CDS Start-End: 238-4746
ctgcgccgccgcgccgccgctccgcccccggtcgggtgtgtggctgcgcgcgccgggagagatgctgaggaagatgatccctatgatcttgaagatgtttctgcacagaaatgagggaaatacaaagaaccaaatacagttctgaaatttgggatctgtattttgagatgattttattttcagaatgagaagcatatctggttacctttatgaatgtagagacatgagaagagagttatgatggcaaaaaacaaagagcctcgtcccccatcctataccatcagtatagttggactctctgggactgaaaaagacaaaggtaactgtggagttggaaagtcttgtttgtgcaatagatttgtacgctcaaaagcagatgaatattatccagagcatacttctgtgcttagcaccattgactttggaggacgagtagtaaacaatgatcactttttgtactggggtgacataatacaaaatagtgaagatggagtagaatgcaaaattcatgtcattgaacaaacagagttcattgatgaccagactttcttgcctcatcggagtacgaatttgcaaccatatataaaacgtgcagctgcatctaaattgcagtcagcagaaaaactaatgtacatttgcactgatcagctaggcttagaacaagactttgaacagaagcaaatgcctgaagggaagctcaacgtagatggatttttattatgcattgatgtaagtcaaggatgcaataggaagtttgatgatcaacttaaatttgtgaataacctttttgtccagttatcaaaatcaaaaaaacctgtaataatagcagcaactaaatgtgatgaatgcgtggatcattatcttagagaagttcaggcatttgcttcaaataaaaagaaccttcttgtagtggaaacatcagcacgatttaatgtcaacattgaaacatgttttactgcactggtacaaatgttggataaaactcgtagcaagcctaaaattattccctatttggatgcttataaaacacagagacaacttgttgtcacagcaacagataagtttgaaaaacttgtgcagactgtgagagattatcatgcaacttggaaaactgttagtaataaattaaaaaatcatcctgattatgaagaatacatcaacttagagggaacaagaaaggccagaaatacattctcaaaacatatagaacaacttaaacaggaacatataagaaaaaggagagaagagtatataaatactttaccaagagcttttaacactcttttgccaaatctagaagagattgaacatttgaattggtcagaagctttgaagttaatggaaaagagagcagatttccagttatgttttgtggtgctagaaaaaactccttgggatgaaactgaccatatagacaaaattaatgataggcggattccatttgacctcctgagcactttagaagctgaaaaagtctatcagaaccatgtacagcatctgatatccgagaagaggagggtggaaatgaaggaaaaattcaaaaagactttggaaaaaattcaattcatttcaccagggcagccatgggaggaagttatgtgctttgttatggaggatgaagcctacaaatatatcactgaggctgatagcaaagaggtatatggtaggcatcagcgagaaatagttgaaaaagccaaagaagagtttcaagaaatgctttttgagcattctgaacttttttatgatttagatcttaatgcaacacctagttcagataaaatgagtgaaattcatacagttctgagtgaagaacctagatataaagctttacagaaacttgcacctgatagggaatcccttctacttaagcatataggatttgtttatcatcccactaaagaaacatgtcttagtggccaaaattgtacagacattaaagtggagcagttacttgctagtagtcttttacagttggatcatggccgcttaagattatatcacgatagtaccaatatagataaagttaacctttttattttagggaaggatggccttgcccaagaactagcaaatgagataaggacacaatccactgatgatgagtatgccttagatggaaaaatttatgaacttgatcttcggccggttgatgccaaatcgccttactttttgagtcagttatggactgccgcctttaaaccacatgggtgcttctgtgtatttaattccattgagtcattgagttttattggggaatttattgggaaaataagaactgaagcttctcagatcagaaaagataaatacatggctaatcttccatttacattaattctggctaatcagagagattccattagtaagaatctaccaattctcaggcaccaagggcagcagttggcaaacaagttgcaatgtccttttgtagatgtacctgctggtacatatcctcgtaaatttaatgaaacccaaataaagcaagctctcagaggagtattggaatcagttaaacacaatttggatgtggtgagcccaattcctgccaataaggacttatcagaagctgacttgagaattgtcatgtgcgccatgtgtggagatccatttagtgtggatcttattctttcacccttccttgattctcattcttgcagtgctgctcaagctggacagaataattccctaatgcttgataaaatcattggtgaaaaaaggaggcgaatacagatcacaatattatcataccactcttcaattggagtaagaaaagatgaactagttcatgggtatatattagtttactctgcaaaacggaaagcttcgatgggaatgcttcgagcatttctatcagaagttcaagacaccattcctgtacagctggtggcagttactgacagccaagcagatttttttgaaaatgaggctatcaaagagttaatgactgaaggagaacacattgcaactgagatcactgctaaatttacagcactgtattctttatctcagtatcatcggcaaactgaggtctttactctgttttttagtgatgttctagagaaaaaaaatatgatagaaaattcttatttgtctgataatacaagggaatcaacccatcaaagtgaagatgtttttctaccatctcccagagactgttttccctataataactaccctgattcagatgatgacacagaagcaccacctccttatagtccaattggggatgatgtacagttgcttccaacacctagtgaccgttccagatatagattagatttggaaggaaatgagtatcctattcatagtaccccaaactgtcatgaccatgaacgcaaccataaagtgcctccacctattaaacctaaaccagttgtacctaagacaaatgtgaaaaaactcgatccaaaccttttaaaaacaattgaagctggtattggtaaaaatccaagaaagcagacttcccgggtgcctttggcacatcctgaagatatggatccttcagataactatgcggaacccattgatacaattttcaaacagaagggctattctgatgagatttatgttgtcccagatgatagtcaaaatcgtattaaaattcgaaactcatttgtaaataacacccaaggagatgaagaaaatgggttttctgatagaacctcaaaaagtcatggggaacggaggccttcaaaatacaaatataaatctaaaaccttgtttagtaaagccaagtcatactatagaagaacacattcagatgccagtgatgatgaggctttcaccacttctaaaacaaaaagaaaaggaagacatcgtggaagtgaagaagatccacttctttctcctgttgaaacttggaaaggtggtattgataatcctgcaatcacttctgaccaggagttagatgataagaagatgaagaagaaaacccacaaagtgaaagaagataaaaagcagaaaaagaaaactaagaacttcaatccaccaacacgtagaaattgggaaagtaattactttgggatgcccctccaggatctggttacagctgagaagcccataccactatttgttgagaaatgtgtggaatttattgaagatacagggttatgtaccgaaggactctaccgtgtcagcgggaataaaactgaccaagacaatattcaaaagcagtttgatcaagatcataatatcaatctagtgtcaatggaagtaacagtaaatgctgtagctggagcccttaaagctttctttgcagatctgccagatcctttaattccatattctcttcatccagaactattggaagcagcaaaaatcccggataaaacagaacgtcttcatgccttgaaagaaattgttaagaaatttcatcctgtaaactatgatgtattcagatacgtgataacacatctaaacagggttagtcagcaacataaaatcaacctaatgacagcagacaacttatccatctgtttttggccaaccttgatgagacctgattttgaaaatcgagagtttctgtctactactaagattcatcaatctgttgttgaaacattcattcagcagtgtcagtttttcttttacaatggagaaattgtagaaacgacaaacattgtggctcctccaccaccttcaaacccaggacagttggtggaaccaatggtgccacttcagttgccgccaccattgcaacctcagctgatacaaccacaattacaaacggatcctcttggtattatatgagtaggaagtgattgcaaacaggctggatttggacaaaaagcaaatctagacatgcatgtttcagggttcagtagtatacttcatgtttcatacagataattcacattcaaaattacattttctctttgaactaga

SEQ ID NO: 175855 - DNA, 543 bp, Homo sapiens
  Payload ID: 14529
  Gene Symbol: ARHGAP5
  Gene Name: Rho GTPase activating protein 5
  ENST ID: ENST00000554090
  CDS Start-End: 133-543
agcgttattagaaatgcaagagagctggaggctcggggtgtagctgaggttgaaaggtgcacggaacagaaaaagaaaactaagaacttcaatccaccaacacgtagaaattgggaaagtaattactttgggatgcccctccaggatctggttacagctgagaagcccataccactatttgttgagaaatgtgtggaatttattgaagatacagggttatgtaccgaaggactctaccgtgtcagcgggaataaaactgaccaagacaatattcaaaagcagtttgatcaagatcataatatcaatctagtgtcaatggaagtaacagtaaatgctgtagctggagcccttaaagctttctttgcagatctgccagatcctttaattccatattctcttcatccagaactattggaagcagcaaaaatcccggataaaacagaacgtcttcatgccttgaaagaaattgttaagaaatttcatcctgtaaactatgatgtattcagatacgtgataacacatctaaacagggttagtcagcaa

SEQ ID NO: 175856 - DNA, 654 bp, Homo sapiens
  Payload ID: 14529
  Gene Symbol: ARHGAP5
  Gene Name: Rho GTPase activating protein 5
  ENST ID: ENST00000556191
  CDS Start-End: 235-654
agcgttattagaaatgcaagagagctggaggctcggggtgtagctgaggttgaaaggtgcacggaagaagatgatccctatgatcttgaagatgtttctgcacagaaatgagggaaatacaaagaaccaaatacagttctgaaatttgggatctgtattttgagatgattttattttcagaatgagaagcatatctggttacctttatgaatgtagagacatgagaagagagttatgatggcaaaaaacaaagagcctcgtcccccatcctataccatcagtatagttggactctctgggactgaaaaagacaaaggtaactgtggagttggaaagtcttgtttgtgcaatagatttgtacgctcaaaagcagatgaatattatccagagcatacttctgtgcttagcaccattgactttggaggacgagtagtaaacaatgatcactttttgtactggggtgacataatacaaaatagtgaagatggagtagaatgcaaaattcatgtcattgaacaaacagagttcattgatgaccagactttcttgcctcatcggagtacgaatttgcaaccatatataaaacgtgcagctgcatctaaattgcagtcagcagaaaaactaatgtacatttgcactgatcagctaggctta

SEQ ID NO: 175857 - DNA, 4824 bp, Homo sapiens
  Payload ID: 14529
  Gene Symbol: ARHGAP5
  Gene Name: Rho GTPase activating protein 5
  Uniprot ID: Q13017
  ENST ID: ENST00000556611
  CDS Start-End: 256-4761
gcgcgcgtcccgtccaggctgcgccgccgcgccgccgctccgcccccggtcgggtgtgtggctgcgcgcgccgggagagatgctgaggaagatgatccctatgatcttgaagatgtttctgcacagaaatgagggaaatacaaagaaccaaatacagttctgaaatttgggatctgtattttgagatgattttattttcagaatgagaagcatatctggttacctttatgaatgtagagacatgagaagagagttatgatggcaaaaaacaaagagcctcgtcccccatcctataccatcagtatagttggactctctgggactgaaaaagacaaaggtaactgtggagttggaaagtcttgtttgtgcaatagatttgtacgctcaaaagcagatgaatattatccagagcatacttctgtgcttagcaccattgactttggaggacgagtagtaaacaatgatcactttttgtactggggtgacataatacaaaatagtgaagatggagtagaatgcaaaattcatgtcattgaacaaacagagttcattgatgaccagactttcttgcctcatcggagtacgaatttgcaaccatatataaaacgtgcagctgcatctaaattgcagtcagcagaaaaactaatgtacatttgcactgatcagctaggcttagaacaagactttgaacagaagcaaatgcctgaagggaagctcaacgtagatggatttttattatgcattgatgtaagtcaaggatgcaataggaagtttgatgatcaacttaaatttgtgaataacctttttgtccagttatcaaaatcaaaaaaacctgtaataatagcagcaactaaatgtgatgaatgcgtggatcattatcttagagaagttcaggcatttgcttcaaataaaaagaaccttcttgtagtggaaacatcagcacgatttaatgtcaacattgaaacatgttttactgcactggtacaaatgttggataaaactcgtagcaagcctaaaattattccctatttggatgcttataaaacacagagacaacttgttgtcacagcaacagataagtttgaaaaacttgtgcagactgtgagagattatcatgcaacttggaaaactgttagtaataaattaaaaaatcatcctgattatgaagaatacatcaacttagagggaacaagaaaggccagaaatacattctcaaaacatatagaacaacttaaacaggaacatataagaaaaaggagagaagagtatataaatactttaccaagagcttttaacactcttttgccaaatctagaagagattgaacatttgaattggtcagaagctttgaagttaatggaaaagagagcagatttccagttatgttttgtggtgctagaaaaaactccttgggatgaaactgaccatatagacaaaattaatgataggcggattccatttgacctcctgagcactttagaagctgaaaaagtctatcagaaccatgtacagcatctgatatccgagaagaggagggtggaaatgaaggaaaaattcaaaaagactttggaaaaaattcaattcatttcaccagggcagccatgggaggaagttatgtgctttgttatggaggatgaagcctacaaatatatcactgaggctgatagcaaagaggtatatggtaggcatcagcgagaaatagttgaaaaagccaaagaagagtttcaagaaatgctttttgagcattctgaacttttttatgatttagatcttaatgcaacacctagttcagataaaatgagtgaaattcatacagttctgagtgaagaacctagatataaagctttacagaaacttgcacctgatagggaatcccttctacttaagcatataggatttgtttatcatcccactaaagaaacatgtcttagtggccaaaattgtacagacattaaagtggagcagttacttgctagtagtcttttacagttggatcatggccgcttaagattatatcacgatagtaccaatatagataaagttaacctttttattttagggaaggatggccttgcccaagaactagcaaatgagataaggacacaatccactgatgatgagtatgccttagatggaaaaatttatgaacttgatcttcggccggttgatgccaaatcgccttactttttgagtcagttatggactgccgcctttaaaccacatgggtgcttctgtgtatttaattccattgagtcattgagttttattggggaatttattgggaaaataagaactgaagcttctcagatcagaaaagataaatacatggctaatcttccatttacattaattctggctaatcagagagattccattagtaagaatctaccaattctcaggcaccaagggcagcagttggcaaacaagttgcaatgtccttttgtagatgtacctgctggtacatatcctcgtaaatttaatgaaacccaaataaagcaagctctcagaggagtattggaatcagttaaacacaatttggatgtggtgagcccaattcctgccaataaggacttatcagaagctgacttgagaattgtcatgtgcgccatgtgtggagatccatttagtgtggatcttattctttcacccttccttgattctcattcttgcagtgctgctcaagctggacagaataattccctaatgcttgataaaatcattggtgaaaaaaggaggcgaatacagatcacaatattatcataccactcttcaattggagtaagaaaagatgaactagttcatgggtatatattagtttactctgcaaaacggaaagcttcgatgggaatgcttcgagcatttctatcagaagttcaagacaccattcctgtacagctggtggcagttactgacagccaagcagatttttttgaaaatgaggctatcaaagagttaatgactgaaggagaacacattgcaactgagatcactgctaaatttacagcactgtattctttatctcagtatcatcggcaaactgaggtctttactctgttttttagtgatgttctagagaaaaaaaatatgatagaaaattcttatttgtctgataatacaagggaatcaacccatcaaagtgaagatgtttttctaccatctcccagagactgttttccctataataactaccctgattcagatgatgacacagaagcaccacctccttatagtccaattggggatgatgtacagttgcttccaacacctagtgaccgttccagatatagattagatttggaaggaaatgagtatcctattcatagtaccccaaactgtcatgaccatgaacgcaaccataaagtgcctccacctattaaacctaaaccagttgtacctaagacaaatgtgaaaaaactcgatccaaaccttttaaaaacaattgaagctggtattggtaaaaatccaagaaagcagacttcccgggtgcctttggcacatcctgaagatatggatccttcagataactatgcggaacccattgatacaattttcaaacagaagggctattctgatgagatttatgttgtcccagatgatagtcaaaatcgtattaaaattcgaaactcatttgtaaataacacccaaggagatgaagaaaatgggttttctgatagaacctcaaaaagtcatggggaacggaggccttcaaaatacaaatataaatctaaaaccttgtttagtaaagccaagtcatactatagaagaacacattcagatgccagtgatgatgaggctttcaccacttctaaaacaaaaagaaaaggaagacatcgtggaagtgaagaagatccacttctttctcctgttgaaacttggaaaggtggtattgataatcctgcaatcacttctgaccaggagttagatgataagaagatgaagaagaaaacccacaaagtgaaagaagataaaaagaaaaagaaaactaagaacttcaatccaccaacacgtagaaattgggaaagtaattactttgggatgcccctccaggatctggttacagctgagaagcccataccactatttgttgagaaatgtgtggaatttattgaagatacagggttatgtaccgaaggactctaccgtgtcagcgggaataaaactgaccaagacaatattcaaaagcagtttgatcaagatcataatatcaatctagtgtcaatggaagtaacagtaaatgctgtagctggagcccttaaagctttctttgcagatctgccagatcctttaattccatattctcttcatccagaactattggaagcagcaaaaatcccggataaaacagaacgtcttcatgccttgaaagaaattgttaagaaatttcatcctgtaaactatgatgtattcagatacgtgataacacatctaaacagggttagtcagcaacataaaatcaacctaatgacagcagacaacttatccatctgtttttggccaaccttgatgagacctgattttgaaaatcgagagtttctgtctactactaagattcatcaatctgttgttgaaacattcattcagcagtgtcagtttttcttttacaatggagaaattgtagaaacgacaaacattgtggctcctccaccaccttcaaacccaggacagttggtggaaccaatggtgccacttcagttgccgccaccattgcaacctcagctgatacaaccacaattacaaacggatcctcttggtattatatgagtaggaagtgattgcaaacaggctggatttggacaaaaagcaaatctagacatgcatgtttca

SEQ ID NO: 175858 - DNA, 583 bp, Homo sapiens
  Payload ID: 14529
  Gene Symbol: ARHGAP5
  Gene Name: Rho GTPase activating protein 5
  ENST ID: ENST00000555814
  CDS Start-End: 473-583
actttcacagaacgtactgaatcaggggcctgcatccccgtgccgtgccgagccgacggagaaatggactcctcttctcgctcctgtggagtttcgtcttctggtacggtggtttgctcttgagttacgaccagaaaccggaacagaaggaaagggagaagcaggggaggttcggggacgacggcgctccgggcagtaaggcagtagcttccaaagcgtggaggatgggactgaggaggagcagaatacggagaaagagggaagctgaggaaaaatactcacgccaatgggtaaaagggaaaaggaagatgatccctatgatcttgaagatgtttctgcacagaaatgagggaaatacaaagaaccaaatacagttctgaaatttgggatctgtattttgagatgattttattttcagaatgagaagcatatctggttacctttatgaatgtagagacatgagaagagagttatgatggcaaaaaacaaagagcctcgtcccccatcctataccatcagtatagttggactctctgggactgaaaaagacaaaggtaactgtggagttggaaagtcttgtttg

SEQ ID NO: 175859 - DNA, 872 bp, Homo sapiens
  Payload ID: 14529
  Gene Symbol: ARHGAP5
  Gene Name: Rho GTPase activating protein 5
  ENST ID: ENST00000557643
  CDS Start-End: 1-445
ctcatttgtaaataacacccaaggagatgaagaaaatgggttttctgatagaacctcaaaaagtcatggggaacggaggccttcaaaatacaaatataaatctaaaaccttgtttagtaaagccaagtcatactatagaagaacacattcagatgccagtgatgatgaggctttcaccacttctaaaacaaaaagaaaaggaagacatcgtggaagtgaagaagatccacttctttctcctgttgaaacttggaaaggtggtattgataatcctgcaatcacttctgaccaggagttagatgataagaagatgaagaagaaaacccacaaagtgaaagaagataaaaagggttatgtaccgaaggactctaccgtgtcagcgggaataaaactgaccaagacaatattcaaaagcagtttgatcaagatcataatatcaatctagtgtcaatggaagtaacagtaaatgctgtagctggagcccttaaagctttctttgcagatctgccagatcctttaattccatattctcttcatccagaactattggaagcagcaaaaatcccggataaaacagaacgtcttcatgccttgaaagaaattgttaagaaatttcatcctgtaaactatgatgtattcagatacgtgataacacatctaaacagggttagtcagcaacataaaatcaacctaatgacagcagacaacttatccatctgtttttggccaaccttgatgagacctgattttgaaaatcgagagtttctgtctactactaagattcatcaatctgttgttgaaacattcattcagcagtgtcagtttttcttttacaatggagaaattgtagaaacgacaaacattgtggctcc

SEQ ID NO: 175860 - DNA, 3946 bp, Homo sapiens
  Payload ID: 14530
  Gene Symbol: ARHGAP6
  Gene Name: Rho GTPase activating protein 6
  Uniprot ID: O43182
  ENST ID: ENST00000303025
  CDS Start-End: 312-2627
gcctgcctctgttctgaaaggacaggaacttctcaatgatccgatgaaaagattgcatatttttggtcccaagattcacagtagcggaggtctctggcaacaaaaggtatcgtgggagtcacagctatgccagctgggccatttctcagacattcaatatgatctgccatttcaggatgcattttttaccaaaaaaataatttttttaaaacagactcaacttcctactgcaagcttagttcagttagattagagaggacagcaaagacgcggctgattataatttatggggtgatttcacctggaacagcatgtcaggccgcagtgtacggctgaggtcagtccccatccagagtctctcagagctggagagggcccggctgcaggaagtggctttttatcagttgcaacaggactgtgacctgagctgtcagatcaccattcccaaagatggacaaaagagaaagaaatctttaagaaagaaactggattcactaggaaaggagaaaaacaaagacaaagaattcatcccacaggcatttggaatgcccttatcccaagtcattgcgaatgacagggcctataaactcaagcaggacttgcagagggacgagcagaaagatgcatctgactttgtggcttccctcctcccatttggaaataaaagacaaaacaaagaactctcaagcagtaactcatctctcagctcaacctcagaaacaccgaatgagtcaacgtccccaaacaccccggaaccggctcctcgggctaggaggaggggtgccatgtcagtggattctatcaccgatcttgatgacaatcagtctcgactactagaagctttacaactttccttgcctgctgaggctcaaagtaaaaaggaaaaagccagagataagaaactcagtctgaatcctatttacagacaggtccctaggctggtggacagctgctgtcagcacctagaaaaacatggcctccagacagtggggatattccgagttggaagctcaaaaaagagagtgagacaattacgtgaggaatttgaccgtgggattgatgtctctctggaggaggagcacagtgttcatgatgtggcagccttgctgaaagagttcctgagggacatgccagacccccttctcaccagggagctgtacacagctttcatcaacactctcttgttggagccggaggaacagctgggcaccttgcagctcctcatataccttctacctccctgcaactgcgacaccctccaccgcctgctacagttcctctccatcgtggccaggcatgccgatgacaacatcagcaaagatgggcaagaggtcactgggaataaaatgacatctctaaacttagccaccatatttggacccaacctgctgcacaagcagaagtcatcagacaaagaattctcagttcagagttcagcccgggctgaggagagcacggccatcatcgctgttgtgcaaaagatgattgaaaattatgaagccctgttcatggttcccccagatctccagaacgaagtgctgatcagcctgttagagaccgatcctgatgtcgtggactatttactcagaagaaaggcttcccaatcatcaagccctgacatgctgcagtcggaagtttccttttccgtgggagggaggcattcatctacagactccaacaaggcctccagcggagacatctccccttatgacaacaactccccagtgctgtctgagcgctccctgctggctatgcaagaggacgcggccccggggggctcggagaagctttacagagtgccagggcagtttatgctggtgggccacttgtcgtcgtcaaagtcaagggaaagttctcctggaccaaggcttgggaaagatctgtcagaggagcctttcgatatctggggaacttggcattcaacattaaaaagcggatccaaagacccaggaatgacaggttcctctggagacatttttgaaagcagctccctaagagcggggccctgctccctttctcaagggaacctgtccccaaattggcctcggtggcaggggagccccgcagagctggacagcgacacgcagggggctcggaggactcaggccgcagcccccgcgacggagggcagggcccaccctgcggtgtcgcgcgcctgcagcacgccccacgtccaggtggcagggaaagccgagcggcccacggccaggtcggagcagtacttgaccctgagcggcgcccacgacctcagcgagagtgagctggatgtggccgggctgcagagccgggccacacctcagtgccaaagaccccatgggagtgggagggatgacaagcggcccccgcctccatacccgggcccagggaagcccgcggcagcggcagcctggatccaggggcccccggaaggcgtggagacacccacggaccagggaggccaagcagccgagcgagagcagcaggtcacgcagaaaaaactgagcagcgccaactccctgccagcgggcgagcaggacagtccgcgcctgggggacgctggctggctcgactggcagagagagcgctggcagatctgggagctcctgtcgaccgacaaccccgatgccctgcccgagacgctggtctgagcccgcacccagccgagccccccctgccccgagccccccgccctccagcccaggggggaccgtgggtggtggccactggcacacttagtgttcttctttcacacttctcaaaagtgacacaagagaaatccagttcacctacagaggtagagcactcacgcccccgccattgagaataaggttccattgcgtagccagccttaggaaaaacaaacagaacccaaaccagatggcaatgtccaatctaaaaacgtccctcttggctctataatataagatacaactcttgcttggtatagcctaaccgtatttatgtgtcttcggttttgactattgtgtattctgtaacagattatgtataatcatatatgatatattcacaaagagaaaacaaaaggaacttttaaaaaaaaaatcacttcacttatattaagcaatgagatatactaaacaatgagattctatagaatgttctagaatgtgcacaagcgggtttctgtgcttttgccatagctttataactggggataacccttccttcgataccaaacactaacaagaggaagcagaatatgagaagccatatttttacataggagtcagatacaaaaagaaaaatcactgaatgcttttagatattgaatacgttttcaggaaaatgctaaatctgatagattacgaaatatatttttagaacttgtttagaaaggattcagttaaccaaacaagaaaaaggcagtgcctcacaaagaaattaagaagttgtccgtcccacgttacatcaaattcagttttatataggccatatataatatatatttataatgtataatttttatgtatttttcaaaactacaaactggaatccaactataaagtgtttaagaatctacacagaatattcaaattatagaacatgttttttccctttgccccataatcagtatttgccaaattacatgcaattccttaaaaactaaatcacatttggtaaaaggcctacagctttgtacttacattgtgccaaaggctgaggaaatgttttctttcgtaattttatgtgtattgtaaaatgttctaccgtactttagtagtttgaagtttttcaagtgcataactatttttgaccagcagatggcgatacgcttcagtattttatgcaattttttttcacttctgaagggaaagtgtattataaaaaaagattttttttttttttataaaacatgctactcttaattttcatgttggtgatgaaattcccagtggtgtttcttaaggttctatcttgtgccatgatgaataaaaagttaagcaaa

SEQ ID NO: 175861 - DNA, 5117 bp, Homo sapiens
  Payload ID: 14530
  Gene Symbol: ARHGAP6
  Gene Name: Rho GTPase activating protein 6
  Uniprot ID: O43182
  ENST ID: ENST00000337414
  CDS Start-End: 874-3798
ggctgggctgcgaatagcgtgttcctctccggcggaacacacacacccggccttggggctgtctcctgagctccctcctccacggagagcgctgagcgccgccgggaattccatcccaccgtgggcacgcagtctttggaggtcccgggcgcagcacgctcggtgtccccacactgcagcaagacagagaccccgcgggaaccttgagcttggaacaacccttgagcctctgcagtcggaagagtgggcgcagcagcccagcggaggccaggcgcgcaacctcgggcgccggggcaaggagagagtgcagggaggcgcagctcaggcgcccggctcaggagcgggaggaagttctcgcggcgccgggagcgcggtggacgcgccctgggcgcacgcccaggcagccttctccctggccctcgggactgtcctcgggccgcaaggaggagcttgctggagtcttagaggccatccagagccagcgagcaggagcgctgcgtctcccgcctcagctaggaagggggagtggcgctggcaggctggagctgggaacccagcgagcgcctgaccttcctcctcctcttcctgaccctcttcgcgtcttgggctccggaggaaggttctagcggctgcaggaggtccccagacccattttcctagaaggctggtgatggatctgctgctcctgccgccgccggggcacttggagcgcaccggcggcgcgtgagctgggctttgctctccactgccctgggcaaaccccgggccagccccgcctggcacctttgcctgagtccctttcggttcccgacccaaagccaccagcgtccagggagggaggaggaggtggtcctcaggtgcagccccgccgagatgtccgcgcagagcctgctccacagcgtcttctcctgttcctcgcccgcttcaagtagcgcggcctcggccaagggcttctccaagaggaagctgcgccagacccgcagcctggacccggccctgatcggcggctgcgggagcgacgaggcgggcgcggagggcagtgcgcggggagccacggcgggccgcctctactccccatcactcccagccgagagtctcggccctcgcttggcgtcctcttcccggggtccgccccccagggccaccaggctaccgcctcctggacctctttgctcgtccttctccacacccagcaccccgcaggagaagtcaccatccggcagctttcactttgactatgaggttcccctgggtcgcggcggcctcaagaagagcatggcctgggacctgccttctgtcctggccgggccagccagtagccgaagcgcttccagcatcctctgttcatccgggggaggccccaatggcatcttcgcttctcctaggaggtggctccagcagaggaagttccagtccccacccgacagtcgcgggcacccctacgtcgtgtggaaatccgagggtgatttcacctggaacagcatgtcaggccgcagtgtacggctgaggtcagtccccatccagagtctctcagagctggagagggcccggctgcaggaagtggctttttatcagttgcaacaggactgtgacctgagctgtcagatcaccattcccaaagatggacaaaagagaaagaaatctttaagaaagaaactggattcactaggaaaggagaaaaacaaagacaaagaattcatcccacaggcatttggaatgcccttatcccaagtcattgcgaatgacagggcctataaactcaagcaggacttgcagagggacgagcagaaagatgcatctgactttgtggcttccctcctcccatttggaaataaaagacaaaacaaagaactctcaagcagtaactcatctctcagctcaacctcagaaacaccgaatgagtcaacgtccccaaacaccccggaaccggctcctcgggctaggaggaggggtgccatgtcagtggattctatcaccgatcttgatgacaatcagtctcgactactagaagctttacaactttccttgcctgctgaggctcaaagtaaaaaggaaaaagccagagataagaaactcagtctgaatcctatttacagacaggtccctaggctggtggacagctgctgtcagcacctagaaaaacatggcctccagacagtggggatattccgagttggaagctcaaaaaagagagtgagacaattacgtgaggaatttgaccgtgggattgatgtctctctggaggaggagcacagtgttcatgatgtggcagccttgctgaaagagttcctgagggacatgccagacccccttctcaccagggagctgtacacagctttcatcaacactctcttgttggagccggaggaacagctgggcaccttgcagctcctcatataccttctacctccctgcaactgcgacaccctccaccgcctgctacagttcctctccatcgtggccaggcatgccgatgacaacatcagcaaagatgggcaagaggtcactgggaataaaatgacatctctaaacttagccaccatatttggacccaacctgctgcacaagcagaagtcatcagacaaagaattctcagttcagagttcagcccgggctgaggagagcacggccatcatcgctgttgtgcaaaagatgattgaaaattatgaagccctgttcatggttcccccagatctccagaacgaagtgctgatcagcctgttagagaccgatcctgatgtcgtggactatttactcagaagaaaggcttcccaatcatcaagccctgacatgctgcagtcggaagtttccttttccgtgggagggaggcattcatctacagactccaacaaggcctccagcggagacatctccccttatgacaacaactccccagtgctgtctgagcgctccctgctggctatgcaagaggacgcggccccggggggctcggagaagctttacagagtgccagggcagtttatgctggtgggccacttgtcgtcgtcaaagtcaagggaaagttctcctggaccaaggcttgggaaagatctgtcagaggagcctttcgatatctggggaacttggcattcaacattaaaaagcggatccaaagacccaggaatgacaggttcctctggagacatttttgaaagcagctccctaagagcggggccctgctccctttctcaagggaacctgtccccaaattggcctcggtggcaggggagccccgcagagctggacagcgacacgcagggggctcggaggactcaggccgcagcccccgcgacggagggcagggcccaccctgcggtgtcgcgcgcctgcagcacgccccacgtccaggtggcagggaaagccgagcggcccacggccaggtcggagcagtacttgaccctgagcggcgcccacgacctcagcgagagtgagctggatgtggccgggctgcagagccgggccacacctcagtgccaaagaccccatgggagtgggagggatgacaagcggcccccgcctccatacccgggcccagggaagcccgcggcagcggcagcctggatccaggggcccccggaaggcgtggagacacccacggaccagggaggccaagcagccgagcgagagcagcaggtcacgcagaaaaaactgagcagcgccaactccctgccagcgggcgagcaggacagtccgcgcctgggggacgctggctggctcgactggcagagagagcgctggcagatctgggagctcctgtcgaccgacaaccccgatgccctgcccgagacgctggtctgagcccgcacccagccgagccccccctgccccgagccccccgccctccagcccaggggggaccgtgggtggtggccactggcacacttagtgttcttctttcacacttctcaaaagtgacacaagagaaatccagttcacctacagaggtagagcactcacgcccccgccattgagaataaggttccattgcgtagccagccttaggaaaaacaaacagaacccaaaccagatggcaatgtccaatctaaaaacgtccctcttggctctataatataagatacaactcttgcttggtatagcctaaccgtatttatgtgtcttcggttttgactattgtgtattctgtaacagattatgtataatcatatatgatatattcacaaagagaaaacaaaaggaacttttaaaaaaaaaatcacttcacttatattaagcaatgagatatactaaacaatgagattctatagaatgttctagaatgtgcacaagcgggtttctgtgcttttgccatagctttataactggggataacccttccttcgataccaaacactaacaagaggaagcagaatatgagaagccatatttttacataggagtcagatacaaaaagaaaaatcactgaatgcttttagatattgaatacgttttcaggaaaatgctaaatctgatagattacgaaatatatttttagaacttgtttagaaaggattcagttaaccaaacaagaaaaaggcagtgcctcacaaagaaattaagaagttgtccgtcccacgttacatcaaattcagttttatataggccatatataatatatatttataatgtataatttttatgtatttttcaaaactacaaactggaatccaactataaagtgtttaagaatctacacagaatattcaaattatagaacatgttttttccctttgccccataatcagtatttgccaaattacatgcaattccttaaaaactaaatcacatttggtaaaaggcctacagctttgtacttacattgtgccaaaggctgaggaaatgttttctttcgtaattttatgtgtattgtaaaatgttctaccgtactttagtagtttgaagtttttcaagtgcataactatttttgaccagcagatggcgatacgcttcagtattttatgcaattttttttcacttctgaagggaaagtgtattataaaaaaagattttttttttttttataaaacatgctactcttaattttcatgttggtgatgaaattcccagtggtgtttcttaaggttctatcttgtgccatgatgaataaaaagttaagcaaa

SEQ ID NO: 175862 - DNA, 2267 bp, Homo sapiens
  Payload ID: 14530
  Gene Symbol: ARHGAP6
  Gene Name: Rho GTPase activating protein 6
  ENST ID: ENST00000380717
  CDS Start-End: 1-1806
ttggagttgtatgatcttcagatcttaggcacaaaaccaccgatgaattccgatacacatcgtaactttgaccccaccgcaacccttagaaatcagggtgatttcacctggaacagcatgtcaggccgcagtgtacggctgaggtcagtccccatccagagtctctcagagctggagagggcccggctgcaggaagtggctttttatcagttgcaacaggactgtgacctgagctgtcagatcaccattcccaaagatggacaaaagagaaagaaatctttaagaaagaaactggattcactaggaaaggagaaaaacaaagacaaagaattcatcccacaggcatttggaatgcccttatcccaagtcattgcgaatgacagggcctataaactcaagcaggacttgcagagggacgagcagaaagatgcatctgactttgtggcttccctcctcccatttggaaataaaagacaaaacaaagaactctcaagcagtaactcatctctcagctcaacctcagaaacaccgaatgagtcaacgtccccaaacaccccggaaccggctcctcgggctaggaggaggggtgccatgtcagtggattctatcaccgatcttgatgacaatcagtctcgactactagaagctttacaactttccttgcctgctgaggctcaaagtaaaaaggaaaaagccagagataagaaactcagtctgaatcctatttacagacaggtccctaggctggtggacagctgctgtcagcacctagaaaaacatggcctccagacagtggggatattccgagttggaagctcaaaaaagagagtgagacaattacgtgaggaatttgaccgtgggattgatgtctctctggaggaggagcacagtgttcatgatgtggcagccttgctgaaagagttcctgagggacatgccagacccccttctcaccagggagctgtacacagctttcatcaacactctcttgttggagccggaggaacagctgggcaccttgcagctcctcatataccttctacctccctgcaactgcgacaccctccaccgcctgctacagttcctctccatcgtggccaggcatgccgatgacaacatcagcaaagatgggcaagaggtcactgggaataaaatgacatctctaaacttagccaccatatttggacccaacctgctgcacaagcagaagtcatcagacaaagaattctcagttcagagttcagcccgggctgaggagagcacggccatcatcgctgttgtgcaaaagatgattgaaaattatgaagccctgttcatggttcccccagatctccagaacgaagtgctgatcagcctgttagagaccgatcctgatgtcgtggactatttactcagaagaaaggcttcccaatcatcaagccctgacatgctgcagtcggaagtttccttttccgtgggagggaggcattcatctacagactccaacaaggcctccagcggagacatctccccttatgacaacaactccccagtgctgtctgagcgctccctgctggctatgcaagaggacgcggccccggggggctcggagaagctttacagagtgccagggcagtttatgctggtgggccacttgtcgtcgtcaaagtcaagggaaagttctcctggaccaaggcttgggaaaggtaactggagcctggccagcaggcgctggccaaaacaagcgaccctcctcttgttgcatgtggcatggtgtggggctcttcggaccttctcttcgtctctcccttatttgatgtttctgtaattcaacctgcatttaccgagtacctgctgaacgcctactctaggaagaggaaggtatggcgagcccagtcgttggctgggagggtccctgcaggccacactccaagtctcagatatctgggaaataaacgcatgcccagaggagccactcctattcccagctgattctttttccctccagcatcctaggaactttatgtatactggatttgggttgcatatttgctagtctgaggtgccacccaattactgctgttacatttctaaagaaaacaagctgaacctactatatgtatgaagacaaccttccagaaccaaatagtgttagtatccaatgacaagagagcactatactgggagtcacaaacctgctctgccactttcaacctgcaggatctccagtgagcgattgagcttcccagagtcccatttcctcctgctgtgaaaactcagaatgataac

SEQ ID NO: 175863 - DNA, 3632 bp, Homo sapiens
  Payload ID: 14530
  Gene Symbol: ARHGAP6
  Gene Name: Rho GTPase activating protein 6
  Uniprot ID: O43182
  ENST ID: ENST00000380718
  CDS Start-End: 874-3171
ggctgggctgcgaatagcgtgttcctctccggcggaacacacacacccggccttggggctgtctcctgagctccctcctccacggagagcgctgagcgccgccgggaattccatcccaccgtgggcacgcagtctttggaggtcccgggcgcagcacgctcggtgtccccacactgcagcaagacagagaccccgcgggaaccttgagcttggaacaacccttgagcctctgcagtcggaagagtgggcgcagcagcccagcggaggccaggcgcgcaacctcgggcgccggggcaaggagagagtgcagggaggcgcagctcaggcgcccggctcaggagcgggaggaagttctcgcggcgccgggagcgcggtggacgcgccctgggcgcacgcccaggcagccttctccctggccctcgggactgtcctcgggccgcaaggaggagcttgctggagtcttagaggccatccagagccagcgagcaggagcgctgcgtctcccgcctcagctaggaagggggagtggcgctggcaggctggagctgggaacccagcgagcgcctgaccttcctcctcctcttcctgaccctcttcgcgtcttgggctccggaggaaggttctagcggctgcaggaggtccccagacccattttcctagaaggctggtgatggatctgctgctcctgccgccgccggggcacttggagcgcaccggcggcgcgtgagctgggctttgctctccactgccctgggcaaaccccgggccagccccgcctggcacctttgcctgagtccctttcggttcccgacccaaagccaccagcgtccagggagggaggaggaggtggtcctcaggtgcagccccgccgagatgtccgcgcagagcctgctccacagcgtcttctcctgttcctcgcccgcttcaagtagcgcggcctcggccaagggcttctccaagaggaagctgcgccagacccgcagcctggacccggccctgatcggcggctgcgggagcgacgaggcgggcgcggagggcagtgcgcggggagccacggcgggccgcctctactccccatcactcccagccgagagtctcggccctcgcttggcgtcctcttcccggggtccgccccccagggccaccaggctaccgcctcctggacctctttgctcgtccttctccacacccagcaccccgcaggagaagtcaccatccggcagctttcactttgactatgaggttcccctgggtcgcggcggcctcaagaagagcatggcctgggacctgccttctgtcctggccgggccagccagtagccgaagcgcttccagcatcctctgttcatccgggggaggccccaatggcatcttcgcttctcctaggaggtggctccagcagaggaagttccagtccccacccgacagtcgcgggcacccctacgtcgtgtggaaatccgagggtgatttcacctggaacagcatgtcaggccgcagtgtacggctgaggtcagtccccatccagagtctctcagagctggagagggcccggctgcaggaagtggctttttatcagttgcaacaggactgtgacctgagctgtcagatcaccattcccaaagatggacaaaagagaaagaaatctttaagaaagaaactggattcactaggaaaggagaaaaacaaagacaaagaattcatcccacaggcatttggaatgcccttatcccaagtcattgcgaatgacagggcctataaactcaagcaggacttgcagagggacgagcagaaagatgcatctgactttgtggcttccctcctcccatttggaaataaaagacaaaacaaagaactctcaagcagtaactcatctctcagctcaacctcagaaacaccgaatgagtcaacgtccccaaacaccccggaaccggctcctcgggctaggaggaggggtgccatgtcagtggattctatcaccgatcttgatgacaatcagtctcgactactagaagctttacaactttccttgcctgctgaggctcaaagtaaaaaggaaaaagccagagataagaaactcagtctgaatcctatttacagacaggtccctaggctggtggacagctgctgtcagcacctagaaaaacatggcctccagacagtggggatattccgagttggaagctcaaaaaagagagtgagacaattacgtgaggaatttgaccgtgggattgatgtctctctggaggaggagcacagtgttcatgatgtggcagccttgctgaaagagttcctgagggacatgccagacccccttctcaccagggagctgtacacagctttcatcaacactctcttgttggagccggaggaacagctgggcaccttgcagctcctcatataccttctacctccctgcaactgcgacaccctccaccgcctgctacagttcctctccatcgtggccaggcatgccgatgacaacatcagcaaagatgggcaagaggtcactgggaataaaatgacatctctaaacttagccaccatatttggacccaacctgctgcacaagcagaagtcatcagacaaagaattctcagttcagagttcagcccgggctgaggagagcacggccatcatcgctgttgtgcaaaagatgattgaaaattatgaagccctgttcatggttcccccagatctccagaacgaagtgctgatcagcctgttagagaccgatcctgatgtcgtggactatttactcagaagaaaggcttcccaatcatcaagccctgacatgctgcagtcggaagtttccttttccgtgggagggaggcattcatctacagactccaacaaggcctccagcggagacatctccccttatgacaacaactccccagtgctgtctgagcgctccctgctggctatgcaagaggacgcggccccggggggctcggagaagctttacagagtgccagggcagtttatgctggtgggccacttgtcgtcgtcaaagtcaagggaaagttctcctggaccaaggcttgggaaaggtaactggagcctggccagcaggcgctggccaaaacaagcgaccctcctcttgttgcatgtggcatggtgtggggctcttcggaccttctcttcgtctctcccttatttgatgtttctgtaattcaacctgcatttaccgagtacctgctgaacgcctactctaggaagaggaaggtatggcgagcccagtcgttggctgggagggtccctgcaggccacactccaagtctcagatatctgggaaataaacgcatgcccagaggagccactcctattcccagctgattctttttccctccagcatcctaggaactttatgtatactggatttgggttgcatatttgctagtctgaggtgccacccaattactgctgttacatttctaaagaaaacaagctgaacctactatatgtatgaagacaaccttccagaaccaaatagtgttagtatccaatgacaagagagcactatactgggagtcacaaacctgctctgccactttcaacctgcaggatctccagtgagcgattgagcttcccagagtcccatttcctcctgctgtgaaaactcagaatgataac

SEQ ID NO: 175864 - DNA, 3883 bp, Homo sapiens
  Payload ID: 14530
  Gene Symbol: ARHGAP6
  Gene Name: Rho GTPase activating protein 6
  Uniprot ID: O43182
  ENST ID: ENST00000380736
  CDS Start-End: 248-2563
ccggctccgcagcggcagcgggacgctgtgccaggggcgctttgcacagcactcggcacgcacggagcagggctcgcgcccaggggctgccccaggatggcagtgaagtgcggggaactcagagagacaccgtgaccccaggctgagcccaaggcgcgccactcctcccggaggcgacatggggcacccggtgtaccgcggcgagaagccccagctgcactacgcgggtgatttcacctggaacagcatgtcaggccgcagtgtacggctgaggtcagtccccatccagagtctctcagagctggagagggcccggctgcaggaagtggctttttatcagttgcaacaggactgtgacctgagctgtcagatcaccattcccaaagatggacaaaagagaaagaaatctttaagaaagaaactggattcactaggaaaggagaaaaacaaagacaaagaattcatcccacaggcatttggaatgcccttatcccaagtcattgcgaatgacagggcctataaactcaagcaggacttgcagagggacgagcagaaagatgcatctgactttgtggcttccctcctcccatttggaaataaaagacaaaacaaagaactctcaagcagtaactcatctctcagctcaacctcagaaacaccgaatgagtcaacgtccccaaacaccccggaaccggctcctcgggctaggaggaggggtgccatgtcagtggattctatcaccgatcttgatgacaatcagtctcgactactagaagctttacaactttccttgcctgctgaggctcaaagtaaaaaggaaaaagccagagataagaaactcagtctgaatcctatttacagacaggtccctaggctggtggacagctgctgtcagcacctagaaaaacatggcctccagacagtggggatattccgagttggaagctcaaaaaagagagtgagacaattacgtgaggaatttgaccgtgggattgatgtctctctggaggaggagcacagtgttcatgatgtggcagccttgctgaaagagttcctgagggacatgccagacccccttctcaccagggagctgtacacagctttcatcaacactctcttgttggagccggaggaacagctgggcaccttgcagctcctcatataccttctacctccctgcaactgcgacaccctccaccgcctgctacagttcctctccatcgtggccaggcatgccgatgacaacatcagcaaagatgggcaagaggtcactgggaataaaatgacatctctaaacttagccaccatatttggacccaacctgctgcacaagcagaagtcatcagacaaagaattctcagttcagagttcagcccgggctgaggagagcacggccatcatcgctgttgtgcaaaagatgattgaaaattatgaagccctgttcatggttcccccagatctccagaacgaagtgctgatcagcctgttagagaccgatcctgatgtcgtggactatttactcagaagaaaggcttcccaatcatcaagccctgacatgctgcagtcggaagtttccttttccgtgggagggaggcattcatctacagactccaacaaggcctccagcggagacatctccccttatgacaacaactccccagtgctgtctgagcgctccctgctggctatgcaagaggacgcggccccggggggctcggagaagctttacagagtgccagggcagtttatgctggtgggccacttgtcgtcgtcaaagtcaagggaaagttctcctggaccaaggcttgggaaagatctgtcagaggagcctttcgatatctggggaacttggcattcaacattaaaaagcggatccaaagacccaggaatgacaggttcctctggagacatttttgaaagcagctccctaagagcggggccctgctccctttctcaagggaacctgtccccaaattggcctcggtggcaggggagccccgcagagctggacagcgacacgcagggggctcggaggactcaggccgcagcccccgcgacggagggcagggcccaccctgcggtgtcgcgcgcctgcagcacgccccacgtccaggtggcagggaaagccgagcggcccacggccaggtcggagcagtacttgaccctgagcggcgcccacgacctcagcgagagtgagctggatgtggccgggctgcagagccgggccacacctcagtgccaaagaccccatgggagtgggagggatgacaagcggcccccgcctccatacccgggcccagggaagcccgcggcagcggcagcctggatccaggggcccccggaaggcgtggagacacccacggaccagggaggccaagcagccgagcgagagcagcaggtcacgcagaaaaaactgagcagcgccaactccctgccagcgggcgagcaggacagtccgcgcctgggggacgctggctggctcgactggcagagagagcgctggcagatctgggagctcctgtcgaccgacaaccccgatgccctgcccgagacgctggtctgagcccgcacccagccgagccccccctgccccgagccccccgccctccagcccaggggggaccgtgggtggtggccactggcacacttagtgttcttctttcacacttctcaaaagtgacacaagagaaatccagttcacctacagaggtagagcactcacgcccccgccattgagaataaggttccattgcgtagccagccttaggaaaaacaaacagaacccaaaccagatggcaatgtccaatctaaaaacgtccctcttggctctataatataagatacaactcttgcttggtatagcctaaccgtatttatgtgtcttcggttttgactattgtgtattctgtaacagattatgtataatcatatatgatatattcacaaagagaaaacaaaaggaacttttaaaaaaaaaatcacttcacttatattaagcaatgagatatactaaacaatgagattctatagaatgttctagaatgtgcacaagcgggtttctgtgcttttgccatagctttataactggggataacccttccttcgataccaaacactaacaagaggaagcagaatatgagaagccatatttttacataggagtcagatacaaaaagaaaaatcactgaatgcttttagatattgaatacgttttcaggaaaatgctaaatctgatagattacgaaatatatttttagaacttgtttagaaaggattcagttaaccaaacaagaaaaaggcagtgcctcacaaagaaattaagaagttgtccgtcccacgttacatcaaattcagttttatataggccatatataatatatatttataatgtataatttttatgtatttttcaaaactacaaactggaatccaactataaagtgtttaagaatctacacagaatattcaaattatagaacatgttttttccctttgccccataatcagtatttgccaaattacatgcaattccttaaaaactaaatcacatttggtaaaaggcctacagctttgtacttacattgtgccaaaggctgaggaaatgttttctttcgtaattttatgtgtattgtaaaatgttctaccgtactttagtagtttgaagtttttcaagtgcataactatttttgaccagcagatggcgatacgcttcagtattttatgcaattttttttcacttctgaagggaaagtgtattataaaaaaagattttttttttttttataaaacatgctactcttaattttcatgttggtgatgaaattcccagtggtgtttcttaaggttctatcttgtgccatgatgaataaaaagttaagcaaag

SEQ ID NO: 175865 - DNA, 5303 bp, Homo sapiens
  Payload ID: 14530
  Gene Symbol: ARHGAP6
  Gene Name: Rho GTPase activating protein 6
  Uniprot ID: O43182
  ENST ID: ENST00000495242
  CDS Start-End: 874-2946
ggctgggctgcgaatagcgtgttcctctccggcggaacacacacacccggccttggggctgtctcctgagctccctcctccacggagagcgctgagcgccgccgggaattccatcccaccgtgggcacgcagtctttggaggtcccgggcgcagcacgctcggtgtccccacactgcagcaagacagagaccccgcgggaaccttgagcttggaacaacccttgagcctctgcagtcggaagagtgggcgcagcagcccagcggaggccaggcgcgcaacctcgggcgccggggcaaggagagagtgcagggaggcgcagctcaggcgcccggctcaggagcgggaggaagttctcgcggcgccgggagcgcggtggacgcgccctgggcgcacgcccaggcagccttctccctggccctcgggactgtcctcgggccgcaaggaggagcttgctggagtcttagaggccatccagagccagcgagcaggagcgctgcgtctcccgcctcagctaggaagggggagtggcgctggcaggctggagctgggaacccagcgagcgcctgaccttcctcctcctcttcctgaccctcttcgcgtcttgggctccggaggaaggttctagcggctgcaggaggtccccagacccattttcctagaaggctggtgatggatctgctgctcctgccgccgccggggcacttggagcgcaccggcggcgcgtgagctgggctttgctctccactgccctgggcaaaccccgggccagccccgcctggcacctttgcctgagtccctttcggttcccgacccaaagccaccagcgtccagggagggaggaggaggtggtcctcaggtgcagccccgccgagatgtccgcgcagagcctgctccacagcgtcttctcctgttcctcgcccgcttcaagtagcgcggcctcggccaagggcttctccaagaggaagctgcgccagacccgcagcctggacccggccctgatcggcggctgcgggagcgacgaggcgggcgcggagggcagtgcgcggggagccacggcgggccgcctctactccccatcactcccagccgagagtctcggccctcgcttggcgtcctcttcccggggtccgccccccagggccaccaggctaccgcctcctggacctctttgctcgtccttctccacacccagcaccccgcaggagaagtcaccatccggcagctttcactttgactatgaggttcccctgggtcgcggcggcctcaagaagagcatggcctgggacctgccttctgtcctggccgggccagccagtagccgaagcgcttccagcatcctctgttcatccgggggaggccccaatggcatcttcgcttctcctaggaggtggctccagcagaggaagttccagtccccacccgacagtcgcgggcacccctacgtcgtgtggaaatccgagttggagttgtatgatcttcagatcttaggcacaaaaccaccgatgaattccgatacacatcgtaactttgaccccaccgcaacccttagaaatcagggtgatttcacctggaacagcatgtcaggccgcagtgtacggctgaggtcagtccccatccagagtctctcagagctggagagggcccggctgcaggaagtggctttttatcagttgcaacaggactgtgacctgagctgtcagatcaccattcccaaagatggacaaaagagaaagaaatctttaagaaagaaactggattcactaggaaaggagaaaaacaaagacaaagaattcatcccacaggcatttggaatgcccttatcccaagtcattgcgaatgacagggcctataaactcaagcaggacttgcagagggacgagcagaaagatgcatctgactttgtggcttccctcctcccatttggaaataaaagacaaaacaaagaactctcaagcagtaactcatctctcagctcaacctcagaaacaccgaatgagtcaacgtccccaaacaccccggaaccggctcctcgggctaggaggaggggtgccatgtcagtggattctatcaccgatcttgatgacaatcagtctcgactactagaagctttacaactttccttgcctgctgaggctcaaagtaaaaaggaaaaagccagagataagaaactcagtctgaatcctatttacagacaggtccctaggctggtggacagctgctgtcagcacctagaaaaacatggcctccagacagtggggatattccgagttggaagctcaaaaaagagagtgagacaattacgtgaggaatttgaccgtgggattgatgtctctctggaggaggagcacagtgttcatgatgtggcagccttgctgaaagagttcctgagggacatgccagacccccttctcaccagggagctgtacacagctttcatcaacactctcttgttggagccggaggaacagctgggcaccttgcagctcctcatataccttctacctccctgcaactgcgacaccctccaccgcctgctacagttcctctccatcgtggccaggcatgccgatgacaacatcagcaaagatgggcaagaggtcactgggaataaaatgacatctctaaacttagccaccatatttggacccaacctgctgcacaagcagaagtcatcagacaaagaattctcagttcagagttcagcccgggctgaggagagcacggccatcatcgctgttgtgcaaaagatgattgaaaattatgaagccctgttcatggttcccccagatctccagaacgaagtgctgatcagcctgttagagaccgatcctgatgtcgtggactatttactcagaagaaaggcttcccaatcatcaacaagttctgtgcttccggctgcagtgcaggcctgcccacagtaccctgccagcatgtttacgccctgacctggagggaccagctaaggaagccctgacatgctgcagtcggaagtttccttttccgtgggagggaggcattcatctacagactccaacaaggcctccagcggagacatctccccttatgacaacaactccccagtgctgtctgagcgctccctgctggctatgcaagaggacgcggccccggggggctcggagaagctttacagagtgccagggcagtttatgctggtgggccacttgtcgtcgtcaaagtcaagggaaagttctcctggaccaaggcttgggaaagatctgtcagaggagcctttcgatatctggggaacttggcattcaacattaaaaagcggatccaaagacccaggaatgacaggttcctctggagacatttttgaaagcagctccctaagagcggggccctgctccctttctcaagggaacctgtccccaaattggcctcggtggcaggggagccccgcagagctggacagcgacacgcagggggctcggaggactcaggccgcagcccccgcgacggagggcagggcccaccctgcggtgtcgcgcgcctgcagcacgccccacgtccaggtggcagggaaagccgagcggcccacggccaggtcggagcagtacttgaccctgagcggcgcccacgacctcagcgagagtgagctggatgtggccgggctgcagagccgggccacacctcagtgccaaagaccccatgggagtgggagggatgacaagcggcccccgcctccatacccgggcccagggaagcccgcggcagcggcagcctggatccaggggcccccggaaggcgtggagacacccacggaccagggaggccaagcagccgagcgagagcagcaggtcacgcagaaaaaactgagcagcgccaactccctgccagcgggcgagcaggacagtccgcgcctgggggacgctggctggctcgactggcagagagagcgctggcagatctgggagctcctgtcgaccgacaaccccgatgccctgcccgagacgctggtctgagcccgcacccagccgagccccccctgccccgagccccccgccctccagcccaggggggaccgtgggtggtggccactggcacacttagtgttcttctttcacacttctcaaaagtgacacaagagaaatccagttcacctacagaggtagagcactcacgcccccgccattgagaataaggttccattgcgtagccagccttaggaaaaacaaacagaacccaaaccagatggcaatgtccaatctaaaaacgtccctcttggctctataatataagatacaactcttgcttggtatagcctaaccgtatttatgtgtcttcggttttgactattgtgtattctgtaacagattatgtataatcatatatgatatattcacaaagagaaaacaaaaggaacttttaaaaaaaaaatcacttcacttatattaagcaatgagatatactaaacaatgagattctatagaatgttctagaatgtgcacaagcgggtttctgtgcttttgccatagctttataactggggataacccttccttcgataccaaacactaacaagaggaagcagaatatgagaagccatatttttacataggagtcagatacaaaaagaaaaatcactgaatgcttttagatattgaatacgttttcaggaaaatgctaaatctgatagattacgaaatatatttttagaacttgtttagaaaggattcagttaaccaaacaagaaaaaggcagtgcctcacaaagaaattaagaagttgtccgtcccacgttacatcaaattcagttttatataggccatatataatatatatttataatgtataatttttatgtatttttcaaaactacaaactggaatccaactataaagtgtttaagaatctacacagaatattcaaattatagaacatgttttttccctttgccccataatcagtatttgccaaattacatgcaattccttaaaaactaaatcacatttggtaaaaggcctacagctttgtacttacattgtgccaaaggctgaggaaatgttttctttcgtaattttatgtgtattgtaaaatgttctaccgtactttagtagtttgaagtttttcaagtgcataactatttttgaccagcagatggcgatacgcttcagtattttatgcaattttttttcacttctgaagggaaagtgtattataaaaaaagattttttttttttttataaaacatgctactcttaattttcatgttggtgatgaaattcccagtggtgtttcttaaggttctatcttgtgccatgatgaataaaaagttaagcaaa

SEQ ID NO: 175866 - DNA, 1487 bp, Homo sapiens
  Payload ID: 14531
  Gene Symbol: ARHGAP8
  Gene Name: Rho GTPase activating protein 8
  Uniprot ID: P85298
  ENST ID: ENST00000336963
  CDS Start-End: 97-1014
gggggccggcggggtccgtggccagagctgcagagagacaaggcggcggcggctgctgtgctgggtgcagtgaggaagaggccctcggtggtgcccatggctggccaggatcctgcgctgagcacgagtcacccgttctacgacgtggccagacatggcattctgcaggtggcaggggatgaccgctttggaagacgtgttgtcacgttcagctgctgccggatgccaccctcccacgagctggaccaccagcggctgctggagtatttgaagtacacactggaccaatacgttgagaacgattataccatcgtctatttccactacgggctgaacagccggaacaagccttccctgggctggctccagagcgcatacaaggagttcgataggaagtacaagaagaacttgaaggccctctacgtggtgcaccccaccagcttcatcaaggtcctgtggaacatcttgaagcccctcatcagtcacaagtttgggaagaaagtcatctatttcaactacctgagtgagctccacgaacaccttaaatacgaccagctggtcatccctcccgaagttttgcggtacgatgagaagctccagagcctgcacgagggccggacgccgcctcccaccaagacaccaccgccgcggcccccgctgcccacacagcagtttggcgtcagtctgcaatacctcaaagacaaaaatcaaggcgaactcatcccccctgtgctgaggttcacagtgacgtacctgagagagaaaggcctgcgcaccgagggcctgttccggagatccgccagcgtgcagaccgtccgcgagatccagaggctctacaaccaagggaagcccgtgaactttgacgactacggggacattcacatccctgccgtgatcctgaagaccttcctgcgagagctgccccagccgcttctgaccttccaggcctacgagcagattctcgggatcacctgtgtcccgggagagcatcttcaacaaaatgaacagctctaacctggcctgtgtcttcgggctgaatttgatctggccatcccagggggtctcctccctgagtgcccttgtgcccctgaacatgttcactgaactgctgatcgagtactatgaaaagatcttcagcaccccggaggcacctggggagcacggcctggcaccatgggaacaggggagcagggcagcccctttgcaggaggctgtgccacggacacaagccacgggcctcaccaagcctaccctacctccgagtcccctgatggcagccagaagacgtctctagtgttgcgaacactctgtatatttcgagctacctcccacacctgtctgtgcacttgtatgttttgtaaacttggcatctgtaaaaataaccagccattagatgaattcagaaccttctaatgaaaactccatgcctctggtccttggactcttgtccatggttcctgagctgtggaccgggatagaataatgca

SEQ ID NO: 175867 - DNA, 1584 bp, Homo sapiens
  Payload ID: 14531
  Gene Symbol: ARHGAP8
  Gene Name: Rho GTPase activating protein 8
  Uniprot ID: P85298
  ENST ID: ENST00000356099
  CDS Start-End: 94-1395
ggccggcggggtccgtggccagagctgcagagagacaaggcggcggcggctgctgtgctgggtgcagtgaggaagaggccctcggtggtgcccatggctggccaggatcctgcgctgagcacgagtcacccgttctacgacgtggccagacatggcattctgcaggtggcaggggatgaccgctttggaagacgtgttgtcacgttcagctgctgccggatgccaccctcccacgagctggaccaccagcggctgctggagtatttgaagtacacactggaccaatacgttgagaacgattataccatcgtctatttccactacgggctgaacagccggaacaagccttccctgggctggctccagagcgcatacaaggagttcgataggaagtacaagaagaacttgaaggccctctacgtggtgcaccccaccagcttcatcaaggtcctgtggaacatcttgaagcccctcatcagtcacaagtttgggaagaaagtcatctatttcaactacctgagtgagctccacgaacaccttaaatacgaccagctggtcatccctcccgaagttttgcggtacgatgagaagctccagagcctgcacgagggccggacgccgcctcccaccaagacaccaccgccgcggcccccgctgcccacacagcagtttggcgtcagtctgcaatacctcaaagacaaaaatcaaggcgaactcatcccccctgtgctgaggttcacagtgacgtacctgagagagaaaggcctgcgcaccgagggcctgttccggagatccgccagcgtgcagaccgtccgcgagatccagaggctctacaaccaagggaagcccgtgaactttgacgactacggggacattcacatccctgccgtgatcctgaagaccttcctgcgagagctgccccagccgcttctgaccttccaggcctacgagcagattctcgggatcacctgtgtggagagcagcctgcgtgtcactggctgccgccagatcttacggagcctcccagagcacaactacgtcgtcctccgctacctcatgggcttcctgcatgcggtgtcccgggagagcatcttcaacaaaatgaacagctctaacctggcctgtgtcttcgggctgaatttgatctggccatcccagggggtctcctccctgagtgcccttgtgcccctgaacatgttcactgaactgctgatcgagtactatgaaaagatcttcagcaccccggaggcacctggggagcacggcctggcaccatgggaacaggggagcagggcagcccctttgcaggaggctgtgccacggacacaagccacgggcctcaccaagcctaccctacctccgagtcccctgatggcagccagaagacgtctctagtgttgcgaacactctgtatatttcgagctacctcccacacctgtctgtgcacttgtatgttttgtaaacttggcatctgtaaaaataaccagccattagatgaattcagaaccttctaatgaaaactccatgcctctggtccttggactcttgtccatggttcctgagctgtggaccgggatagaataa

SEQ ID NO: 175868 - DNA, 1474 bp, Homo sapiens
  Payload ID: 14531
  Gene Symbol: ARHGAP8
  Gene Name: Rho GTPase activating protein 8
  ENST ID: ENST00000389772
  CDS Start-End: 72-158
agctgcagagagacaaggcggcggcggctgctgtgctgggtgcagtgaggaagaggccctcggtggtgcccatggctggccaggatcctgcgctgagcacgagtcacccgttctacgacgtggccagacatggcattctgcaggtggcaggtatttgaagtacacactggaccaatacgttgagaacgattataccatcgtctatttccactacgggctgaacagccggaacaagccttccctgggctggctccagagcgcatacaaggagttcgataggaagtacaagaagaacttgaaggccctctacgtggtgcaccccaccagcttcatcaaggtcctgtggaacatcttgaagcccctcatcagtcacaagtttgggaagaaagtcatctatttcaactacctgagtgagctccacgaacaccttaaatacgaccagctggtcatccctcccgaagttttgcggtacgatgagaagctccagagcctgcacgagggccggacgccgcctcccaccaagacaccaccgccgcggcccccgctgcccacacagcagtttggcgtcagtctgcaatacctcaaagacaaaaatcaaggcgaactcatcccccctgtgctgaggttcacagtgacgtacctgagagagaaaggcctgcgcaccgagggcctgttccggagatccgccagcgtgcagaccgtccgcgagatccagaggctctacaaccaagggaagcccgtgaactttgacgactacggggacattcacatccctgccgtgatcctgaagaccttcctgcgagagctgccccagccgcttctgaccttccaggcctacgagcagattctcgggatcacctgtgtggagagcagcctgcgtgtcactggctgccgccagatcttacggagcctcccagagcacaactacgtcgtcctccgctacctcatgggcttcctgcatgcggtgtcccgggagagcatcttcaacaaaatgaacagctctaacctggcctgtgtcttcgggctgaatttgatctggccatcccagggggtctcctccctgagtgcccttgtgcccctgaacatgttcactgaactgctgatcgagtactatgaaaagatcttcagcaccccggaggcacctggggagcacggcctggcaccatgggaacaggggagcagggcagcccctttgcaggaggctgtgccacggacacaagccacgggcctcaccaagcctaccctacctccgagtcccctgatggcagccagaagacgtctctagtgttgcgaacactctgtatatttcgagctacctcccacacctgtctgtgcacttgtatgttttgtaaacttggcatctgtaaaaataaccagccattagatgaattcagaaccttctaatgaaaactccatgcctctggtccttggactcttgtccatggttcctgagctgtggaccgggatagaataa

SEQ ID NO: 175869 - DNA, 1725 bp, Homo sapiens
  Payload ID: 14531
  Gene Symbol: ARHGAP8
  Gene Name: Rho GTPase activating protein 8
  Uniprot ID: P85298
  ENST ID: ENST00000389774
  CDS Start-End: 142-1536
acgtccggggaggggccaggtgagcggcagacccggcacgcaggtgggggccggcggggtccgtggccagagctgcagagagacaaggcggcggcggctgctgtgctgggtgcagtgaggaagaggccctcggtggtgcccatggctggccaggatcctgcgctgagcacgagtcacccgttctacgacgtggccagacatggcattctgcaggtggcaggggatgaccgctttggaagacgtgttgtcacgttcagctgctgccggatgccaccctcccacgagctggaccaccagcggctgctggagtatttgaagtacacactggaccaatacgttgagaacgattataccatcgtctatttccactacgggctgaacagccggaacaagccttccctgggctggctccagagcgcatacaaggagttcgataggaaagacggggatctcactatgtggcccaggctggtctcgaactccaagctcaagcgatcctcccacctcagcctcccaaagtactgggattacaggtacaagaagaacttgaaggccctctacgtggtgcaccccaccagcttcatcaaggtcctgtggaacatcttgaagcccctcatcagtcacaagtttgggaagaaagtcatctatttcaactacctgagtgagctccacgaacaccttaaatacgaccagctggtcatccctcccgaagttttgcggtacgatgagaagctccagagcctgcacgagggccggacgccgcctcccaccaagacaccaccgccgcggcccccgctgcccacacagcagtttggcgtcagtctgcaatacctcaaagacaaaaatcaaggcgaactcatcccccctgtgctgaggttcacagtgacgtacctgagagagaaaggcctgcgcaccgagggcctgttccggagatccgccagcgtgcagaccgtccgcgagatccagaggctctacaaccaagggaagcccgtgaactttgacgactacggggacattcacatccctgccgtgatcctgaagaccttcctgcgagagctgccccagccgcttctgaccttccaggcctacgagcagattctcgggatcacctgtgtggagagcagcctgcgtgtcactggctgccgccagatcttacggagcctcccagagcacaactacgtcgtcctccgctacctcatgggcttcctgcatgcggtgtcccgggagagcatcttcaacaaaatgaacagctctaacctggcctgtgtcttcgggctgaatttgatctggccatcccagggggtctcctccctgagtgcccttgtgcccctgaacatgttcactgaactgctgatcgagtactatgaaaagatcttcagcaccccggaggcacctggggagcacggcctggcaccatgggaacaggggagcagggcagcccctttgcaggaggctgtgccacggacacaagccacgggcctcaccaagcctaccctacctccgagtcccctgatggcagccagaagacgtctctagtgttgcgaacactctgtatatttcgagctacctcccacacctgtctgtgcacttgtatgttttgtaaacttggcatctgtaaaaataaccagccattagatgaattcagaaccttctaatgaaaactccatgcctctggtccttggactcttgtccatggttcctgagctgtggaccgggatagaataa

SEQ ID NO: 175870 - DNA, 573 bp, Homo sapiens
  Payload ID: 14531
  Gene Symbol: ARHGAP8
  Gene Name: Rho GTPase activating protein 8
  ENST ID: ENST00000396119
  CDS Start-End: 182-573
agacccggcacgcaggtgggggccggcggggtccgtggccaggcatactctaccacctcccgctgggcccaggccttccccttggcacagttggagcagcctctgttatgagctgcagagagacaaggcggcggcggctgctgtgctgggtgcagtgaggaagaggccctcggtggtgcccatggctggccaggatcctgcgctgagcacgagtcacccgttctacgacgtggccagacatggcattctgcaggtggcaggggatgaccgctttggaagacgtgttgtcacgttcagctgctgccggatgccaccctcccacgagctggaccaccagcggctgctggagtatttgaagtacacactggaccaatacgttgagaacgattataccatcgtctatttccactacgggctgaacagccggaacaagccttccctgggctggctccagagcgcatacaaggagttcgataggaaagacggggatctcactatgtggcccaggctggtctcgaactccaagctcaagcgatcctcccacctcagcctcccaaagtactgggattacag

SEQ ID NO: 175871 - DNA, 581 bp, Homo sapiens
  Payload ID: 14531
  Gene Symbol: ARHGAP8
  Gene Name: Rho GTPase activating protein 8
  ENST ID: ENST00000412433
  CDS Start-End: 236-581
ccagggcgtgtacggggacaaggggccgctggccgggcatactctaccacctcccgctgggcccaggccttccccttggcacagttggagcagcctctgttatggtcttatttttctccctccatggtgctggacactggatgggcacttggtgtacaaccgagagctgcagagagacaaggcggcggcggctgctgtgctgggtgcagtgaggaagaggccctcggtggtgcccatggctggccaggatcctgcgctgagcacgagtcacccgttctacgacgtggccagacatggcattctgcaggtggcaggggatgaccgctttggaagacgtgttgtcacgttcagctgctgccggatgccaccctcccacgagctggaccaccagcggctgctggagtatttgaagtacacactggaccaatacgttgagaacgattataccatcgtctatttccactacgggctgaacagccggaacaagccttccctgggctggctccagagcgcatacaaggagttcgataggaagtacaagaagaacttgaaggccctctacgtggtgcaccccaccagct

SEQ ID NO: 175872 - DNA, 768 bp, Homo sapiens
  Payload ID: 14531
  Gene Symbol: ARHGAP8
  Gene Name: Rho GTPase activating protein 8
  ENST ID: ENST00000447333
  CDS Start-End: 114-605
agacccggcacgcaggtgggggccggcggggtccgtggccagagctgcagagagacaaggcggcggcggctgctgtgctgggtgcagtgaggaagaggccctcggtggtgcccatggctggccaggatcctgcgctgagcacgagtcacccgttctacgacgtggccagacatggcattctgcaggtggcaggggatgaccgctttggaagacgtgttgtcacgttcagctgctgccggatgccaccctcccacgagctggaccaccagcggctgctggagtatttgaagtacacactggaccaatacgttgagaacgattataccatcgtctatttccactacgggctgaacagccggaacaagccttccctgggctggctccagagcgcatacaaggagttcgataggaaagacggtctcacccagccaccatggctcacacctgtaatcccagtactttgggaggccaaggtacaagaagaacttgaaggccctctacgtggtgcaccccaccagcttcatcaaggtcctgtggaacatcttgaagcccctcatcagtcacaagtttgggaagaaagtcatctatttcaactacctgagtgagctccacgaacaccttaaatacgaccagctggtcatccctcccgaagttttgcggtacgatgagaagctccagagcctgcacgagggccggacgccgcctcccaccaagacaccaccgccgcggcccccgctgcccacacagcagtttggcgtcagtctgcaa

SEQ ID NO: 175873 - DNA, 2597 bp, Homo sapiens
  Payload ID: 14532
  Gene Symbol: ARHGAP9
  Gene Name: Rho GTPase activating protein 9
  Uniprot ID: Q9BRR9
  ENST ID: ENST00000393791
  CDS Start-End: 140-2335
ctccctgtttctgtcttgaacctgattctttcttcttatctccttcctgtgtccacctcaagactcccaccactacccaggaccaactcctgctcctgaatcttctgatgggccccacaaggtgacagtgctggctacaatgctatccagccggtggtggccaagttcctgggggatcctagggctgggcccccgaagccctcctcggggatcccagctctgtgccctctatgcctttacttatactggggcagatggccagcaggtgtctctggctgaaggggataggttcctactgcttcgaaagaccaactccgactggtggttggcaagacgcctagaagctccctccacctctcgacccatcttcgtcccagcagcctatatgatagaggaatccatcccttcccagagtccaactaccgtcatccccggccaattgctctggactcctgggccgaagttgtttcatggttccctggaggagttgtctcaggccctcccaagcagggctcaggctagctcggagcagcctcctccacttccccgcaaaatgtgtaggagcgtcagcactgacaatctgagccccagccttctgaagcctttccaggaaggaccaagcggaagatccctctcccaggaagacttgccgtcagaagccagtgccagcacagcaggcccccagcccctcatgtcagagccccctgtgtactgtaacctggtggaccttcgccgctgtcctcggtccccacccccaggccctgcatgccccctgctgcagaggctggatgcctgggagcagcacctggaccccaactctggacgctgcttctacataaattcactgactggctgcaagtcctggaagcccccgcgccgcagtcgcagcgagacgaaccctggctccatggaggggacacagaccctgaagaggaacaatgatgtcctgcaacctcaggcaaagggcttcagatctgacacagggaccccagaaccgcttgacccacagggttcactcagcctcagccaacgcacctcgcagcttgaccctccagccttgcaggcccctcgacctctgccgcagctcctggacgacccccatgaggtggaaaagtcgggtctgctcaacatgaccaagattgcccaaggggggcgcaagctcaggaagaactggggcccgtcttgggtggtgttaacgggtaacagcctggtgttctaccgagagccaccgccgacagcgccctcctcaggctggggaccagcgggtagccggcccgaaagtagcgtggacctgcgcggggcggccctggcgcacggccgccacctgtccagccgccgcaacgtcctgcacatccgcacgatccctggccacgagttcctgctgcagtcggaccacgagacagagctgcgagcctggcaccgcgcgctgcggactgtcatcgagcggctggatcgggagaaccccctggagctgcgtctgtcgggctctggacccgcggagctgagcgccggggaggacgaagaagaggagtcggagctggtgtccaagccgctgctgcgcctcagcagccgccggagctccattcgggggcccgaaggcaccgagcagaaccgcgtgcgcaacaaactaaagcggctcatcgcgaagagaccgcccttacaaagcctgcaggagcggggtctgctccgagaccaggtgttcggctgccagttggaatcactctgccagcgggaaggagacacggtgcccagctttttgcggctctgcattgctgctgtggataaaagaggtctagatgtggatggcatttatcgggtgagcgggaacttggcagtggtccagaagcttcgctttctggtggacagagagcgtgcggtcacctccgatgggaggtatgtgttcccagaacagccaggacaagaaggtcggttagatttggacagtactgagtgggatgacattcatgtggtcaccggagccctgaagctttttctccgggagctgccccagcctctggtgccaccactgctgctgccccatttccgtgctgcccttgcactctccgaatcagagcagtgcctctctcagatacaagaattaataggctcaatgccaaagcccaaccatgacactctacggtacctcctggagcatttatgcagggtgatagcacactcagataagaatcgcatgacaccccacaacctgggaattgtgtttggaccaaccctgtttcggccagagcaggagacatctgacccagcagcccatgctctctacccagggcagctggtccagctgatgctcaccaacttcaccagcctcttcccctgatgcagggaaggaagaagagaaaacatatttccggtcatctctggtggtgagaggctggtgttctgttttgaggatatccctttaaatctcccaaatgactgtctctatcttcatgagtgtgacttgaggtgttgggatgggtgagggagcttctctaaagaggaaagtgagtggattaacccctgcttctcttcttgttccctgttatcattcctccccaacataataatacataaagtggcatggtattttttctgatgca

SEQ ID NO: 175874 - DNA, 2912 bp, Homo sapiens
  Payload ID: 14532
  Gene Symbol: ARHGAP9
  Gene Name: Rho GTPase activating protein 9
  ENST ID: ENST00000393797
  CDS Start-End: 194-2659
gctggaagcaacagatggggactgcagaggaggtggtggtattgggatagtgctgcagccaagaacttaacgactgaaagtaactgggatatcttcataattatctgaaggtcacagtgggagaacaaaattaaaagaactgagaagacttacaagagaacctcctaagagtcacccaaacaatcggctgagaatgagaagaggttcaagtgattcttgtgcctcaggctcccaagtagctgggactacagtagctgggccagcacacccagaaagcctcacattgtgcagtggagaagctgagagaagaggaaaagaggagtggccagactcccaccactacccaggaccaactcctgctcctgaatcttctgatgggccccacaaggtgacagtgctggctacaatgctatccagccggtggtggccaagttcctgggggatcctagggctgggcccccgaagccctcctcggggatcccagctctgtgccctctatgcctttacttatactggggcagatggccagcaggtgtctctggctgaaggggataggttcctactgcttcgaaagaccaactccgactggtggttggcaagacgcctagaagctccctccacctctcgacccatcttcgtcccagcagcctatatgatagaggaatccatcccttcccagagtccaactaccgtcatccccggccaattgctctggactcctgggccgaagttgtttcatggttccctggaggagttgtctcaggccctcccaagcagggctcaggctagctcggagcagcctcctccacttccccgcaaaatgtgtaggagcgtcagcactgacaatctgagccccagccttctgaagcctttccaggaaggaccaagcggaagatccctctcccaggaagacttgccgtcagaagccagtgccagcacagcaggcccccagcccctcatgtcagagccccctgtgtactgtaacctggtggaccttcgccgctgtcctcggtccccacccccaggccctgcatgccccctgctgcagaggctggatgcctgggagcagcacctggaccccaactctggacgctgcttctacataaattcactgactggctgcaagtcctggaagcccccgcgccgcagtcgcagcgagacgaaccctggctccatggaggggacacagaccctgaagaggaacaatgatgtcctgcaacctcaggcaaagggcttcagatctgacacagggaccccagaaccgcttgacccacagggttcactcagcctcagccaacgcacctcgcagcttgaccctccagccttgcaggcccctcgacctctgccgcagctcctggacgacccccatgaggtggaaaagtcgggtctgctcaacatgaccaagattgcccaaggggggcgcaagctcaggaagaactggggcccgtcttgggtggtgttaacgggtaacagcctggtgttctaccgagagccaccgccgacagcgccctcctcaggctggggaccagcgggtagccggcccgaaagtagcgtggacctgcgcggggcggccctggcgcacggccgccacctgtccagccgccgcaacgtcctgcacatccgcacgatccctggccacgagttcctgctgcagtcggaccacgagacagagctgcgagcctggcaccgcgcgctgcggactgtcatcgagcggctggttagatgggtggaggcccggagggaggctccgaccggccgggaccaagggagtggggatcgggagaaccccctggagctgcgtctgtcgggctctggacccgcggagctgagcgccggggaggacgaagaagaggagtcggagctggtgtccaagccgctgctgcgcctcagcagccgccggagctccattcgggggcccgaaggcaccgagcagaaccgcgtgcgcaacaaactaaagcggctcatcgcgaagagaccgcccttacaaagcctgcaggagcggggtctgctccgagaccaggtgttcggctgccagttggaatcactctgccagcgggaaggagacacggtgcccagctttttgcggctctgcattgctgctgtggataaaagaggtctagatgtggatggcatttatcgggtgagcgggaacttggcagtggtccagaagcttcgctttctggtggacagagagcgtgcggtcacctccgatgggaggtatgtgttcccagaacagccaggacaagaaggtcggttagatttggacagtactgagtgggatgacattcatgtggtcaccggagccctgaagctttttctccgggagctgccccagcctctggtgccaccactgctgctgccccatttccgtgctgcccttgcactctccgaatcagagcagtgcctctctcagatacaagaattaataggctcaatgccaaagcccaaccatgacactctacggtacctcctggagcatttatgcagggtgatagcacactcagataagaatcgcatgacaccccacaacctgggaattgtgtttggaccaaccctgtttcggccagagcaggagacatctgacccagcagcccatgctctctacccagggcagctggtccagctgatgctcaccaacttcaccagcctcttcccctgatgcagggaaggaagaagagaaaacatatttccggtcatctctggtggtgagaggctggtgttctgttttgaggatatccctttaaatctcccaaatgactgtctctatcttcatgagtgtgacttgaggtgttgggatgggtgagggagcttctctaaagaggaaagtgagtggattaacccctgcttctcttcttgttccctgttatcattcctccccaacataataatacataaagtggcatggtattttt

SEQ ID NO: 175875 - DNA, 2569 bp, Homo sapiens
  Payload ID: 14532
  Gene Symbol: ARHGAP9
  Gene Name: Rho GTPase activating protein 9
  Uniprot ID: Q9BRR9
  ENST ID: ENST00000424809
  CDS Start-End: 227-2149
acatacttcctcaccagacaccaccaggagttctcagcccccaaaacctgtcaccgatcctcaccaggctgtttgctctaccctctcccccaactcaagggctcccgtcctcacctccctgcaacactgctcctagaaccatgtctgtctacctggagacagccaggcctattcccttctgggtctccagtgtccctttttctcacaggtgacagtgctggctacaatgctatccagccggtggtggccaagttcctgggggatcctagggctgggcccccgaagccctcctcggggatcccagctctgtgccctctatgcctttacttatactggggcagatggccagcaggtgtctctggctgaaggggataggttcctactgcttcgaaagaccaactccgactggtggttggcaagacgcctagaagctccctccacctctcgacccatcttcgtcccagcagcctatatgatagaggaatccatcccttcccagagtccaactaccgtcatccccggccaattgctctggactcctgggccgaagttgtttcatggttccctggaggagttgtctcaggccctcccaagcagggctcaggctagctcggagcagcctcctccacttccccgcaaaatgtgtaggagcgtcagcactgacaatctgagccccagccttctgaagcctttccaggaaggaccaagcggaagatccctctcccaggaagacttgccgtcagaagccagtgccagcacagcaggcccccagcccctcatgtcagagccccctgtgtactgtaacctggtggaccttcgccgctgtcctcggtccccacccccaggccctgcatgccccctgctgcagaggctggatgcctgggagcagcacctggaccccaactctggacgctgcttctacataaattcactgactggctgcaagtcctggaagcccccgcgccgcagtcgcagcgagacgaaccctggctccatggaggggacacagaccctgaagaggaacaatgatgtcctgcaacctcaggcaaagggcttcagatctgacacagggaccccagaaccgcttgacccacagggttcactcagcctcagccaacgcacctcgcagcttgaccctccagccttgcaggcccctcgacctctgccgcagctcctggacgacccccatgaggtggaaaagtcgggtctgctcaacatgaccaagattgcccaaggggggcgcaagctcaggaagaactggggcccgtcttgggtggtgttaacgggtaacagcctggtgttctaccgagagccaccgccgacagcgccctcctcaggctggggaccagcgggtagccggcccgaaagtagcgtggacctgcgcggggcggccctggcgcacggccgccacctgtccagccgccgcaacgtcctgcacatccgcacgatccctggccacgagttcctgctgcagtcggaccacgagacagagctgcgagcctggcaccgcgcgctgcggactgtcatcgagcggctggatcgggagaaccccctggagctgcgtctgtcgggctctggacccgcggagctgagcgccggggaggacgaagaagaggagtcggagctggtgtccaagccgctgctgcgcctcagcagccgccggagctccattcgggggcccgaaggcaccgagcagaaccgcgtgcgcaacaaactaaagcggctcatcgcgaagagaccgcccttacaaagcctgcaggagcggggtctgctccgagaccaggtgttcggctgccagttggaatcactctgccagcgggaaggagacacggtgcccagctttttgcggctctgcattgctgctgtggataaaagaggtctagatgtggatggcatttatcgggtgagcgggaacttggcagtggtccagaagcttcgctttctggtggacagagagcgtgcggtcacctccgatgggaggtatgtgttcccagaacagccaggacaagaaggtcggttagatttggacagtactgagtgggatgacattcatgtggtcaccggagccctgaagctttttctccgggagctgccccagcctctggtgccaccactgctgctgccccatttccgtgctgcccttgggtgatagcacactcagataagaatcgcatgacaccccacaacctgggaattgtgtttggaccaaccctgtttcggccagagcaggagacatctgacccagcagcccatgctctctacccagggcagctggtccagctgatgctcaccaacttcaccagcctcttcccctgatgcagggaaggaagaagagaaaacatatttccggtcatctctggtggtgagaggctggtgttctgttttgaggatatccctttaaatctcccaaatgactgtctctatcttcatgagtgtgacttgaggtgttgggatgggtgagggagcttctctaaagaggaaagtgagtggattaacccctgcttctcttcttgttccctgttatcattcctccccaacataataatacataaagtggcatggtattttt

SEQ ID NO: 175876 - DNA, 2323 bp, Homo sapiens
  Payload ID: 14532
  Gene Symbol: ARHGAP9
  Gene Name: Rho GTPase activating protein 9
  Uniprot ID: Q9BRR9
  ENST ID: ENST00000430041
  CDS Start-End: 433-2076
gtgctcttccttcctccagactcctagcccagggcagggtttttctgtgttctgcttgcctgataggctacagcaggtctcctctagagatgtgacttgcccagcccttccctctctttcttaaccgtgggtggaaaggggctcctcttcccttctgtagacccttctctgtcttcttttaccttgcaggatgtgagggtggggcacccccttcaacattccccccaccccacaaaaagcctgttcccctttcctgtggccctgaggtgggggtggggtgggggaggcgggaagttggcaacaggaagtgaggagaagagcaaagaaaactgtgagagagagaatttttaaaaagcagctggggcctgaggtttctcccccagtaccctgggtcacctcagcccagagctggcggcaggcccccagcccctcatgtcagagccccctgtgtactgtaacctggtggaccttcgccgctgtcctcggtccccacccccaggccctgcatgccccctgctgcagaggctggatgcctgggagcagcacctggaccccaactctggacgctgcttctacataaattcactgactggctgcaagtcctggaagcccccgcgccgcagtcgcagcgagacgaaccctggctccatggaggggacacagaccctgaagaggaacaatgatgtcctgcaacctcaggcaaagggcttcagatctgacacagggaccccagaaccgcttgacccacagggttcactcagcctcagccaacgcacctcgcagcttgaccctccagccttgcaggcccctcgacctctgccgcagctcctggacgacccccatgaggtggaaaagtcgggtctgctcaacatgaccaagattgcccaaggggggcgcaagctcaggaagaactggggcccgtcttgggtggtgttaacgggtaacagcctggtgttctaccgagagccaccgccgacagcgccctcctcaggctggggaccagcgggtagccggcccgaaagtagcgtggacctgcgcggggcggccctggcgcacggccgccacctgtccagccgccgcaacgtcctgcacatccgcacgatccctggccacgagttcctgctgcagtcggaccacgagacagagctgcgagcctggcaccgcgcgctgcggactgtcatcgagcggctggatcgggagaaccccctggagctgcgtctgtcgggctctggacccgcggagctgagcgccggggaggacgaagaagaggagtcggagctggtgtccaagccgctgctgcgcctcagcagccgccggagctccattcgggggcccgaaggcaccgagcagaaccgcgtgcgcaacaaactaaagcggctcatcgcgaagagaccgcccttacaaagcctgcaggagcggggtctgctccgagaccaggtgttcggctgccagttggaatcactctgccagcgggaaggagacacggtgcccagctttttgcggctctgcattgctgctgtggataaaagaggtctagatgtggatggcatttatcgggtgagcgggaacttggcagtggtccagaagcttcgctttctggtggacagagagcgtgcggtcacctccgatgggaggtatgtgttcccagaacagccaggacaagaaggtcggttagatttggacagtactgagtgggatgacattcatgtggtcaccggagccctgaagctttttctccgggagctgccccagcctctggtgccaccactgctgctgccccatttccgtgctgcccttgcactctccgaatcagagcagtgcctctctcagatacaagaattaataggctcaatgccaaagcccaaccatgacactctacggtacctcctggagcatttatgcagggtgatagcacactcagataagaatcgcatgacaccccacaacctgggaattgtgtttggaccaaccctgtttcggccagagcaggagacatctgacccagcagcccatgctctctacccagggcagctggtccagctgatgctcaccaacttcaccagcctcttcccctgatgcagggaaggaagaagagaaaacatatttccggtcatctctggtggtgagaggctggtgttctgttttgaggatatccctttaaatctcccaaatgactgtctctatcttcatgagtgtgacttgaggtgttgggatgggtgagggagcttctctaaagaggaaagtgagtggattaacccctgcttctcttcttgttccctgttatcattcctccccaacataataatacataaagtggcatggt

SEQ ID NO: 175877 - DNA, 533 bp, Homo sapiens
  Payload ID: 14532
  Gene Symbol: ARHGAP9
  Gene Name: Rho GTPase activating protein 9
  ENST ID: ENST00000551452
  CDS Start-End: 12-533
gtgagaagacaatgggggagggagcaggaggtgggaaggccaagagaagcatgggaagggcaacaggcagaatgaccacctccttcttcccccttttctggcaggcaggcccccagcccctcatgtcagagccccctgtgtactgtaacctggtggaccttcgccgctgtcctcggtccccacccccaggccctgcatgccccctgctgcagaggctggatgcctgggagcagcacctggaccccaactctggacgctgcttctacataaattcactgactggctgcaagtcctggaagcccccgcgccgcagtcgcagcgagacgaaccctggctccatggaggggacacagaccctgaagaggaacaatgatgtcctgcaacctcaggcaaagggcttcagatctgacacagggaccccagaaccgcttgacccacagggttcactcagcctcagccaacgcacctcgcagcttgaccctccagccttgcaggcccctcgacctctgccgcagctcctggacgacccccat

SEQ ID NO: 175878 - DNA, 568 bp, Homo sapiens
  Payload ID: 14532
  Gene Symbol: ARHGAP9
  Gene Name: Rho GTPase activating protein 9
  ENST ID: ENST00000552249
  CDS Start-End: 143-568
gtcattaaccttgtgtctccctgtttctgtcttgaacctgattctttcttcttatctccttcctgtgtccacctcaagactcccaccactacccaggaccaactcctgctcctgaatcttctgatgggccccacaagcctatatgatagaggaatccatcccttcccagagtccaactaccgtcatccccggccaattgctctggactcctgggccgaagttgtttcatggttccctggaggagttgtctcaggccctcccaagcagggctcaggctagctcggagcagcctcctccacttccccgcaaaatgtgtaggagcgtcagcactgacaatctgagccccagccttctgaagcctttccaggaaggaccaagcggaagatccctctcccaggaagacttgccgtcagaagccagtgccagcacagcaggcccccagcccctcatgtcagagccccctgtgtactgtaacctggtggaccttcgccgctgtcctcggtccccacccccaggccctgcatgccccctgctgcagaggctggatgcctgggagcagcacctggac

SEQ ID NO: 175879 - DNA, 722 bp, Homo sapiens
  Payload ID: 14532
  Gene Symbol: ARHGAP9
  Gene Name: Rho GTPase activating protein 9
  ENST ID: ENST00000550399
  CDS Start-End: 1-470
gggaaggagacacggtgcccagctttttgcggctctgcattgctgctgtggataaaagaggtctagatgtggatggcatttatcgggtgagcgggaacttggcagtggtccagaagcttcgctttctggtggacagagagcgtgcggtcacctccgatgggaggtatgtgttcccagaacagccaggacaagcactctccgaatcagagcagtgcctctctcagatacaagaattaataggctcaatgccaaagcccaaccatgacactctacggtacctcctggagcatttatgcagggtgatagcacactcagataagaatcgcatgacaccccacaacctgggaattgtgtttggaccaaccctgtttcggccagagcaggagacatctgacccagcagcccatgctctctacccagggcagctggtccagctgatgctcaccaacttcaccagcctcttcccctgatgcagggaaggaagaagagaaaacatatttccggtcatctctggtggtgagaggctggtgttctgttttgaggatatccctttaaatctcccaaatgactgtctctatcttcatgagtgtgacttgaggtgttgggatgggtgagggagcttctctaaagaggaaagtgagtggattaacccctgcttctcttcttgttccctgttatcattcctccccaacataataatacataaagtggcatggtatttt

SEQ ID NO: 175880 - DNA, 504 bp, Homo sapiens
  Payload ID: 14532
  Gene Symbol: ARHGAP9
  Gene Name: Rho GTPase activating protein 9
  ENST ID: ENST00000550130
  CDS Start-End: 1-504
cgcaacaaactaaagcggctcatcgcgaagagaccgcccttacaaagcctgcaggagcggggtctgctccgagaccaggtgttcggctgccagttggaatcactctgccagcgggaaggagacacggtgcccagctttttgcggctctgcattgctgctgtggataaaagaggtctagatgtggatggcatttatcgggtgagcgggaacttggcagtggtccagaagcttcgctttctggtggacagagaaggtcggttagatttggacagtactgagtgggatgacattcatgtggtcaccggagccctgaagctttttctccgggagctgccccagcctctggtgccaccactgctgctgccccatttccgtgctgcccttgcactctccgaatcagagcagtgcctctctcagatacaagaattaataggctcaatgccaaagcccaaccatgacactctacggtacctcctggagcatttatgcagggtgatagcacac

SEQ ID NO: 175881 - DNA, 624 bp, Homo sapiens
  Payload ID: 14532
  Gene Symbol: ARHGAP9
  Gene Name: Rho GTPase activating protein 9
  ENST ID: ENST00000552066
  CDS Start-End: 231-624
ctttccaggaaggaccaagcggaagatccctctcccaggaagacttgccgtcagaagccagtgccagcacagtgagtcacagctcttctgagctgggccctgttctaggcacaggacagacagcacctctgtcttcaggggactcccctggggatgacaaacacaaaaacaaataaataagataacgcttggtactactgataagtctaaaggcaggcccccagcccctcatgtcagagccccctgtgtactgtaacctggtggaccttcgccgctgtcctcggtccccacccccaggccctgcatgccccctgctgcagaggctggatgcctgggagcagcacctggaccccaactctggacgctgcttctacataaattcactgactggctgcaagtcctggaagcccccgcgccgcagtcgcagcgagacgaaccctggctccatggaggggacacagaccctgaagaggaacaatgatgtcctgcaacctcaggcaaagggcttcagatctgacacagggaccccagaaccgcttgacccacagggttcactcagcctcagccaacgcacctcgcagcttgaccctccagccttgcaggcccctcgacctctgccgcagc

SEQ ID NO: 175882 - DNA, 967 bp, Homo sapiens
  Payload ID: 14532
  Gene Symbol: ARHGAP9
  Gene Name: Rho GTPase activating protein 9
  ENST ID: ENST00000548139
  CDS Start-End: 78-967
ggctcctcttcccttctgtagacccttctctgtcttcttttaccttgcaggatgtgagggcaggcccccagcccctcatgtcagagccccctgtgtactgtaacctggtggaccttcgccgctgtcctcggtccccacccccaggccctgcatgccccctgctgcagaggctggatgcctgggagcagcacctggaccccaactctggacgctgcttctacataaattcactgactggctgcaagtcctggaagcccccgcgccgcagtcgcagcgagacgaaccctggctccatggaggggacacagaccctgaagaggaacaatgatgtcctgcaacctcaggcaaagggcttcagatctgacacagggaccccagaaccgcttgacccacagggttcactcagcctcagccaacgcacctcgcagcttgaccctccagccttgcaggcccctcgacctctgccgcagctcctggacgacccccatgaggtggaaaagtcgggtctgctcaacatgaccaagattgcccaaggggggcgcaagctcaggaagaactggggcccgtcttgggtggtgttaacgggtaacagcctggtgttctaccgagagccaccgccgacagcgccctcctcaggctggggaccagcgggtagccggcccgaaagtagcgtggacctgcgcggggcggccctggcgcacggccgccacctgtccagccgccgcaacgtcctgcacatccgcacgatccctggccacgagttcctgctgcagtcggaccacgagacagagctgcgagcctggcaccgcgcgctgcggactgtcatcgagcggctggatcgggagaaccccctggagctgcgtctgtcgggctctggacccgcggagctgagcgccggggaggacgaagaagaggagtcggagctggtgtccaagccgctgctgcgcctcagcagccgccggagctc

SEQ ID NO: 175883 - DNA, 563 bp, Homo sapiens
  Payload ID: 14532
  Gene Symbol: ARHGAP9
  Gene Name: Rho GTPase activating protein 9
  ENST ID: ENST00000549602
  CDS Start-End: 381-563
gttctgcttgcctgataggctacagcaggtctcctctagagatgtgacttgcccagcccttccctctctttcttaaccgtgggtggaaaggggctcctcttcccttctgtagacccttctctgtcttcttttaccttgcaggatgtgagggtggggcacccccttcaacattccccccaccccacaaaaagcctgttcccctttcctgtggccctgaggtgggggtggggtgggggaggcgggaagttggcaacaggaagtgaggagaagagcaaagaaaactgtgagagagagaatttttaaaaagcagctggggcctgaggtttctcccccagtaccctgggtcacctcagcccagagctggcggcccccagcccctcatgtcagagccccctgtgtactgtaacctggtggaccttcgccgctgtcctcggtccccacccccaggccctgcatgccccctgctgcagaggctggatgcctgggagcagcacctggaccccaactctggacgctgcttctacataaattcactgactggctgcaagtcctggaagcccccg

SEQ ID NO: 175884 - DNA, 565 bp, Homo sapiens
  Payload ID: 14532
  Gene Symbol: ARHGAP9
  Gene Name: Rho GTPase activating protein 9
  ENST ID: ENST00000552604
  CDS Start-End: 108-565
aaaactgtgagagagagaatttttaaaaagcagctggggcctgaggtttctcccccagtaccctgggtcacctcagcccagagctggcggcaggcccccagcccctcatgtcagagccccctgtgtactgtaacctggtggaccttcgccgctgtcctcggtccccacccccaggccctgcatgccccctgctgcagaggctggatgcctgggagcagcacctggaccccaactctggacgctgcttctacataaattcactgactggctgcaagtcctggaagcccccgcgccgcagtcgcagcgagacgaaccctggctccatggaggggacacagaccctgaagaggaacaatgatgtcctgcaacctcaggcaaagggcttcagatctgacacagggaccccagaaccgcttgacccacaggaggtggaaaagtcgggtctgctcaacatgaccaagattgcccaaggggggcgcaagctcaggaagaactggggcccgtcttgggtggtgttaacgggtaacagcctggtgttctaccgagagccaccgccgacagcgcc

SEQ ID NO: 175885 - DNA, 2818 bp, Homo sapiens
  Payload ID: 14532
  Gene Symbol: ARHGAP9
  Gene Name: Rho GTPase activating protein 9
  ENST ID: ENST00000550288
  CDS Start-End: 152-2362
atatcttcataattatctgaaggtcacagtgggagaacaaaattaaaagaactgagaagacttacaagagaacctcctaagagtcacccaaacaatcggctgagaatgagaagagggtcttgctctgtcacctaggctggagtgcagtggcatgatctcagctcagtgcaatctctgcctcccaggttcaagtgattcttgtgcctcaggctcccaagtagctgggactacagtagctgggccagcacacccagaaagcctcacattgtgcagtggagaagctgagagaagaggaaaagaggagtggccagactcccaccactacccaggaccaactcctgctcctgaatcttctgatgggccccacaaggtgacagtgctggctacaatgctatccagccggtggtggccaagttcctgggggatcctagggctgggcccccgaagccctcctcggggatcccagctctgtgccctctatgcctttacttatactggggcagatggccagcaggtgtctctggctgaaggggataggttcctactgcttcgaaagaccaactccgactggtggttggcaagacgcctagaagctccctccacctctcgacccatcttcgtcccagcagcctatatgatagaggaatccatcccttcccagagtccaactaccgtcatccccggccaattgctctggactcctgggccgaagttgtttcatggttccctggaggagttgtctcaggccctcccaagcagggctcaggctagctcggagcagcctcctccacttccccgcaaaatgtgtaggagcgtcagcactgacaatctgagccccagccttctgaagcctttccaggaaggaccaagcggaagatccctctcccaggaagacttgccgtcagaagccagtgccagcacagcaggcccccagcccctcatgtcagagccccctgtgtactgtaacctggtggaccttcgccgctgtcctcggtccccacccccaggccctgcatgccccctgctgcagaggctggatgcctgggagcagcacctggaccccaactctggacgctgcttctacataaattcactgactggctgcaagtcctggaagcccccgcgccgcagtcgcagcgagacgaaccctggctccatggaggggacacagaccctgaagaggaacaatgatgtcctgcaacctcaggcaaagggcttcagatctgacacagggaccccagaaccgcttgacccacagggttcactcagcctcagccaacgcacctcgcagcttgaccctccagccttgcaggcccctcgacctctgccgcagctcctggacgacccccatgaggtggaaaagtcgggtctgctcaacatgaccaagattgcccaaggggggcgcaagctcaggaagaactggggcccgtcttgggtggtgttaacgggtaacagcctggtgttctaccgagagccaccgccgacagcgccctcctcaggctggggaccagcgggtagccggcccgaaagtagcgtggacctgcgcggggcggccctggcgcacggccgccacctgtccagccgccgcaacgtcctgcacatccgcacgatccctggccacgagttcctgctgcagtcggaccacgagacagagctgcgagcctggcaccgcgcgctgcggactgtcatcgagcggctggatcgggagaaccccctggagctgcgtctgtcgggctctggacccgcggagctgagcgccggggaggacgaagaagaggagtcggagctggtgtccaagccgctgctgcgcctcagcagccgccggagctccattcgggggcccgaaggcaccgagcagaaccgcgtgcgcaacaaactaaagcggctcatcgcgaagagaccgcccttacaaagcctgcaggagcggggtctgctccgagaccaggtgttcggctgccagttggaatcactctgccagcgggaaggagacacggtgcccagctttttgcggctctgcattgctgctgtggataaaagaggtctagatgtggatggcatttatcgggtgagcgggaacttggcagtggtccagaagcttcgctttctggtggacagagagcgtgcggtcacctccgatgggaggtatgtgttcccagaacagccaggacaagaaggtcggttagatttggacagtactgagtgggatgacattcatgtggtcaccggagccctgaagctttttctccgggagctgccccagcctctggtgccaccactgctgctgccccatttccgtgctgcccttgcagtgcctctctcagatacaagaattaataggctcaatgccaaagcccaaccatgacactctacggtacctcctggagcatttatgcagggtgatagcacactcagataagaatcgcatgacaccccacaacctgggaattgtgtttggaccaaccctgtttcggccagagcaggagacatctgacccagcagcccatgctctctacccagggcagctggtccagctgatgctcaccaacttcaccagcctcttcccctgatgcagggaaggaagaagagaaaacatatttccggtcatctctggtggtgagaggctggtgttctgttttgaggatatccctttaaatctcccaaatgactgtctctatcttcatgagtgtgacttgaggtgttgggatgggtgagggagcttctctaaagaggaaagtgagtggattaacccctgcttctcttcttgttccctgttatcattcctccccaacataataatacataaagtggcatggtattt

SEQ ID NO: 175886 - DNA, 3171 bp, Homo sapiens
  Payload ID: 14533
  Gene Symbol: ARHGEF1
  Gene Name: Rho guanine nucleotide exchange factor (GEF) 1
  Uniprot ID: Q92888
  ENST ID: ENST00000337665
  CDS Start-End: 21-2804
cttcggttccggtggcggcgatggcttctctttccacctggagcagccctgcagagcccagggagatggaagacttcgcccgaggggcggcctccccaggcccctcccggcctggcctggttcccgtcagcatcatcggggctgaggatgaggattttgagaacgagctggagacaaactcagaagagcaaaacagccagttccagagcctggagcaggtgaagcggcgcccagcccacctcatggccctcctgcagcacgtggccctgcagtttgagccaggacccctgctttgctgtctgcatgccgacatgctgggctcactgggccccaaggaggccaagaaggccttcctggacttctaccacagcttcctggagaagacagcggttctccgggtgccggtccctcccaacgtcgcctttgaacttgaccgcactagggctgacctcatctccgaggatgtccagcggcggttcgtgcaggaggtggtgcaaagccagcaggtagccgtgggccggcagctggaggacttccgttccaagcggctcatgggcatgacgccctgggagcaggagctggcccagctggaggcttgggttgggcgggaccgagccagctacgaggcccgggagcggcacgtggcggagcggctgctcatgcacctggaggagatgcaacataccatctctaccgacgaagaaaagagtgctgccgtggtcaacgccattggcctgtacatgcgccaccttggggtgcggaccaagagtggagacaagaagtcggggaggaacttcttccggaaaaaggtgatggggaaccggcggtcggacgagcctgccaagaccaagaaggggctgagcagcatcctggatgccgcccgctggaaccggggagagccccaggttccagattttcgacacctcaaagcagaggttgatgccgagaagccaggtgctacagaccggaagggaggcgtggggatgccctctcgggaccggaatatcggggctcctgggcaggacacccctggagtctctctgcaccctctgtccctggacagcccagaccgggaaccaggtgctgacgcccccctggagctgggggactcatccccgcagggcccaatgagcctggagtccttggcgcccccagagagtaccgacgagggggccgaaaccgagagccccgagcctggagatgagggggagccggggcggtcgggactggagcttgaaccagaagagcctcccggctggcgggaactcgtccccccagacaccctgcacagcctgcccaagagccaggtgaagcggcaggaggtcatcagcgagctgctggtgacagaggcggcccacgtgcgcatgctgcgggtgctgcacgacctcttcttccagcccatggcagaatgcctgttcttccccttggaggagctgcagaacatcttccccagcctggacgagctcatcgaggtgcattccctgttcctcgatcgcctgatgaagcggaggcaggagagtggctacctcatcgaggagatcggagacgtgctgctggcccggtttgatggtgctgagggctcctggttccagaaaatctcctcccgcttctgcagccgccagtcatttgccttagagcagctcaaagccaagcaacgcaaggaccctcggttctgtgccttcgtgcaggaagctgagagccgcccgcggtgccgccgcctgcagctgaaggacatgatccccacggagatgcagcggctgaccaagtaccccctgctcctgcagagcatcgggcagaacacagaagagcccacagaacgggagaaagtggagctggcagccgagtgctgccgggaaattctacaccacgtcaaccaagccgtgcgtgacatggaggacctgctgaggctcaaggactatcagcggcgcctggacttgtcccaccttcggcagagcagcgaccctatgctgagcgagttcaagaacctggacatcaccaagaagaaattggtccacgagggcccactgacgtggcgggtgactaaggacaaggcagtggaggtgcatgtgctgctgctggacgacctgctgctgctgctccagcgccaggacgagcggctgctgctcaagtcccatagccggacactgacgcccacgcccgatggcaagaccatgctgcggcccgtgctgcggctcacctccgccatgacccgcgaggtggccaccgatcacaaagccttctacgtcctttttacctgggaccaggaggcccagatatacgagctggtggcacagactgtgtcggagcggaaaaactggtgtgctctcatcactgagactgccggatccctgaaagtccctgcccctgcctctcgccctaagccccggcccagcccgagcagcacccgagaacccctcctcagcagctctgagaacggcaatggtggccgagagacgtctccagctgatgcccggaccgagagaatcctcagtgacctcctgcccttctgcagaccaggccccgagggccagctcgctgccacggcccttcggaaagtgctgtccctgaagcagcttctgtttccggcggaggaagacaatggggcggggcctcctcgagatggggatggggtcccagggggcggccccctgagcccagcacggacccaggaaatccaggagaacctgctcagcttggaggagaccatgaagcagctggaggagttggaggaggaattttgccgcctgagacccctcctgtctcagcttggggggaactctgtcccccagcctggctgcacttgaggttcccgcccaggaaggccttttgcaagaaggagaggaatgggggagaggacgtgagggaccacccccacccacacagctgccgcagcatctcacaccccgagggcctgaggagagggagctgtgggccacgcctgggaggggcccagctggggttactggccccgcatgagcctcggccatctctccctcctgccctctgcttgggggactcagggctccattctggagggcaccacggtgacccgggccatctcagtattgcctgtgggggccacccctccacccccacccccaagtgccttcgctctgtttttataccctgaattggaggtttattttttaatatatattatctaagaagaga

SEQ ID NO: 175887 - DNA, 3091 bp, Homo sapiens
  Payload ID: 14533
  Gene Symbol: ARHGEF1
  Gene Name: Rho guanine nucleotide exchange factor (GEF) 1
  Uniprot ID: Q92888
  ENST ID: ENST00000347545
  CDS Start-End: 85-2724
ccagggcccgggatcgccgagcccgacctcgggcgccccgccggtcacctccgcgcggacaccagccctgcagagcccagggagatggaagacttcgcccgaggggcggcctccccaggcccctcccggcctggcctggttcccgtcagcatcatcggggctgaggatgaggattttgagaacgagctggagacaaactcagaagagcaaaacagccagttccagagcctggagcaggtgaagcggcgcccagcccacctcatggccctcctgcagcacgtggccctgcagtttgagccaggacccctggttctccgggtgccggtccctcccaacgtcgcctttgaacttgaccgcactagggctgacctcatctccgaggatgtccagcggcggttcgtgcaggaggtggtgcaaagccagcaggtagccgtgggccggcagctggaggacttccgttccaagcggctcatgggcatgacgccctgggagcaggagctggcccagctggaggcttgggttgggcgggaccgagccagctacgaggcccgggagcggcacgtggcggagcggctgctcatgcacctggaggagatgcaacataccatctctaccgacgaagaaaagagtgctgccgtggtcaacgccattggcctgtacatgcgccaccttggggtgcggaccaagagtggagacaagaagtcggggaggaacttcttccggaaaaaggtgatggggaaccggcggtcggacgagcctgccaagaccaagaaggggctgagcagcatcctggatgccgcccgctggaaccggggagagccccaggttccagattttcgacacctcaaagcagaggttgatgccgagaagccaggtgctacagaccggaagggaggcgtggggatgccctctcgggaccggaatatcggggctcctgggcaggacacccctggagtctctctgcaccctctgtccctggacagcccagaccgggaaccaggtgctgacgcccccctggagctgggggactcatccccgcagggcccaatgagcctggagtccttggcgcccccagagagtaccgacgagggggccgaaaccgagagccccgagcctggagatgagggggagccggggcggtcgggactggagcttgaaccagaagagcctcccggctggcgggaactcgtccccccagacaccctgcacagcctgcccaagagccaggtgaagcggcaggaggtcatcagcgagctgctggtgacagaggcggcccacgtgcgcatgctgcgggtgctgcacgacctcttcttccagcccatggcagaatgcctgttcttccccttggaggagctgcagaacatcttccccagcctggacgagctcatcgaggtgcattccctgttcctcgatcgcctgatgaagcggaggcaggagagtggctacctcatcgaggagatcggagacgtgctgctggcccggtttgatggtgctgagggctcctggttccagaaaatctcctcccgcttctgcagccgccagtcatttgccttagagcagctcaaagccaagcaacgcaaggaccctcggttctgtgccttcgtgcaggaagctgagagccgcccgcggtgccgccgcctgcagctgaaggacatgatccccacggagatgcagcggctgaccaagtaccccctgctcctgcagagcatcgggcagaacacagaagagcccacagaacgggagaaagtggagctggcagccgagtgctgccgggaaattctacaccacgtcaaccaagccgtgcgtgacatggaggacctgctgaggctcaaggactatcagcggcgcctggacttgtcccaccttcggcagagcagcgaccctatgctgagcgagttcaagaacctggacatcaccaagaagaaattggtccacgagggcccactgacgtggcgggtgactaaggacaaggcagtggaggtgcatgtgctgctgctggacgacctgctgctgctgctccagcgccaggacgagcggctgctgctcaagtcccatagccggacactgacgcccacgcccgatggcaagaccatgctgcggcccgtgctgcggctcacctccgccatgacccgcgaggtggccaccgatcacaaagccttctacgtcctttttacctgggaccaggaggcccagatatacgagctggtggcacagactgtgtcggagcggaaaaactggtgtgctctcatcactgagactgccggatccctgaaagtccctgcccctgcctctcgccctaagccccggcccagcccgagcagcacccgagaacccctcctcagcagctctgagaacggcaatggtggccgagagacgtctccagctgatgcccggaccgagagaatcctcagtgacctcctgcccttctgcagaccaggccccgagggccagctcgctgccacggcccttcggaaagtgctgtccctgaagcagcttctgtttccggcggaggaagacaatggggcggggcctcctcgagatggggatggggtcccagggggcggccccctgagcccagcacggacccaggaaatccaggagaacctgctcagcttggaggagaccatgaagcagctggaggagttggaggaggaattttgccgcctgagacccctcctgtctcagcttggggggaactctgtcccccagcctggctgcacttgaggttcccgcccaggaaggccttttgcaagaaggagaggaatgggggagaggacgtgagggaccacccccacccacacagctgccgcagcatctcacaccccgagggcctgaggagagggagctgtgggccacgcctgggaggggcccagctggggttactggccccgcatgagcctcggccatctctccctcctgccctctgcttgggggactcagggctccattctggagggcaccacggtgacccgggccatctcagtattgcctgtgggggccacccctccacccccacccccaagtgccttcgctctgtttttataccctgaattggaggtttattttttaatatatattatctaagaagaga

SEQ ID NO: 175888 - DNA, 3243 bp, Homo sapiens
  Payload ID: 14533
  Gene Symbol: ARHGEF1
  Gene Name: Rho guanine nucleotide exchange factor (GEF) 1
  Uniprot ID: Q92888
  ENST ID: ENST00000354532
  CDS Start-End: 149-2887
gggggcctccggaaaaacgccccgacttcctgccccgccagagccaggaagcgggagccgggacccagggcccgggatcgccgagcccgacctcgggcgccccgccggtcacctccgcgcggacaccagccctgcagagcccagggagatggaagacttcgcccgaggggcggcctccccaggcccctcccggcctggcctggttcccgtcagcatcatcggggctgaggatgaggattttgagaacgagctggagacaaactcagaagagcaaaacagccagttccagagcctggagcaggtgaagcggcgcccagcccacctcatggccctcctgcagcacgtggccctgcagtttgagccaggacccctgctttgctgtctgcatgccgacatgctgggctcactgggccccaaggaggccaagaaggccttcctggacttctaccacagcttcctggagaagacagcggttctccgggtgccggtccctcccaacgtcgcctttgaacttgaccgcactagggctgacctcatctccgaggatgtccagcggcggttcgtgcaggaggtggtgcaaagccagcaggtagccgtgggccggcagctggaggacttccgttccaagcggctcatgggcatgacgccctgggagcaggagctggcccagctggaggcttgggttgggcgggaccgagccagctacgaggcccgggagcggcacgtggcggagcggctgctcatgcacctggaggagatgcaacataccatctctaccgacgaagaaaagagtgctgccgtggtcaacgccattggcctgtacatgcgccaccttggggtgcggaccaagagtggagacaagaagtcggggaggaacttcttccggaaaaaggtgatggggaaccggcggtcggacgagcctgccaagaccaagaaggggctgagcagcatcctggatgccgcccgctggaaccggggagagccccaggttccagattttcgacacctcaaagcagaggttgatgccgagaagccaggtgctacagaccggaagggaggcgtggggatgccctctcgggaccggaatatcggggctcctgggcaggacacccctggagtctctctgcaccctctgtccctggacagcccagaccgggaaccaggtgctgacgcccccctggagctgggggactcatccccgcagggcccaatgagcctggagtccttggcgcccccagagagtaccgacgagggggccgaaaccgagagccccgagcctggagatgagggggagccggggcggtcgggactggagcttgaaccagaagagcctcccggctggcgggaactcgtccccccagacaccctgcacagcctgcccaagagccaggtgaagcggcaggaggtcatcagcgagctgctggtgacagaggcggcccacgtgcgcatgctgcgggtgctgcacgacctcttcttccagcccatggcagaatgcctgttcttccccttggaggagctgcagaacatcttccccagcctggacgagctcatcgaggtgcattccctgttcctcgatcgcctgatgaagcggaggcaggagagtggctacctcatcgaggagatcggagacgtgctgctggcccggtttgatggtgctgagggctcctggttccagaaaatctcctcccgcttctgcagccgccagtcatttgccttagagcagctcaaagccaagcaacgcaaggaccctcggttctgtgccttcgtgcaggaagctgagagccgcccgcggtgccgccgcctgcagctgaaggacatgatccccacggagatgcagcggctgaccaagtaccccctgctcctgcagagcatcgggcagaacacagaagagcccacagaacgggagaaagtggagctggcagccgagtgctgccgggaaattctacaccacgtcaaccaagccgtgcgtgacatggaggacctgctgaggctcaaggactatcagcggcgcctggacttgtcccaccttcggcagagcagcgaccctatgctgagcgagttcaagaacctggacatcaccaagaagaaattggtccacgagggcccactgacgtggcgggtgactaaggacaaggcagtggaggtgcatgtgctgctgctggacgacctgctgctgctgctccagcgccaggacgagcggctgctgctcaagtcccatagccggacactgacgcccacgcccgatggcaagaccatgctgcggcccgtgctgcggctcacctccgccatgacccgcgaggtggccaccgatcacaaagccttctacgtcctttttacctgggaccaggaggcccagatatacgagctggtggcacagactgtgtcggagcggaaaaactggtgtgctctcatcactgagactgccggatccctgaaagtccctgcccctgcctctcgccctaagccccggcccagcccgagcagcacccgagaacccctcctcagcagctctgagaacggcaatggtggccgagagacgtctccagctgatgcccggaccgagagaatcctcagtgacctcctgcccttctgcagaccaggccccgagggccagctcgctgccacggcccttcggaaagtgctgtccctgaagcagcttctgtttccggcggaggaagacaatggggcggggcctcctcgagatggggatggggtcccagggggcggccccctgagcccagcacggacccaggaaatccaggagaacctgctcagcttggaggagaccatgaagcagctggaggagttggaggaggaattttgccgcctgagacccctcctgtctcagcttggggggaactctgtcccccagcctggctgcacttgaggttcccgcccaggaaggccttttgcaagaaggagaggaatgggggagaggacgtgagggaccacccccacccacacagctgccgcagcatctcacaccccgagggcctgaggagagggagctgtgggccacgcctgggaggggcccagctggggttactggccccgcatgagcctcggccatctctccctcctgccctctgcttgggggactcagggctccattctggagggcaccacggtgacccgggccatctcagtattgcctgtgggggccacccctccacccccacccccaagtgccttcgctctgtttttataccctgaattggaggtttattttttaatatatattat

SEQ ID NO: 175889 - DNA, 2986 bp, Homo sapiens
  Payload ID: 14533
  Gene Symbol: ARHGEF1
  Gene Name: Rho guanine nucleotide exchange factor (GEF) 1
  Uniprot ID: Q92888
  ENST ID: ENST00000378152
  CDS Start-End: 99-2945
gggcgcaaaggtggactcagggcggctagagcgacgcggcggcaggggtggggagagtgcggagcccgagcgcggaggcttcggttccggtggcggcgatggcttctctttccacctggagcagccctgcagagcccagggagatggaagacttcgcccgaggggcggcctccccaggcccctcccggcctggcctggttcccgtcagcatcatcggggctgaggatgaggattttgagaacgagctggagacaaactcagaagagcaaaacagccagttccagagcctggagcaggtgaagcggcgcccagcccacctcatggccctcctgcagcacgtggccctgcagtttgagccaggacccctggttctccgggtgccggtccctcccaacgtcgcctttgaacttgaccgcactagggctgacctcatctccgaggatgtccagcggcggttcgtgcaggaggtggtgcaaagccagcaggtagccgtgggccggcagctggaggacttccgttccaagcggctcatgggcatgacgccctgggagcaggagctggcccagctggaggcttgggttgggcgggaccgagccagctacgaggcccgggagcggcacgtggcggagcggctgctcatgcacctggaggagatgcaacataccatctctaccgacgaagaaaagagtgctgccgtggtcaacgccattggcctgtacatgcgccaccttggggtgcggaccaagagtggagacaagaagtcggggaggaacttcttccggaaaaaggtgatggggaaccggcggtcggacgagcctgccaagaccaagaaggggctgagcagcatcctggatgccgcccgctggaaccggggagagccccaggttccagattttcgacacctcaaagcagaggttgatgccgagaagccaggtgctacagaccggaagggaggcgtggggatgccctctcgggaccggaatatcggggctcctgggcaggacacccctggagtctctctgcaccctctgtccctggacagcccagaccgggaaccaggtgctgacgcccccctggagctgggggactcatccccgcagggcccaatgagcctggagtccttggcgcccccagagagtaccgacgagggggccgaaaccgagagccccgagcctggagatgagggggagccggggcggtcgggactggagcttgaaccagaagagcctcccggctggcgggaactcgtccccccagacaccctgcacagcctgcccaagagccaggtgaagcggcaggaggtcatcagcgagctgctggtgacagaggcggcccacgtgcgcatgctgcgggtgctgcacgacctcttcttccagcccatggcagaatgcctgttcttccccttggaggagctgcagaacatcttccccagcctggacgagctcatcgaggtgcattccctgttcctcgatcgcctgatgaagcggaggcaggagagtggctacctcatcgaggagatcggagacgtgctgctggcccggtttgatggtgctgagggctcctggttccagaaaatctcctcccgcttctgcagccgccagtcatttgccttagagcagctcaaagccaagcaacgcaaggaccctcggttctgtgccttcgtgcaggaagctgagagccgcccgcggtgccgccgcctgcagctgaaggacatgatccccacggagatgcagcggctgaccaagtaccccctgctcctgcagagcatcgggcagaacacagaagagcccacagaacgggagaaagtggagctggcagccgagtgctgccgggaaattctacaccacgtcaaccaagccgtgcgtgacatggaggacctgctgaggctcaaggactatcagcggcgcctggacttgtcccaccttcggcagagcagcgaccctatgctgagcgagttcaagaacctggacatcaccaagaagaaattggtccacgagggcccactgacgtggcgggtgactaaggacaaggcagtggaggtgcatgtgctgctgctggacgacctgctgctgctgctccagcgccaggacgagcggctgctgctcaagtcccatagccggacactgacgcccacgcccgatggcaagaccatgctgcggcccgtgctgcggctcacctccgccatgacccgcgaggtggccaccgatcacaaagccttctacgtcctttttacctgggaccaggaggcccagatatacgagctggtggcacagactgtgtcggagcggaaaaactggtgtgctctcatcactgagactgccggatccctgaaagtccctgcccctgcctctcgccctaagccccggcccagcccgagcagcacccgagaacccctcctcagcagctctgagaacggcaatggtggccgagagacgtctccagctgatgcccggaccgagagaatcctcagtgacctcctgcccttctgcagaccaggccccgagggccagctcgctgccacggcccttcggaaaggagttggaggaggaattttgccgcctgagacccctcctgtctcagcttggggggaactctgtcccccagcctggctgcacttgaggttcccgcccaggaaggccttttgcaagaaggagaggaatgggggagaggacgtgagggaccacccccacccacacagctgccgcagcatctcacaccccgagggcctgaggagagggagctgtgggccacgcctgggaggggcccagctggggttactggccccgcatgagcctcggccatctctccctcctgccctctgcttgggggactcagggctccattctggagggcaccacggtgacccgggccatctcagtattgcctgtgggggccacccctccacccccacccccaagtgccttcgctctgtttttataccctgaattggaggtttattttttaatatatattatctaagaagaga

SEQ ID NO: 175890 - DNA, 428 bp, Homo sapiens
  Payload ID: 14533
  Gene Symbol: ARHGEF1
  Gene Name: Rho guanine nucleotide exchange factor (GEF) 1
  ENST ID: ENST00000600517
  CDS Start-End: 1-206
aggtgcatgtgctgctgctggacgacctgctgctgctgctccagcgccaggacgagcggctgctgctcaagtcccatagccggacactgacgcccacgcccgatggcaagaccatgctgcggcccgtgctgcggctcacctccgccatgacccgcgaggtggccaccgctggtgtgctctcatcactgagactgccggatccctgaaagtccctgcccctgcctctcgccctaagccccggcccagcccgagcagcacccgagaacccctcctcagcagctctgagaacggcaatggtggccgagagacgtctccagctgatgcccggaccgagagaatcctcagtgacctcctgcccttctgcagaccaggccccgagggccagctcgctgccacggcccttcggaaaggtagcccagctctgcccc

SEQ ID NO: 175891 - DNA, 2636 bp, Homo sapiens
  Payload ID: 14533
  Gene Symbol: ARHGEF1
  Gene Name: Rho guanine nucleotide exchange factor (GEF) 1
  ENST ID: ENST00000599589
  CDS Start-End: 1-2108
gaggcgtggggatgccctctcgggaccggaatatcggggctcctgggcaggacacccctggagtctctctgcaccctctgtccctggacagcccagaccgggaaccaggtgctgacgcccccctggagctgggggactcatccccgcagggcccaatgagcctggagtccttggcgcccccagagagtaccgacgagggggccgaaaccgagagaaggtggaagaggctatcagggcgtctggggcgctcagagagcctgcgggtgagtgaccgccgccggccttcccggggcagcctcggggctaagggccggggtgggggccgctcccggagcgacgtggacatggaccccagttccgccacggcagtgcttggccctgcccgacgagccacccccgagcctggagatgagggggagccggggcggtcgggactggagcttgaaccagaagagcctcccggctggcgggaactcgtccccccagacaccctgcacagcctgcccaagagccaggtgaagcggcaggaggtcatcagcgagctgctggtgacagaggcggcccacgtgcgcatgctgcgggtgctgcacgacctcttcttccagcccatggcagaatgcctgttcttccccttggaggagctgcagaacatcttccccagcctggacgagctcatcgaggtgcattccctgttcctcgatcgcctgatgaagcggaggcaggagagtggctacctcatcgaggagatcggagacgtgctgctggcccggtttgatggtgctgagggctcctggttccagaaaatctcctcccgcttctgcagccgccagtcatttgccttagagcagctcaaagccaagcaacgcaaggaccctcggttctgtgccttcgtgcaggaagctgagagccgcccgcggtgccgccgcctgcagctgaaggacatgatccccacggagatgcagcggctgaccaagtaccccctgctcctgcagagcatcgggcagaacacagaagagcccacagaacgggagaaagtggagctggcagccgagtgctgccgggaaattctacaccacgtcaaccaagccgtgcgtgacatggaggacctgctgaggctcaaggactatcagcggcgcctggacttgtcccaccttcggcagagcagcgaccctatgctgagcgagttcaagaacctggacatcaccaagaagaaattggtccacgagggcccactgacgtggcgggtgactaaggacaaggcagtggaggtgcatgtgctgctgctggacgacctgctgctgctgctccagcgccaggacgagcggctgctgctcaagtcccatagccggacactgacgcccacgcccgatggcaagaccatgctgcggcccgtgctgcggctcacctccgccatgacccgcgaggtggccaccgatcacaaagccttctacgtcctttttacctgggaccaggaggcccagatatacgagctggtggcacagactgtgtcggagcggaaaaactggtgtgctctcatcactgagactgccggatccctgaaagtccctgcccctgcctctcgccctaagccccggcccagcccgagcagcacccgagaacccctcctcagcagctctgagaacggcaatggtggccgagagacgtctccagctgatgcccggaccgagagaatcctcagtgacctcctgcccttctgcagaccaggccccgagggccagctcgctgccacggcccttcggaaaggagttggaggaggaattttgccgcctgagacccctcctgtctcagcttggggggaactctgtcccccagcctggctgcacttgaggttcccgcccaggaagcaccccatcctcaccaccacctgtgaggtaggaactgccatgatggatgcccatttcacagatgtggaaactgaggttctgacaggaaaagtaacttggccaaagtcccacagggatgaggtgagcctggacttgaatgcaggcgcgaggtggaggtggcgacgatgcgtccaggacccctgctggacacgcaagcctggaccgggactggaacacggacccgcacacacgcagcctggataggagatacacggacagagggacatatggatacagtcaggctccgccccgccaagtcccacaccaccttctctggggaaaggcagctctcacctgggcagcccctggaggcttctacccctagaggggaaaataggtctcacggcaagacagcagtccccaggtggatattcaggggccaggacagctctgtcggatctcaccaaccccaccagcgcccaggtgctgagaccgaggtgctgagaggctagaagagaacttcagccctgcctgacagagaaggttcagcctcactcccgctcaccactcactcaggcaagtcgctaaacatccccgagcctcaagtttcctcatctgcaaaatgggacaataatgacctccctcctagagtggttgggaaggttaaaccgcagggcgcatggagcacagctggtactgcaccaagtaccaagtaaacacgcatttgctgtgagcttgctgcttccgaataatctcattaaaaatattaagaattttgccagataacaagaa

SEQ ID NO: 175892 - DNA, 919 bp, Homo sapiens
  Payload ID: 14533
  Gene Symbol: ARHGEF1
  Gene Name: Rho guanine nucleotide exchange factor (GEF) 1
  ENST ID: ENST00000594258
  CDS Start-End: 1-919
cacctctgtccctgccctggtctctccccgtctctgtccctgtcctggtttctcttcgtctctgttcttgtcttggtctctccttgtctctgtccccggcatctgcctgactctgtccttggcctcggggtccaggctatcagggcgtctggggcgctcagagagcctgcgggtgagtgaccgccgccggccttcccggggcagcctcggggctaagggccggggtgggggccgctcccggagcgacgtggacatggaccccagttccgccacggcagtgcttggccctgcccgacgagccacccccgagcctggagatgagggggagccggggcggtcgggactggagcttgaaccagaagagcctcccggctggcgggaactcgtccccccagacaccctgcacagcctgcccaagagccaggtgaagcggcaggaggtcatcagcgagctgctggtgacagaggcggcccacgtgcgcatgctgcgggtgctgcacgacctcttcttccagcccatggcagaatgcctgttcttccccttggaggagctgcagaacatcttccccagcctggacgagctcatcgaggtgcattccctgttcctcgatcgcctgatgaagcggaggcaggagagtggctacctcatcgaggagatcggagacgtgctgctggcccggtttgatggtgctgagggctcctggttccagaaaatctcctcccgcttctgcagccgccagtcatttgccttagagcagctcaaagccaagcaacgcaaggaccctcggttctgtgccttcgtgcaggaagctgagagccgcccgcggtgccgccgcctgcagctgaaggacatgatccccacggagatgcagcggctgaccaagtaccccctgctcctgcagagcatcgggcagaacaca

SEQ ID NO: 175893 - DNA, 826 bp, Homo sapiens
  Payload ID: 14533
  Gene Symbol: ARHGEF1
  Gene Name: Rho guanine nucleotide exchange factor (GEF) 1
  ENST ID: ENST00000594521
  CDS Start-End: 1-826
ttcttccggaaaaaggtgatggggaaccggcggtcggacgagcctgccaagaccaagaaggggctgagcagcatcctggatgccgcccgctggaaccggggagagccccaggccgagaagccaggtgctacagaccggaagggaggcgtggggatgccctctcgggaccggaatatcggggctcctgggcaggacacccctggagtctctctgcaccctctgtccctggacagcccagaccgggaaccaggtgctgacgcccccctggagctgggggactcatccccgcagggcccaatgagcctggagtccttggcgcccccagagagtaccgacgagggggccgaaaccgagagaaggtggaagaggctatcagggcgtctggggcgctcagagagcctgcgggtgagtgaccgccgccggccttcccggggcagcctcggggctaagggccggggtgggggccgctcccggagcgacgtggacatggaccccagttccgccacggcagtgcttggccctgcccgacgagccacccccgagcctggagatgagggggagccggggcggtcgggactggagcttgaaccagaagagcctcccggctggcgggaactcgtccccccagacaccctgcacagcctgcccaagagccaggtgaagcggcaggaggtcatcagcgagctgctggtgacagaggcggcccacgtgcgcatgctgcgggtgctgcacgacctcttcttccagcccatggcagaatgcctgttcttccccttggaggagctgcagaacatcttccccagcctggacgagctcatcgaggtgc

SEQ ID NO: 175894 - DNA, 3393 bp, Homo sapiens
  Payload ID: 14533
  Gene Symbol: ARHGEF1
  Gene Name: Rho guanine nucleotide exchange factor (GEF) 1
  ENST ID: ENST00000599846
  CDS Start-End: 126-3032
gacttcctgccccgccagagccaggaagcgggagccgggacccagggcccgggatcgccgagcccgacctcgggcgccccgccggtcacctccgcgcggacaccagccctgcagagcccagggagatggaagacttcgcccgaggggcggcctccccaggcccctcccggcctggcctggttcccgtcagcatcatcggggctgaggatgaggattttgagaacgagctggagacaaactcagaagagcaaaacagccagttccagagcctggagcaggtgaagcggcgcccagcccacctcatggccctcctgcagcacgtggccctgcagtttgagccaggacccctgctttgctgtctgcatgccgacatgctgggctcactgggccccaaggaggccaagaaggccttcctggacttctaccacagcttcctggagaagacagcggttctccgggtgccggtccctcccaacgtcgcctttgaacttgaccgcactagggctgacctcatctccgaggatgtccagcggcggttcgtgcaggaggtggtgcaaagccagcaggtagccgtgggccggcagctggaggacttccgttccaagcggctcatgggcatgacgccctgggagcaggagctggcccagctggaggcttgggttgggcgggaccgagccagctacgaggcccgggagcggcacgtggcggagcggctgctcatgcacctggaggagatgcaacataccatctctaccgacgaagaaaagagtgctgccgtggtcaacgccattggcctgtacatgcgccaccttggggtgcggaccaagagtggagacaagaagtcggggaggaacttcttccggaaaaaggtgatggggaaccggcggtcggacgagcctgccaagaccaagaaggggctgagcagcatcctggatgccgcccgctggaaccggggagagccccaggttccagattttcgacacctcaaagcagaggttgatgccgagaagccaggtgctacagaccggaagggaggcgtggggatgccctctcgggaccggaatatcggggctcctgggcaggacacccctggagtctctctgcaccctctgtccctggacagcccagaccgggaaccaggtgctgacgcccccctggagctgggggactcatccccgcagggcccaatgagcctggagtccttggcgcccccagagagtaccgacgagggggccgaaaccgagaggctatcagggcgtctggggcgctcagagagcctgcgggtgagtgaccgccgccggccttcccggggcagcctcggggctaagggccggggtgggggccgctcccggagcgacgtggacatggaccccagttccgccacggcagtgcttggccctgcccgacgagccacccccgagcctggagatgagggggagccggggcggtcgggactggagcttgaaccagaagagcctcccggctggcgggaactcgtccccccagacaccctgcacagcctgcccaagagccaggtgaagcggcaggaggtcatcagcgagctgctggtgacagaggcggcccacgtgcgcatgctgcgggtgctgcacgacctcttcttccagcccatggcagaatgcctgttcttccccttggaggagctgcagaacatcttccccagcctggacgagctcatcgaggtgcattccctgttcctcgatcgcctgatgaagcggaggcaggagagtggctacctcatcgaggagatcggagacgtgctgctggcccggtttgatggtgctgagggctcctggttccagaaaatctcctcccgcttctgcagccgccagtcatttgccttagagcagctcaaagccaagcaacgcaaggaccctcggttctgtgccttcgtgcaggaagctgagagccgcccgcggtgccgccgcctgcagctgaaggacatgatccccacggagatgcagcggctgaccaagtaccccctgctcctgcagagcatcgggcagaacacagaagagcccacagaacgggagaaagtggagctggcagccgagtgctgccgggaaattctacaccacgtcaaccaagccgtgcgtgacatggaggacctgctgaggctcaaggactatcagcggcgcctggacttgtcccaccttcggcagagcagcgaccctatgctgagcgagttcaagaacctggacatcaccaagaagaaattggtccacgagggcccactgacgtggcgggtgactaaggacaaggcagtggaggtgcatgtgctgctgctggacgacctgctgctgctgctccagcgccaggacgagcggctgctgctcaagtcccatagccggacactgacgcccacgcccgatggcaagaccatgctgcggcccgtgctgcggctcacctccgccatgacccgcgaggtggccaccgatcacaaagccttctacgtcctttttacctgggaccaggaggcccagatatacgagctggtggcacagactgtgtcggagcggaaaaactggtgtgctctcatcactgagactgccggatccctgaaagtccctgcccctgcctctcgccctaagccccggcccagcccgagcagcacccgagaacccctcctcagcagctctgagaacggcaatggtggccgagagacgtctccagctgatgcccggaccgagagaatcctcagtgacctcctgcccttctgcagaccaggccccgagggccagctcgctgccacggcccttcggaaagtgctgtccctgaagcagcttctgtttccggcggaggaagacaatggggcggggcctcctcgagatggggatggggtcccagggggcggccccctgagcccagcacggacccaggaaatccaggagaacctgctcagcttggaggagaccatgaagcagctggaggagttggaggaggaattttgccgcctgagacccctcctgtctcagcttggggggaactctgtcccccagcctggctgcacttgaggttcccgcccaggaaggccttttgcaagaaggagaggaatgggggagaggacgtgagggaccacccccacccacacagctgccgcagcatctcacaccccgagggcctgaggagagggagctgtgggccacgcctgggaggggcccagctggggttactggccccgcatgagcctcggccatctctccctcctgccctctgcttgggggactcagggctccattctggagggcaccacggtgacccgggccatctcagtattgcctgtgggggccacccctccacccccacccccaagtgccttcgctctgtttttataccctgaattggaggtttattttttaatatatattatctaag

SEQ ID NO: 175895 - DNA, 769 bp, Homo sapiens
  Payload ID: 14533
  Gene Symbol: ARHGEF1
  Gene Name: Rho guanine nucleotide exchange factor (GEF) 1
  ENST ID: ENST00000594417
  CDS Start-End: 1-385
ccccatcctcaccaccacctgtgaggtaggaactgccatgatggatgcccatttcacagatgtggaaactgaggttctgacaggaaaagtaacttggccaaagtcccacagggatgaggtgagcctggacttgaatgcagtggacgcgcggacaaacggacaggcgcgaggtggaggtggcgacgatgcgtccaggacccctgctggacacgcaagcctggaccgggactggaacacggacccgcacacacgcagcctggataggagatacacggacagagggacatatggatacagtcaggctccgccccgccaagtcccacaccaccttctctggggaaaggcagctctcacctgggcagcccctggaggcttctacccctagaggggaaaataggtctcacggcaagacagcagtccccaggtggatattcaggggccaggacagctctgtcggatctcaccaaccccaccagcgcccaggtgctgagaccgaggtgctgagaggctagaagagaacttcagccctgcctgacagagaaggttcagcctcactcccgctcaccactcactcaggcaagtcgctaaacatccccgagcctcaagtttcctcatctgcaaaatgggacaataatgacctccctcctagagtggttgggaaggttaaaccgcagggcgcatggagcacagctggtactgcaccaagtaccaagtaaacacgcatttgctgtgagcttgctgcttccgaataatctcattaaaaatatta

SEQ ID NO: 175896 - DNA, 872 bp, Homo sapiens
  Payload ID: 14533
  Gene Symbol: ARHGEF1
  Gene Name: Rho guanine nucleotide exchange factor (GEF) 1
  ENST ID: ENST00000595723
  CDS Start-End: 1-872
cccgcggtgccgccgcctgcagctgaaggacatgatccccacggagatgcagcggctgaccaagtaccccctgctcctgcagagcatcgggcagaacacagaagagcccacagaacgggagaaagtggagctggcagccgagtgctgccgggaaattctacaccacgtcaaccaagccgtgcgtgacatggaggacctgctgaggctcaaggactatcagcggcgcctggacttgtcccaccttcggcagagcagcgaccctatgctgagcgagttcaagaacctggacatcaccaagaagaaattggtccacgagggcccactgacgtggcgggtgactaaggacaaggcagtggaggtgcatgtgctgctgctggacgacctgctgctgctgctccagcgccaggacgagcggctgctgctcaagtcccatagccggacactgacgcccacgcccgatggcaagaccatgctgcggcccgtgctgcggctcacctccgccatgacccgcgaggtggccaccgatcacaaagccttctacgtcctttttacctgggaccaggaggcccagatatacgagctggtggcacagactgtgtcggagcggaaaaacacccgagaacccctcctcagcagctctgagaacggcaatggtggccgagagacgtctccagctgatgcccggaccgagagaatcctcagtgacctcctgcccttctgcagaccaggccccgagggccagctcgctgccacggcccttcggaaagtgctgtccctgaagcagcttctgtttccggcggaggaagacaatggggcggggcctcctcgagatggggatggggtcccagggggcggccccctgagcccagcac

SEQ ID NO: 175897 - DNA, 588 bp, Homo sapiens
  Payload ID: 14533
  Gene Symbol: ARHGEF1
  Gene Name: Rho guanine nucleotide exchange factor (GEF) 1
  ENST ID: ENST00000598812
  CDS Start-End: 1-265
tgtccagcggcggttcgtgcaggaggtggtgcaaagccagcaggtagccgtgggccggcagctggaggacttccgttccaagcggctcatgggcatgacgccctgggagcaggagctggcccagctggaggcttgggttgggcgggaccgagccagctacgaggcccgggagcggcacgtggcggagcggctgctcatgcacctggaggagatgcagacagcaaccctgagatgtatcctgggtggatggggaccccaggcctagcaaatatgtcacaaacatctctcttcctcctacagacataccatctctaccgacgaagaaaagagtgctgccgtggtcaacgccattggcctgtacatgcgccaccttggggtgcggaccaagagtggagacaagaagtcggggaggaacttcttccggaaaaaggtgatggggaaccggcggtcggacgagcctgccaagaccaagaaggggctgagcagcatcctggatgccgcccgctggaaccggggagagccccaggttccagattttcgacacctcaaagcagaggttgatgccgagaagccaggtgctacagaccg

SEQ ID NO: 175898 - DNA, 5590 bp, Homo sapiens
  Payload ID: 14534
  Gene Symbol: ARHGEF10
  Gene Name: Rho guanine nucleotide exchange factor (GEF) 10
  Uniprot ID: O15013
  ENST ID: ENST00000349830
  CDS Start-End: 186-4220
ggggtcgcgggggacgcgggggacgcgggggacggcggggaacggcgggggacggcggggaacagcgggggacggcggggaacagcgggggacggcggggaacagcaggggactgcgggtcgcgtcctggccgccgaggagctccttcccttaacagagctgagagaggcatctggagctgcagcatggaccagcgagagcccctgcctcccgctcctgcagaaaatgaaatgaaatatgataccaataataatgaagaggaagagggagaacagttcgattttgacagtggagatgaaatcccagaagcggacagacaggccccatccgcccctgagacaggaggtgctggagccagtgaagcccctgcacccacaggaggtgaggatggagctggagcagaaaccaccccagtggcagagcctactaagctggtgctcccgatgaaagtcaacccatattctgtcatcgacatcacgccattccaggaggaccagccgcccacccccgtgcccagcgctgaggaggagaatgtgggtctccatgtgccctgcgggtacttggtgcctgtaccctgcggctatgcggtgccctccaacctgcccctcctgctgcccgcctactccagcccggtcatcatctgcgccacgtccctggacgaagaagaaacaccagaagtcacagaagatcgccagcccaattctctgagttccgaggagcctccaaccagtgaagatcaagtcggtcgagaggacagcgcacttgcccgctgggccgcagacccggccaacacagcctggatggagaatccagaggaagcaatttacgatgacgttccaagggaaaactcagactctgaaccagatgaaatgatttatgatgatgttgagaatggggatgaaggtggaaacagctccttggaatacggatggagttcgagtgaatttgaaagttacgaagagcagagtgactcggagtgcaagaatgggattcccaggtccttcctgcgcagcaaccacaaaaagcaactttctcatgacctaacccgtttaaaggagcactatgagaaaaagatgagagatttgatggcaagcacggtgggcgtggtggagattcagcagctcaggcagaagcatgaactgaagatgcagaagctcgtgaaggccgcgaaggacggcaccaaggacgggctggagaggaccagggcagccgtgaagaggggccgctccttcatcaggaccaagtctctcatcgcacaggatcacagatcttctcttgaggaagaacagaatttgttcattgatgttgactgcaagcacccggaagccatcttgaccccgatgcccgagggtttatctcagcagcaggttgtaagaagatatatactgggttcagttgtcgacagtgaaaagaactacgtagatgctcttaagaggattttggagcaatatgagaagccgctgtctgagatggagccaaaggttctgagtgagaggaagctgaagacggtgttctaccgagtcaaagagatcctgcagtgccactcgctatttcagatcgcgctggccagccgcgtttccgagtgggactccgtggaaatgataggcgatgtcttcgtggcttcgttttctaagtccatggtgctggatgcatacagtgaatatgtgaacaatttcagcacagccgtggcagtcctcaagaaaacatgtgccacaaagcccgcttttcttgaatttttaaagcaggaacaggaggccagccccgatcgaaccacgctctacagcctgatgatgaagcccatccagaggttcccacagttcatcctcctgctccaggacatgctgaagaacacctccaaaggccaccccgacaggctgcctcttcagatggccctgacagagctcgaaacactagcagagaagttaaatgaaagaaagagagatgctgatcaacgctgtgaagtgaagcaaatagccaaagccataaacgaaagatacctgaacaagcttctcagcagtggaagccgatacctcattcgatcagatgatatgatagaaacagtttacaacgacagaggagagattgttaaaaccaaagaacgccgagtcttcatgttaaatgatgtgttaatgtgtgccaccgtcagctcacgcccctctcatgacagccgtgtgatgagcagccagaggtacttgctgaagtggagcgttccactgggacatgtggacgccatcgagtatggcagcagcgcaggcacgggcgagcacagcaggcaccttgccgttcacccgccggagagcctggccgtggttgctaacgcgaaaccaaacaaagtttacatggggccaggacaactgtatcaagatttacaaaacttgttgcatgacttaaatgtaattggccaaatcactcagctgataggaaaccttaaaggaaactatcagaacttaaaccagtcagtagcccatgactggacatcaggtttacaaaggcttattttgaagaaagaagatgaaatcagagctgcggactgctgcagaattcagttacagcttcccgggaagcaggacaaatctgggcgaccgacgttctttacagctgtgttcaatacgttcacccctgccatcaaggagtcctgggtcaacagcttacagatggccaagctcgccctagaagaggagaaccacatgggctggttctgtgtggaagacgatgggaatcacattaaaaaggagaagcatcctctcctcgtcggacacatgcccgtgatggtggccaagcagcaggagttcaagattgaatgtgctgcttataaccctgaaccttacctaaataatgaaagccagccagattcattttccacggcacatggtttcctgtggatcggaagttgcacccatcaaatgggtcagattgccatcgtctcgtttcaaaattccactcccaaagtcattgagtgcttcaacgtggaatctcgcatcctgtgcatgctgtacgttcccgtcgaggagaagcgcagagagcctggggcacccccggaccccgagaccccggccgtgagagcttctgatgtccccacgatctgtgtagggacggaggagggaagcatttccatttataaaagcagtcaaggctccaagaaagtgagacttcagcactttttcactcctgagaagtccacagtcatgagcctggcttgcacgtctcagagcctgtacgctggcctggtcaacggggcagtcgccagctacgccagagccccagatggatcctgggattcagaacctcaaaaagtgatcaagttaggcgtcctaccagttagaagtctactcatgatggaagacacgttgtgggcggcttccggaggtcaagtcttcatcatcagtgtggagactcatgctgtagagggtcagctggaggcccaccaggaggaaggcatggtgatctcccacatggccgtgtccggcgtcgggatctggattgccttcacctcagggtccacgctccgcctttttcacacggaaactctcaagcacctgcaggacatcaacatcgccacccctgttcacaacatgctgccagggcaccagcggctgtcggtgacgagcctgctcgtctgccacggattgctgatggtcggcaccagcctgggagtcctcgtggccctgccggtcccacgtctgcaagggattcccaaagtgaccggaagaggcatggtctcctaccatgcacacaacagtcctgtcaaattcatcgtcctggccacggctctgcacgagaaagacaaggacaaatccagggacagcctggctcctggccccgagcctcaggacgaagaccagaaggacgcacttccgagtggaggagctggttcatctctgagccagggtgaccctgacgcagccatctggttgggagattcgctgggatcgatgactcagaaaagcgacctgtcctcctcatctgggtccctgagcttgtctcacggctccagctctctagagcacagatcagaggacagcaccatctatgatctcctgaaggatcctgtctcgctgagaagcaaagcacgccgggccaagaaagccaaggccagctcggcgctggtggtctgtggagggcagggccaccgccgggtgcacaggaaggcccggcagccccaccaggaagagctggcgccgaccgtcatggtctggcagatccctctgctgaatatataagcaggacggccgccttctgctgtcagaatttgcaatcaagggtgacttctcagctaatcctacagcctgagtggttaagctgtgtctacactggttgggaataaattaaaaacagtatttgggggagaaacgtgcaatagcgtaatggtggtgtccctgccaattccttccttctcttctgtacagcagaagtaattacaagcacttctcacgaaggcagaagactgatgcaattttcgagtaattgagtgcagttctgggaaaataccacattctttttgactgctgtagtccatatgtgaatactaaatgttaaacttcatcagcgtcagacctattgtatcatattagagaatttgcagactaagaatttatgagaaaatatatgtattcagtagtgcaggcatttattaacaattcttaaaagttttacctgattcagattcacgacttttatttatattctatatttttgaatttcagagtaaaatttgttaacaattttaaaagccaggtaacacctaccagtccagttagcatgatttgctttcagaagtgagctgggttttccaaagtggtataatgtgtgtactgtatattttaacaaagtaatatttttgtattgcatttttctattaaaaaattaacagttaatgtttcagtcaatgtattatctgtagcatttcacaaataatgtttgctttgaaccaaaatgctcagtgcctatcaacatttggactcaagcatcaacaccaaattattcctcccttctcgtataaatagagtgactatccacaggagaaaagtgtgtgctttagtattagaggagataggcagagaagtcttgcttagttccttcgtgcagcttcttgcccctgttgacgtggaatgctgtgtctgctttagcacgcacgctccgaatgactcctggtgctaggccatgctggctgctgtcactgagcgggactcaggccaagaggcgtgacctcgggccagcctgtctgttgtgcagacgcctcctctgcagaacgcatcagtttctattctgcagttgcagagccagccccgcgtgagaacgtgcataatgagtgcacaccatcatgtcaaggtgcatacttagtgagcgccatcctgctgaacgtgtatttcagtgtttcacttactggacggataacaagaaaaaaatcctaacacaggcaggcaccagaaataaatgtctcagcactttacagatgactaaaaatgttaattttatgacttagccaaatatgttctaggttgcatatatcccccatgtgaaagtgatttcttcccaagcttctcaaactgttagctgctgtctgacttcatcaataaagtatttttatttt

SEQ ID NO: 175899 - DNA, 2221 bp, Homo sapiens
  Payload ID: 14534
  Gene Symbol: ARHGEF10
  Gene Name: Rho guanine nucleotide exchange factor (GEF) 10
  ENST ID: ENST00000398560
  CDS Start-End: 488-1630
aggtgtagtaccagcctctcagtttggcagcgttcctcttggctcgcacggtgtttcttcaggaggtgaggatggagctggagcagaaaccaccccagtggcagagcctactaagctggtgctcccgatgaaagtcaacccatattctgtcatcgacatcacgccattccaggaggaccagccgcccacccccgtgcccagcgctgaggaggagaatgtgggtctccatgtgccctgcgggtacttggtgcctgtaccctgcggctatgcggtgccctccaacctgcccctcctgctgcccgcctactccagcccggtcatcatctgcgccacgtccctggacgaagaagcagaaacaccagaagtcacagaagatcgccagcccaattctctgagttccgaggagcctccaaccagtgaagatcaagtcggtcgagaggacagcgcacttgcccgctgggccgcagacccggccaacacagcctggatggagaatccagaggaagcaatttacgatgacgttccaagggaaaactcagactctgaaccagatgaaatgatttatgatgatgttgagaatggggatgaaggtggaaacagctccttggaatacggatggagttcgagtgaatttgaaagttacgaagagcagagtgactcggagtgcaagaatgggattcccaggtccttcctgcgcagcaaccacaaaaagcaaatgcagaagctcgtgaaggccgcgaaggacggcaccaaggacgggctggagaggaccagggcagccgtgaagaggggccgctccttcatcaggaccaagtctctcatcgcacaggatcacagatcttctcttgaggaagaacagaatttgttcattgatgttgactgcaagcacccggaagccatcttgaccccgatgcccgagggtttatctcagcagcaggttgtaagaagatatatactgggttcagttgtcgacagtgaaaagaactacgtagatgctcttaagaggattttggagcaatatgagaagccgctgtctgagatggagccaaaggttctgagtgagaggaagctgaagacggtgttctaccgagtcaaagagatcctgcagtgccactcgctatttcagatcgcgctggccagccgcgtttccgagtgggactccgtggaaatgataggcgatgtcttcgtggcttcgttttctaagtccatggtgctggatgcatacagtgaatatgtgaacaatttcagcacagccgtggcagtcctcaagaaaacatgtgccacaaagcccgcttttcttgaatttttaaagcaggaacaggaggccagccccgatcgaaccacgctctacagcctgatgatgaagcccatccagaggttcccacagttcatcctcctgctccaggacatgctgaagaacacctccaaaggccaccccgacaggctgcctcttcagatggccctgacagagctcgaaacactagcagagaagttaaatgaaagaaagagagatgctgatcaacgctgtgaagtgaagcaaatagccaaagccataaacgaaagatacctgaacaaggttgagagaggttttcttcaactctattccaaaattatttttgctttgtgctaataagctgtcgttgtccagcaatactaatcttttggatcgtttggagtaattcccttcgcccagagttcttaaccggggtggatggaggccttcgggagagtcacaccaatgtggaaattgtatgtaaaaccttaacagcctgtcttaacagcattttcttaggaaagagattcatacattcattagaccctcaaatggatccaggacctcccaaggggttaagagcaactcctttagcttacttttcctttcaaaataacggtatttaatttcagatagtaatagttaaagctgaaaatatttacaggctaggcacagtggctcacacctgtaagcccagcactttgggaggctgaggtgggaagatcgctggaacccaggagttcaagaccagcctgggcatgatagtgagaacccatatctaaaaaaagaaaaaaaaaatagctgggcacagtggcatgcacctatatagtctgagctacgtgggaggctgaggccagaggattgctcgagcctgggaggtccaggctgtggtgagctgttattgaggtgctgcactctagcctgggtgatggagcaaaaccctgtttc

SEQ ID NO: 175900 - DNA, 5480 bp, Homo sapiens
  Payload ID: 14534
  Gene Symbol: ARHGEF10
  Gene Name: Rho guanine nucleotide exchange factor (GEF) 10
  Uniprot ID: O15013
  ENST ID: ENST00000398564
  CDS Start-End: 1-4110
atgagacctccaggatttctcagcagagctccttcccttaacagagctgagagaggcatctggagctgcagcatggaccagcgagagcccctgcctcccgctcctgcagaaaatgaaatgaaatatgataccaataataatgaagaggaagagggagaacagttcgattttgacagtggagatgaaatcccagaagcggacagacaggccccatccgcccctgagacaggaggtgctggagccagtgaagcccctgcacccacaggaggtgaggatggagctggagcagaaaccaccccagtggcagagcctactaagctggtgctcccgatgaaagtcaacccatattctgtcatcgacatcacgccattccaggaggaccagccgcccacccccgtgcccagcgctgaggaggagaatgtgggtctccatgtgccctgcgggtacttggtgcctgtaccctgcggctatgcggtgccctccaacctgcccctcctgctgcccgcctactccagcccggtcatcatctgcgccacgtccctggacgaagaagcagaaacaccagaagtcacagaagatcgccagcccaattctctgagttccgaggagcctccaaccagtgaagatcaagtcggtcgagaggacagcgcacttgcccgctgggccgcagacccggccaacacagcctggatggagaatccagaggaagcaatttacgatgacgttccaagggaaaactcagactctgaaccagatgaaatgatttatgatgatgttgagaatggggatgaaggtggaaacagctccttggaatacggatggagttcgagtgaatttgaaagttacgaagagcagagtgactcggagtgcaagaatgggattcccaggtccttcctgcgcagcaaccacaaaaagcaactttctcatgacctaacccgtttaaaggagcactatgagaaaaagatgagagatttgatggcaagcacggtgggcgtggtggagattcagcagctcaggcagaagcatgaactgaagatgcagaagctcgtgaaggccgcgaaggacggcaccaaggacgggctggagaggaccagggcagccgtgaagaggggccgctccttcatcaggaccaagtctctcatcgcacaggatcacagatcttctcttgaggaagaacagaatttgttcattgatgttgactgcaagcacccggaagccatcttgaccccgatgcccgagggtttatctcagcagcaggttgtaagaagatatatactgggttcagttgtcgacagtgaaaagaactacgtagatgctcttaagaggattttggagcaatatgagaagccgctgtctgagatggagccaaaggttctgagtgagaggaagctgaagacggtgttctaccgagtcaaagagatcctgcagtgccactcgctatttcagatcgcgctggccagccgcgtttccgagtgggactccgtggaaatgataggcgatgtcttcgtggcttcgttttctaagtccatggtgctggatgcatacagtgaatatgtgaacaatttcagcacagccgtggcagtcctcaagaaaacatgtgccacaaagcccgcttttcttgaatttttaaagcaggaacaggaggccagccccgatcgaaccacgctctacagcctgatgatgaagcccatccagaggttcccacagttcatcctcctgctccaggacatgctgaagaacacctccaaaggccaccccgacaggctgcctcttcagatggccctgacagagctcgaaacactagcagagaagttaaatgaaagaaagagagatgctgatcaacgctgtgaagtgaagcaaatagccaaagccataaacgaaagatacctgaacaagcttctcagcagtggaagccgatacctcattcgatcagatgatatgatagaaacagtttacaacgacagaggagagattgttaaaaccaaagaacgccgagtcttcatgttaaatgatgtgttaatgtgtgccaccgtcagctcacgcccctctcatgacagccgtgtgatgagcagccagaggtacttgctgaagtggagcgttccactgggacatgtggacgccatcgagtatggcagcagcgcaggcacgggcgagcacagcaggcaccttgccgttcacccgccggagagcctggccgtggttgctaacgcgaaaccaaacaaagtttacatggggccaggacaactgtatcaagatttacaaaacttgttgcatgacttaaatgtaattggccaaatcactcagctgataggaaaccttaaaggaaactatcagaacttaaaccagtcagtagcccatgactggacatcaggtttacaaaggcttattttgaagaaagaagatgaaatcagagctgcggactgctgcagaattcagttacagcttcccgggaagcaggacaaatctgggcgaccgacgttctttacagctgtgttcaatacgttcacccctgccatcaaggagtcctgggtcaacagcttacagatggccaagctcgccctagaagaggagaaccacatgggctggttctgtgtggaagacgatgggaatcacattaaaaaggagaagcatcctctcctcgtcggacacatgcccgtgatggtggccaagcagcaggagttcaagattgaatgtgctgcttataaccctgaaccttacctaaataatgaaagccagccagattcattttccacggcacatggtttcctgtggatcggaagttgcacccatcaaatgggtcagattgccatcgtctcgtttcaaaattccactcccaaagtcattgagtgcttcaacgtggaatctcgcatcctgtgcatgctgtacgttcccgtcgaggagaagcgcagagagcctggggcacccccggaccccgagaccccggccgtgagagcttctgatgtccccacgatctgtgtagggacggaggagggaagcatttccatttataaaagcagtcaaggctccaagaaagtgagacttcagcactttttcactcctgagaagtccacagtcatgagcctggcttgcacgtctcagagcctgtacgctggcctggtcaacggggcagtcgccagctacgccagagccccagatggatcctgggattcagaacctcaaaaagtgatcaagttaggcgtcctaccagttagaagtctactcatgatggaagacacgttgtgggcggcttccggaggtcaagtcttcatcatcagtgtggagactcatgctgtagagggtcagctggaggcccaccaggaggaaggcatggtgatctcccacatggccgtgtccggcgtcgggatctggattgccttcacctcagggtccacgctccgcctttttcacacggaaactctcaagcacctgcaggacatcaacatcgccacccctgttcacaacatgctgccagggcaccagcggctgtcggtgacgagcctgctcgtctgccacggattgctgatggtcggcaccagcctgggagtcctcgtggccctgccggtcccacgtctgcaagggattcccaaagtgaccggaagaggcatggtctcctaccatgcacacaacagtcctgtcaaattcatcgtcctggccacggctctgcacgagaaagacaaggacaaatccagggacagcctggctcctggccccgagcctcaggacgaagaccagaaggacgcacttccgagtggaggagctggttcatctctgagccagggtgaccctgacgcagccatctggttgggagattcgctgggatcgatgactcagaaaagcgacctgtcctcctcatctgggtccctgagcttgtctcacggctccagctctctagagcacagatcagaggacagcaccatctatgatctcctgaaggatcctgtctcgctgagaagcaaagcacgccgggccaagaaagccaaggccagctcggcgctggtggtctgtggagggcagggccaccgccgggtgcacaggaaggcccggcagccccaccaggaagagctggcgccgaccgtcatggtctggcagatccctctgctgaatatataagcaggacggccgccttctgctgtcagaatttgcaatcaagggtgacttctcagctaatcctacagcctgagtggttaagctgtgtctacactggttgggaataaattaaaaacagtatttgggggagaaacgtgcaatagcgtaatggtggtgtccctgccaattccttccttctcttctgtacagcagaagtaattacaagcacttctcacgaaggcagaagactgatgcaattttcgagtaattgagtgcagttctgggaaaataccacattctttttgactgctgtagtccatatgtgaatactaaatgttaaacttcatcagcgtcagacctattgtatcatattagagaatttgcagactaagaatttatgagaaaatatatgtattcagtagtgcaggcatttattaacaattcttaaaagttttacctgattcagattcacgacttttatttatattctatatttttgaatttcagagtaaaatttgttaacaattttaaaagccaggtaacacctaccagtccagttagcatgatttgctttcagaagtgagctgggttttccaaagtggtataatgtgtgtactgtatattttaacaaagtaatatttttgtattgcatttttctattaaaaaattaacagttaatgtttcagtcaatgtattatctgtagcatttcacaaataatgtttgctttgaaccaaaatgctcagtgcctatcaacatttggactcaagcatcaacaccaaattattcctcccttctcgtataaatagagtgactatccacaggagaaaagtgtgtgctttagtattagaggagataggcagagaagtcttgcttagttccttcgtgcagcttcttgcccctgttgacgtggaatgctgtgtctgctttagcacgcacgctccgaatgactcctggtgctaggccatgctggctgctgtcactgagcgggactcaggccaagaggcgtgacctcgggccagcctgtctgttgtgcagacgcctcctctgcagaacgcatcagtttctattctgcagttgcagagccagccccgcgtgagaacgtgcataatgagtgcacaccatcatgtcaaggtgcatacttagtgagcgccatcctgctgaacgtgtatttcagtgtttcacttactggacggataacaagaaaaaaatcctaacacaggcaggcaccagaaataaatgtctcagcactttacagatgactaaaaatgttaattttatgacttagccaaatatgttctaggttgcatatatcccccatgtgaaagtgatttcttcccaagcttctcaaactgttagctgctgtctgacttcatcaataaagtatttttatttt

SEQ ID NO: 175901 - DNA, 4343 bp, Homo sapiens
  Payload ID: 14534
  Gene Symbol: ARHGEF10
  Gene Name: Rho guanine nucleotide exchange factor (GEF) 10
  ENST ID: ENST00000522435
  CDS Start-End: 1-2967
gcgaaggacggcaccaaggacgggctggagaggaccagggcagccgtgaagaggggccgctccttcatcaggaccaagtctctcatcgcacaggatcacagatcttctcttgaggaagaacagaatttgttcattgatgttgactgcaagcacccggaagccatcttgaccccgatgcccgagggtttatctcagcagcaggttgtaagaagatatatactgggttcagttgtcgacagtgaaaagaactacgtagatgctcttaagaggattttggagcaatatgagaagccgctgtctgagatggagccaaaggttctgagtgagaggaagctgaagacggtgttctaccgagtcaaagagatcctgcagtgccactcgctatttcagatcgcgctggccagccgcgtttccgagtgggactccgtggaaatgataggcgatgtcttcgtggcttcgttttctaagtccatggtgctggatgcatacagtgaatatgtgaacaatttcagcacagccgtggcagtcctcaagaaaacatgtgccacaaagcccgcttttcttgaatttttaaagcaggaacaggaggccagccccgatcgaaccacgctctacagcctgatgatgaagcccatccagaggttcccacagttcatcctcctgctccaggacatgctgaagaacacctccaaaggccaccccgacaggctgcctcttcagatggccctgacagagctcgaaacactagcagagaagttaaatgaaagaaagagagatgctgatcaacgctgtgaagtgaagcaaatagccaaagccataaacgaaagatacctgaacaagcttctcagcagtggaagccgatacctcattcgatcagatgatatgatagaaacagtttacaacgacagaggagagattgttaaaaccaaagaacgccgagtcttcatgttaaatgatgtgttaatgtgtgccaccgtcagctcacgcccctctcatgacagccgtgtgatgagcagccagaggtacttgctgaagtggagcgttccactgggacatgtggacgccatcgagtatggcagcagcgcaggcacgggcgagcacagcaggcaccttgccgttcacccgccggagagcctggccgtggttgctaacgcgaaaccaaacaaagtttacatggggccaggacaactgtatcaagatttacaaaacttgttgcatgacttaaatgtaattggccaaatcactcagctgataggaaaccttaaaggaaactatcagaacttaaaccagtcagtagcccatgactggacatcaggtttacaaaggcttattttgaagaaagaagatgaaatcagagctgcggactgctgcagaattcagttacagcttcccgggaagcaggacaaatctgggcgaccgacgttctttacagctgtgttcaatacgttcacccctgccatcaaggagtcctgggtcaacagcttacagatggccaagctcgccctagaagaggagaaccacatgggctggttctgtgtggaagacgatgggaatcacattaaaaaggagaagcatcctctcctcgtcggacacatgcccgtgatggtggccaagcagcaggagttcaagatcggaagttgcacccatcaaatgggtcagattgccatcgtctcgtttcaaaattccactcccaaagtcattgagtgcttcaacgtggaatctcgcatcctgtgcatgctgtacgttcccgtcgaggagaagcgcagagagcctggggcacccccggaccccgagaccccggccgtgagagcttctgatgtccccacgatctgtgtagggacggaggagggaagcatttccatttataaaagcagtcaaggctccaagaaagtgagacttcagcactttttcactcctgagaagtccacagtcatgagcctggcttgcacgtctcagagcctgtacgctggcctggtcaacggggcagtcgccagctacgccagagccccagatggatcctgggattcagaacctcaaaaagtgatcaagttaggcgtcctaccagttagaagtctactcatgatggaagacacgttgtgggcggcttccggaggtcaagtcttcatcatcagtgtggagactcatgctgtagagggtcagctggaggcccaccaggaggaaggcatggtgatctcccacatggccgtgtccggcgtcgggatctggattgccttcacctcagggtccacgctccgcctttttcacacggaaactctcaagcacctgcaggacatcaacatcgccacccctgttcacaacatgctgccagggcaccagcggctgtcggtgacgagcctgctcgtctgccacggattgctgatggtcggcaccagcctgggagtcctcgtggccctgccggtcccacgtctgcaagggattcccaaagtgaccggaagaggcatggtctcctaccatgcacacaacagtcctgtcaaattcatcgtcctggccacggctctgcacgagaaagacaaggacaaatccagggacagcctggctcctggccccgagcctcaggacgaagaccagaaggacgcacttccgagtggaggagctggttcatctctgagccagggtgaccctgacgcagccatctggttgggagattcgctgggatcgatgactcagaaaagcgacctgtcctcctcatctgggtccctgagcttgtctcacggctccagctctctagagcacagatcagaggacagcaccatctatgatctcctgaaggatcctgtctcgctgagaagcaaagcacgccgggccaagaaagccaaggccagctcggcgctggtggtctgtggagggcagggccaccgccgggtgcacaggaaggcccggcagccccaccaggaagagctggcgccgaccgtcatggtctggcagatccctctgctgaatatataagcaggacggccgccttctgctgtcagaatttgcaatcaagggtgacttctcagctaatcctacagcctgagtggttaagctgtgtctacactggttgggaataaattaaaaacagtatttgggggagaaacgtgcaatagcgtaatggtggtgtccctgccaattccttccttctcttctgtacagcagaagtaattacaagcacttctcacgaaggcagaagactgatgcaattttcgagtaattgagtgcagttctgggaaaataccacattctttttgactgctgtagtccatatgtgaatactaaatgttaaacttcatcagcgtcagacctattgtatcatattagagaatttgcagactaagaatttatgagaaaatatatgtattcagtagtgcaggcatttattaacaattcttaaaagttttacctgattcagattcacgacttttatttatattctatatttttgaatttcagagtaaaatttgttaacaattttaaaagccaggtaacacctaccagtccagttagcatgatttgctttcagaagtgagctgggttttccaaagtggtataatgtgtgtactgtatattttaacaaagtaatatttttgtattgcatttttctattaaaaaattaacagttaatgtttcagtcaatgtattatctgtagcatttcacaaataatgtttgctttgaaccaaaatgctcagtgcctatcaacatttggactcaagcatcaacaccaaattattcctcccttctcgtataaatagagtgactatccacaggagaaaagtgtgtgctttagtattagaggagataggcagagaagtcttgcttagttccttcgtgcagcttcttgcccctgttgacgtggaatgctgtgtctgctttagcacgcacgctccgaatgactcctggtgctaggccatgctggctgctgtcactgagcgggactcaggccaagaggcgtgacctcgggccagcctgtctgttgtgcagacgcctcctctgcagaacgcatcagtttctattctgcagttgcagagccagccccgcgtgagaacgtgcataatgagtgcacaccatcatgtcaaggtgcatacttagtgagcgccatcctgctgaacgtgtatttcagtgtttcacttactggacggataacaagaaaaaaatcctaacacaggcaggcaccagaaataaatgtctcagcactttacagatgactaaaaatgttaattttatgacttagccaaatatgttctaggttgcatatatcccccatgtgaaagtgatttcttcccaagcttctcaaactgttagctgctgtctgacttcatcaataaagtatttttattttaaaatg

SEQ ID NO: 175902 - DNA, 5472 bp, Homo sapiens
  Payload ID: 14534
  Gene Symbol: ARHGEF10
  Gene Name: Rho guanine nucleotide exchange factor (GEF) 10
  Uniprot ID: O15013
  ENST ID: ENST00000520359
  CDS Start-End: 174-4094
gacgcgggggacgcgggggacggcggggaacggcgggggacggcggggaacagcgggggacggcggggaacagcgggggacggcggggaacagcaggggactgcgggtcgcgtcctggccgccgaggagctccttcccttaacagagctgagagaggcatctggagctgcagcatggaccagcgagagcccctgcctcccgctcctgcagaaaatgaaatgaaatatgataccaataataatgaagaggaagagggagaacagttcgattttgacagtggagatgaaatcccagaagcggacagacaggccccatccgcccctgagacaggaggtgctggagccagtgaagcccctgcacccacaggaggtgaggatggagctggagcagaaaccaccccagtggcagagcctactaagctggtgctcccgatgaaagtcaacccatattctgtcatcgacatcacgccattccaggaggaccagccgcccacccccgtgcccagcgctgaggaggagaatgtgggtctccatgtgccctgcgggtacttggtgcctgtaccctgcggctatgcggtgccctccaacctgcccctcctgctgcccgcctactccagcccggtcatcatctgcgccacgtccctggacgaagaagcagaaacaccagaagtcacagaagatcgccagcccaattctctgagttccgaggagcctccaaccagtgaagatcaagtcggtcgagaggacagcgcacttgcccgctgggccgcagacccggccaacacagcctggatggagaatccagaggaagcaatttacgatgacgttccaagggaaaactcagactctgaaccagatgaaatgatttatgatgatgttgagaatggggatgaaggtggaaacagctccttggaatacggatggagttcgagtgaatttgaaagttacgaagagcagagtgactcggagtgcaagaatgggattcccaggtccttcctgcgcagcaaccacaaaaagcaaatgcagaagctcgtgaaggccgcgaaggacggcaccaaggacgggctggagaggaccagggcagccgtgaagaggggccgctccttcatcaggaccaagtctctcatcgcacaggatcacagatcttctcttgaggaagaacagaatttgttcattgatgttgactgcaagcacccggaagccatcttgaccccgatgcccgagggtttatctcagcagcaggttgtaagaagatatatactgggttcagttgtcgacagtgaaaagaactacgtagatgctcttaagaggattttggagcaatatgagaagccgctgtctgagatggagccaaaggttctgagtgagaggaagctgaagacggtgttctaccgagtcaaagagatcctgcagtgccactcgctatttcagatcgcgctggccagccgcgtttccgagtgggactccgtggaaatgataggcgatgtcttcgtggcttcgttttctaagtccatggtgctggatgcatacagtgaatatgtgaacaatttcagcacagccgtggcagtcctcaagaaaacatgtgccacaaagcccgcttttcttgaatttttaaagcaggaacaggaggccagccccgatcgaaccacgctctacagcctgatgatgaagcccatccagaggttcccacagttcatcctcctgctccaggacatgctgaagaacacctccaaaggccaccccgacaggctgcctcttcagatggccctgacagagctcgaaacactagcagagaagttaaatgaaagaaagagagatgctgatcaacgctgtgaagtgaagcaaatagccaaagccataaacgaaagatacctgaacaagcttctcagcagtggaagccgatacctcattcgatcagatgatatgatagaaacagtttacaacgacagaggagagattgttaaaaccaaagaacgccgagtcttcatgttaaatgatgtgttaatgtgtgccaccgtcagctcacgcccctctcatgacagccgtgtgatgagcagccagaggtacttgctgaagtggagcgttccactgggacatgtggacgccatcgagtatggcagcagcgcaggcacgggcgagcacagcaggcaccttgccgttcacccgccggagagcctggccgtggttgctaacgcgaaaccaaacaaagtttacatggggccaggacaactgtatcaagatttacaaaacttgttgcatgacttaaatgtaattggccaaatcactcagctgataggaaaccttaaaggaaactatcagaacttaaaccagtcagtagcccatgactggacatcaggtttacaaaggcttattttgaagaaagaagatgaaatcagagctgcggactgctgcagaattcagttacagcttcccgggaagcaggacaaatctgggcgaccgacgttctttacagctgtgttcaatacgttcacccctgccatcaaggagtcctgggtcaacagcttacagatggccaagctcgccctagaagaggagaaccacatgggctggttctgtgtggaagacgatgggaatcacattaaaaaggagaagcatcctctcctcgtcggacacatgcccgtgatggtggccaagcagcaggagttcaagattgaatgtgctgcttataaccctgaaccttacctaaataatgaaagccagccagattcattttccacggcacatggtttcctgtggatcggaagttgcacccatcaaatgggtcagattgccatcgtctcgtttcaaaattccactcccaaagtcattgagtgcttcaacgtggaatctcgcatcctgtgcatgctgtacgttcccgtcgaggagaagcgcagagagcctggggcacccccggaccccgagaccccggccgtgagagcttctgatgtccccacgatctgtgtagggacggaggagggaagcatttccatttataaaagcagtcaaggctccaagaaagtgagacttcagcactttttcactcctgagaagtccacagtcatgagcctggcttgcacgtctcagagcctgtacgctggcctggtcaacggggcagtcgccagctacgccagagccccagatggatcctgggattcagaacctcaaaaagtgatcaagttaggcgtcctaccagttagaagtctactcatgatggaagacacgttgtgggcggcttccggaggtcaagtcttcatcatcagtgtggagactcatgctgtagagggtcagctggaggcccaccaggaggaaggcatggtgatctcccacatggccgtgtccggcgtcgggatctggattgccttcacctcagggtccacgctccgcctttttcacacggaaactctcaagcacctgcaggacatcaacatcgccacccctgttcacaacatgctgccagggcaccagcggctgtcggtgacgagcctgctcgtctgccacggattgctgatggtcggcaccagcctgggagtcctcgtggccctgccggtcccacgtctgcaagggattcccaaagtgaccggaagaggcatggtctcctaccatgcacacaacagtcctgtcaaattcatcgtcctggccacggctctgcacgagaaagacaaggacaaatccagggacagcctggctcctggccccgagcctcaggacgaagaccagaaggacgcacttccgagtggaggagctggttcatctctgagccagggtgaccctgacgcagccatctggttgggagattcgctgggatcgatgactcagaaaagcgacctgtcctcctcatctgggtccctgagcttgtctcacggctccagctctctagagcacagatcagaggacagcaccatctatgatctcctgaaggatcctgtctcgctgagaagcaaagcacgccgggccaagaaagccaaggccagctcggcgctggtggtctgtggagggcagggccaccgccgggtgcacaggaaggcccggcagccccaccaggaagagctggcgccgaccgtcatggtctggcagatccctctgctgaatatataagcaggacggccgccttctgctgtcagaatttgcaatcaagggtgacttctcagctaatcctacagcctgagtggttaagctgtgtctacactggttgggaataaattaaaaacagtatttgggggagaaacgtgcaatagcgtaatggtggtgtccctgccaattccttccttctcttctgtacagcagaagtaattacaagcacttctcacgaaggcagaagactgatgcaattttcgagtaattgagtgcagttctgggaaaataccacattctttttgactgctgtagtccatatgtgaatactaaatgttaaacttcatcagcgtcagacctattgtatcatattagagaatttgcagactaagaatttatgagaaaatatatgtattcagtagtgcaggcatttattaacaattcttaaaagttttacctgattcagattcacgacttttatttatattctatatttttgaatttcagagtaaaatttgttaacaattttaaaagccaggtaacacctaccagtccagttagcatgatttgctttcagaagtgagctgggttttccaaagtggtataatgtgtgtactgtatattttaacaaagtaatatttttgtattgcatttttctattaaaaaattaacagttaatgtttcagtcaatgtattatctgtagcatttcacaaataatgtttgctttgaaccaaaatgctcagtgcctatcaacatttggactcaagcatcaacaccaaattattcctcccttctcgtataaatagagtgactatccacaggagaaaagtgtgtgctttagtattagaggagataggcagagaagtcttgcttagttccttcgtgcagcttcttgcccctgttgacgtggaatgctgtgtctgctttagcacgcacgctccgaatgactcctggtgctaggccatgctggctgctgtcactgagcgggactcaggccaagaggcgtgacctcgggccagcctgtctgttgtgcagacgcctcctctgcagaacgcatcagtttctattctgcagttgcagagccagccccgcgtgagaacgtgcataatgagtgcacaccatcatgtcaaggtgcatacttagtgagcgccatcctgctgaacgtgtatttcagtgtttcacttactggacggataacaagaaaaaaatcctaacacaggcaggcaccagaaataaatgtctcagcactttacagatgactaaaaatgttaattttatgacttagccaaatatgttctaggttgcatatatcccccatgtgaaagtgatttcttcccaagcttctcaaactgttagctgctgtctgacttcatcaataaagtatttttattttaaaatgca

SEQ ID NO: 175903 - DNA, 5648 bp, Homo sapiens
  Payload ID: 14534
  Gene Symbol: ARHGEF10
  Gene Name: Rho guanine nucleotide exchange factor (GEF) 10
  Uniprot ID: O15013
  ENST ID: ENST00000518288
  CDS Start-End: 164-4270
gaacggcgggggacggcggggaacagcgggggacggcggggaacagcgggggacggcggggaacagcaggggactgcgggtcgcgtcctggccgccgagcatttatttgctggctttagcagccaacatcggcagttacggatgcataactctttatagacagatgagacctccaggatttctcagcagagctccttcccttaacagagctgagagaggcatctggagctgcagcatggaccagcgagagcccctgcctcccgctcctgcagaaaatgaaatgaaatatgataccaataataatgaagaggaagagggagaacagttcgattttgacagtggagatgaaatcccagaagcggacagacaggccccatccgcccctgagacaggaggtgctggagccagtgaagcccctgcacccacaggaggtgaggatggagctggagcagaaaccaccccagtggcagagcctactaagctggtgctcccgatgaaagtcaacccatattctgtcatcgacatcacgccattccaggaggaccagccgcccacccccgtgcccagcgctgaggaggagaatgtgggtctccatgtgccctgcgggtacttggtgcctgtaccctgcggctatgcggtgccctccaacctgcccctcctgctgcccgcctactccagcccggtcatcatctgcgccacgtccctggacgaagaagcagaaacaccagaagtcacagaagatcgccagcccaattctctgagttccgaggagcctccaaccagtgaagatcaagtcggtcgagaggacagcgcacttgcccgctgggccgcagacccggccaacacagcctggatggagaatccagaggaagcaatttacgatgacgttccaagggaaaactcagactctgaaccagatgaaatgatttatgatgatgttgagaatggggatgaaggtggaaacagctccttggaatacggatggagttcgagtgaatttgaaagttacgaagagcagagtgactcggagtgcaagaatgggattcccaggtccttcctgcgcagcaaccacaaaaagcaactttctcatgacctaacccgtttaaaggagcactatgagaaaaagatgagagatttgatggcaagcacggtgggcgtggtggagattcagcagctcaggcagaagcatgaactgaagatgcagaagctcgtgaaggccgcgaaggacggcaccaaggacgggctggagaggaccagggcagccgtgaagaggggccgctccttcatcaggaccaagtctctcatcgcacaggatcacagatcttctcttgaggaagaacagaatttgttcattgatgttgactgcaagcacccggaagccatcttgaccccgatgcccgagggtttatctcagcagcaggttgtaagaagatatatactgggttcagttgtcgacagtgaaaagaactacgtagatgctcttaagaggattttggagcaatatgagaagccgctgtctgagatggagccaaaggttctgagtgagaggaagctgaagacggtgttctaccgagtcaaagagatcctgcagtgccactcgctatttcagatcgcgctggccagccgcgtttccgagtgggactccgtggaaatgataggcgatgtcttcgtggcttcgttttctaagtccatggtgctggatgcatacagtgaatatgtgaacaatttcagcacagccgtggcagtcctcaagaaaacatgtgccacaaagcccgcttttcttgaatttttaaaggaacaggaggccagccccgatcgaaccacgctctacagcctgatgatgaagcccatccagaggttcccacagttcatcctcctgctccaggacatgctgaagaacacctccaaaggccaccccgacaggctgcctcttcagatggccctgacagagctcgaaacactagcagagaagttaaatgaaagaaagagagatgctgatcaacgctgtgaagtgaagcaaatagccaaagccataaacgaaagatacctgaacaagcttctcagcagtggaagccgatacctcattcgatcagatgatatgatagaaacagtttacaacgacagaggagagattgttaaaaccaaagaacgccgagtcttcatgttaaatgatgtgttaatgtgtgccaccgtcagctcacgcccctctcatgacagccgtgtgatgagcagccagaggtacttgctgaagtggagcgttccactgggacatgtggacgccatcgagtatggcagcagcgcaggcacgggcgagcacagcaggcaccttgccgttcacccgccggagagcctggccgtggttgctaacgcgaaaccaaacaaagtttacatggggccaggacaactgtatcaagatttacaaaacttgttgcatgacttaaatgtaattggccaaatcactcagctgataggaaaccttaaaggaaactatcagaacttaaaccagtcagtagcccatgactggacatcaggtttacaaaggcttattttgaagaaagaagatgaaatcagagctgcggactgctgcagaattcagttacagcttcccgggaagcaggacaaatctgggcgaccgacgttctttacagctgtgttcaatacgttcacccctgccatcaaggagtcctgggtcaacagcttacagatggccaagctcgccctagaagaggagaaccacatgggctggttctgtgtggaagacgatgggaatcacattaaaaaggagaagcatcctctcctcgtcggacacatgcccgtgatggtggccaagcagcaggagttcaagattgaatgtgctgcttataaccctgaaccttacctaaataatgaaagccagccagattcattttccacggcacatggtttcctgtggatcggaagttgcacccatcaaatgggtcagattgccatcgtctcgtttcaaaattccactcccaaagtcattgagtgcttcaacgtggaatctcgcatcctgtgcatgctgtacgttcccgtcgaggagaagcgcagagagcctggggcacccccggaccccgagaccccggccgtgagagcttctgatgtccccacgatctgtgtagggacggaggagggaagcatttccatttataaaagcagtcaaggctccaagaaagtgagacttcagcactttttcactcctgagaagtccacagtcatgagcctggcttgcacgtctcagagcctgtacgctggcctggtcaacggggcagtcgccagctacgccagagccccagatggatcctgggattcagaacctcaaaaagtgatcaagttaggcgtcctaccagttagaagtctactcatgatggaagacacgttgtgggcggcttccggaggtcaagtcttcatcatcagtgtggagactcatgctgtagagggtcagctggaggcccaccaggaggaaggcatggtgatctcccacatggccgtgtccggcgtcgggatctggattgccttcacctcagggtccacgctccgcctttttcacacggaaactctcaagcacctgcaggacatcaacatcgccacccctgttcacaacatgctgccagggcaccagcggctgtcggtgacgagcctgctcgtctgccacggattgctgatggtcggcaccagcctgggagtcctcgtggccctgccggtcccacgtctgcaagggattcccaaagtgaccggaagaggcatggtctcctaccatgcacacaacagtcctgtcaaattcatcgtcctggccacggctctgcacgagaaagacaaggacaaatccagggacagcctggctcctggccccgagcctcaggacgaagaccagaaggacgcacttccgagtggaggagctggttcatctctgagccagggtgaccctgacgcagccatctggttgggagattcgctgggatcgatgactcagaaaagcgacctgtcctcctcatctgggtccctgagcttgtctcacggctccagctctctagagcacagatcagaggacagcaccatctatgatctcctgaaggatcctgtctcgctgagaagcaaagcacgccgggccaagaaagccaaggccagctcggcgctggtggtctgtggagggcagggccaccgccgggtgcacaggaaggcccggcagccccaccaggaagagctggcgccgaccgtcatggtctggcagatccctctgctgaatatataagcaggacggccgccttctgctgtcagaatttgcaatcaagggtgacttctcagctaatcctacagcctgagtggttaagctgtgtctacactggttgggaataaattaaaaacagtatttgggggagaaacgtgcaatagcgtaatggtggtgtccctgccaattccttccttctcttctgtacagcagaagtaattacaagcacttctcacgaaggcagaagactgatgcaattttcgagtaattgagtgcagttctgggaaaataccacattctttttgactgctgtagtccatatgtgaatactaaatgttaaacttcatcagcgtcagacctattgtatcatattagagaatttgcagactaagaatttatgagaaaatatatgtattcagtagtgcaggcatttattaacaattcttaaaagttttacctgattcagattcacgacttttatttatattctatatttttgaatttcagagtaaaatttgttaacaattttaaaagccaggtaacacctaccagtccagttagcatgatttgctttcagaagtgagctgggttttccaaagtggtataatgtgtgtactgtatattttaacaaagtaatatttttgtattgcatttttctattaaaaaattaacagttaatgtttcagtcaatgtattatctgtagcatttcacaaataatgtttgctttgaaccaaaatgctcagtgcctatcaacatttggactcaagcatcaacaccaaattattcctcccttctcgtataaatagagtgactatccacaggagaaaagtgtgtgctttagtattagaggagataggcagagaagtcttgcttagttccttcgtgcagcttcttgcccctgttgacgtggaatgctgtgtctgctttagcacgcacgctccgaatgactcctggtgctaggccatgctggctgctgtcactgagcgggactcaggccaagaggcgtgacctcgggccagcctgtctgttgtgcagacgcctcctctgcagaacgcatcagtttctattctgcagttgcagagccagccccgcgtgagaacgtgcataatgagtgcacaccatcatgtcaaggtgcatacttagtgagcgccatcctgctgaacgtgtatttcagtgtttcacttactggacggataacaagaaaaaaatcctaacacaggcaggcaccagaaataaatgtctcagcactttacagatgactaaaaatgttaattttatgacttagccaaatatgttctaggttgcatatatcccccatgtgaaagtgatttcttcccaagcttctcaaactgttagctgctgtctgacttcatcaataaagtatttttattttaaaatgca

SEQ ID NO: 175904 - DNA, 2221 bp, Homo sapiens; identical to SEQ ID NO: 175899
  Payload ID: 14534
  Gene Symbol: ARHGEF10
  Gene Name: Rho guanine nucleotide exchange factor (GEF) 10
  ENST ID: ENST00000616718
  CDS Start-End: 488-1630

SEQ ID NO: 175905 - DNA, 5590 bp, Homo sapiens; identical to SEQ ID NO: 175898
  Payload ID: 14534
  Gene Symbol: ARHGEF10
  Gene Name: Rho guanine nucleotide exchange factor (GEF) 10
  Uniprot ID: O15013
  ENST ID: ENST00000619613
  CDS Start-End: 186-4220

SEQ ID NO: 175906 - DNA, 5480 bp, Homo sapiens; identical to SEQ ID NO: 175900
  Payload ID: 14534
  Gene Symbol: ARHGEF10
  Gene Name: Rho guanine nucleotide exchange factor (GEF) 10
  Uniprot ID: O15013
  ENST ID: ENST00000610399
  CDS Start-End: 1-4110

SEQ ID NO: 175907 - DNA, 5472 bp, Homo sapiens; identical to SEQ ID NO: 175902
  Payload ID: 14534
  Gene Symbol: ARHGEF10
  Gene Name: Rho guanine nucleotide exchange factor (GEF) 10
  Uniprot ID: O15013
  ENST ID: ENST00000631758
  CDS Start-End: 174-4094

SEQ ID NO: 175908 - DNA, 4343 bp, Homo sapiens; identical to SEQ ID NO: 175901
  Payload ID: 14534
  Gene Symbol: ARHGEF10
  Gene Name: Rho guanine nucleotide exchange factor (GEF) 10
  ENST ID: ENST00000634038
  CDS Start-End: 1-2967

SEQ ID NO: 175909 - DNA, 5648 bp, Homo sapiens; identical to SEQ ID NO: 175903
  Payload ID: 14534
  Gene Symbol: ARHGEF10
  Gene Name: Rho guanine nucleotide exchange factor (GEF) 10
  Uniprot ID: O15013
  ENST ID: ENST00000633616
  CDS Start-End: 164-4270

SEQ ID NO: 175910 - DNA, 3018 bp, Homo sapiens
  Payload ID: 14535
  Gene Symbol: ARHGEF10L
  Gene Name: Rho guanine nucleotide exchange factor (GEF) 10-like
  Uniprot ID: Q9HCE6
  ENST ID: ENST00000167825
  CDS Start-End: 1-1836
aagcccatccagaggttcccacagttcatactcctgcttcaggacatgctgaagaacacccccaggggccatccggacaggctgtcgctgcagctggccctcacagagctggagacgctggctgagaagctgaacgagcagaagcggctggctgaccaggtggctgagatccagcagctgaccaagagcgtcagtgaccgcagcagcctcaacaagctgttgacctcaggccagcggcagctgctcctgtgtgagacgttgacggagaccgtgtacggtgaccgcgggcagctaattaagtccaaggagcgtcgggtcttcctgctcaacgacatgcttgtctgtgccaacatcaacttcaagggccagctggagatcagcagcctggtgcccctggggcccaagtatgtggtgaagtggaacacggcgctgccccaggtgcaggtggtggaggtgggccaggacggtggcacctatgacaaggacaatgtgctcatccagcactcaggcgccaagaaggcctctgcctcagggcaggctcagaataaggtgtacctcggccccccacgcctcttccaggagctgcaggacctgcagaaggacctggccgtggtggagcagatcacgcttctcatcagcacgctgcacggcacctaccagaacctgaacatgactgtggctcaagactggtgcctggccctgcagaggctgatgcgggtgaaggaggaagagatccactcggccaacaagtgccgtctcaggctcctgcttcctgggaaacccgacaagtccggccgccccattagcttcatggtggttttcatcacccccaaccccctgagcaagatttcctgggtcaacaggttacatttggccaaaatcggactccgggaggagaaccagccaggctggctatgcccggatgaggacaagaagagcaaagccccattctggtgcccgatcctggcctgctgcatccctgccttctcctcccgggcactcagcctgcagcttggggccctggtccacagtcctgtcaactgtcccctgctgggtttctcagcagtcagcacctcccttccacagggctacctctgggtcgggggcggacaggaaggcgcagggggccaggtggaaatcttttccttgaaccggccctcgccccgcaccgtcaagtccttcccactggcagcccctgtgctctgcatggagtatatcccggagctggaggaggaggcggagagcagagacgagagcccgacagttgctgacccctcggccacggtgcatccaaccatctgcctcgggctccaggatggcagcatcctcctctacagcagtgtggacactggcacccagtgcctggtgagctgcaggagcccaggtctgcagcctgtgctctgcctgcgacacagccccttccacctgctcgctggcctgcaggatgggacccttgctgcttaccctcggaccagcggaggtgtcctgtgggacctggagagccctcccgtgtgcctgactgtggggcccgggcctgtccgcaccctgttgagcctggaggatgccgtgtgggccagctgtgggccccgggtcactgtcctggaagccaccaccctgcagcctcagcaaagcttcgaggcgcaccaggacgaggcagtgagcgtgacacacatggtgaaggcgggcagcggcgtctggatggccttctcctccggcacctccatccgcctcttccacactgagaccctggagcatctgcaagagatcaacatcgccaccaggaccaccttcctcctgccagacaggtcattaataaaatgttctccaagagcctgagctttttaaagttgtatatctccagatagatggcttgggccagaagcacttgtgtgtcaccagcctcctgatctgccagggtctgctctgggtgggcactgaccagggtgtcatcgtcctgctgcccgtgcctcggctggaaggcatccccaagatcacagggaaaggcatggtctcactcaacgggcactgtgggcctgtggccttcctggctgtggctaccagcatcctggcccctgacatcctgcggagtgaccaggaggaggctgaggggccccgggctgaggaggacaagccagacgggcaggcacacgagcccatgcccgatagccacgtgggccgagagctgacccgcaagaagggcatcctcttgcagtaccgcctgcgctccaccgcacacctcccgggcccgctgctctccatgcgggagccggcgcctgctgatggcgcagctttggagcacagcgaggaggacggctccatttacgagatggccgacgaccccgacatctgggtgcgcagccggccctgcgcccgcgacgcccaccgcaaggagatttgctctgtggccatcatctccggcgggcagggctaccgcaactttggcagcgctctgggcagcagtgggaggcaggccccgtgtggggagacggacagcaccctcctcatctggcaggtgcccttgatgctatagcgcctcccctctcccctcagagggcacagctgcaggcctgaccaaggccacgcccggctctcgtgctctaggacctgcacgggacttgtggatgggcctggactctccagaaactacttgggcagagcaaaggaaaacctcttgttttaaaaaaatttttttcagagtgttttggggaggagttttagggcttggggagagggaggacacatctggaggaaatggccttctttttaaaagcaaaaaacacaaaacctcacaactgcctggcaagcccagtatcacttgtttgggccctagcgggactccaaggcagccacacgcccctcctggaagggtgtgtgcgtgtgagtgtgtgcgagtgtgtgggctggtgtgtgaatatctataaataagtatatatggtgtatattatatgtgtataaataaagtctgtacatattggagctctgggagatgctggaataaaagacaagagttacatctgg

SEQ ID NO: 175911 - DNA, 4488 bp, Homo sapiens
  Payload ID: 14535
  Gene Symbol: ARHGEF10L
  Gene Name: Rho guanine nucleotide exchange factor (GEF) 10-like
  Uniprot ID: Q9HCE6
  ENST ID: ENST00000361221
  CDS Start-End: 160-3999
gcgccgtcccggccatgggcgcccgcggcggcctgcggagctggaggcgcggcgccggccgccaggcgcctttgtgagcggcgcggacgacaaaggcgcgggcccgggcagccgaggtgtgtagctgggacggtgctggtctgagctggaccttgtctgatggcttcctccaaccctcctccacagcctgccataggagatcagctggttccaggagtcccaggcccctcctctgaggcagaggacgacccaggagaggcgtttgagtttgatgacagtgatgatgaagaggacaccagcgcagccctgggcgtccccagccttgctcctgagagggacacagaccccccactgatccacttggactccatccctgtcactgacccagacccagcagctgctccacccggcacaggggtgccagcctgggtgagcaatggggatgcagcggacgcagccttctccggggcccggcactccagctggaagcggaagagttcccgtcgcattgaccggttcactttccccgccctggaagaggatgtgatttatgacgacgtcccctgcgagagcccagatgcgcatcagcccggggcagagaggaacctgctctacgaggatgcgcaccgggctggggcccctcggcaggcggaggacctaggctggagctccagtgagttcgagagctacagcgaggactcgggggaggaggccaagccggaggtcgaggtcgagcccgccaagcaccgagtgtccttccagcccaagctttctccagacctgactaggctaaaggagagatacgccaggactaagagagacatcttggctttgagagttggggggagagacatgcaggagctgaagcacaagtacgattgtaagatgacccagctcatgaaggccgccaagagcgggaccaaggatgggctggagaagacacggatggccgtgatgcgcaaagtctccttcctgcacaggaaggacgtcctcggtgactcggaggaggaggacatggggctcctggaggtcagcgtttcggacatcaagcccccagccccagagctgggccccatgccagagggcctgagccctcagcaggtggtccggaggcatatcctgggctccatcgtgcagagcgaaggcagctacgtggagtctctgaagcggatactccaggactaccgcaaccccctgatggagatggagcccaaggcgctgagcgcccgcaagtgccaggtggtgttcttccgcgtgaaggagatcctgcactgccactccatgttccagatcgccctgtcctcccgcgtggctgagtgggattccaccgagaagatcggggacctcttcgtggcctcgttttccaagtccatggtgctagatgtgtacagtgactacgtgaacaacttcaccagtgccatgtccatcatcaagaaggcctgcctcaccaagcctgccttcctcgagttcctcaagcgacggcaggtgtgcagcccagaccgtgtcaccctctacgggctgatggtcaagcccatccagaggttcccacagttcatactcctgcttcaggacatgctgaagaacacccccaggggccatccggacaggctgtcgctgcagctggccctcacagagctggagacgctggctgagaagctgaacgagcagaagcggctggctgaccaggtggctgagatccagcagctgaccaagagcgtcagtgaccgcagcagcctcaacaagctgttgacctcaggccagcggcagctgctcctgtgtgagacgttgacggagaccgtgtacggtgaccgcgggcagctaattaagtccaaggagcgtcgggtcttcctgctcaacgacatgcttgtctgtgccaacatcaacttcaagcctgccaaccacaggggccagctggagatcagcagcctggtgcccctggggcccaagtatgtggtgaagtggaacacggcgctgccccaggtgcaggtggtggaggtgggccaggacggtggcacctatgacaaggacaatgtgctcatccagcactcaggcgccaagaaggcctctgcctcagggcaggctcagaataaggtgtacctcggccccccacgcctcttccaggagctgcaggacctgcagaaggacctggccgtggtggagcagatcacgcttctcatcagcacgctgcacggcacctaccagaacctgaacatgactgtggctcaagactggtgcctggccctgcagaggctgatgcgggtgaaggaggaagagatccactcggccaacaagtgccgtctcaggctcctgcttcctgggaaacccgacaagtccggccgccccattagcttcatggtggttttcatcacccccaaccccctgagcaagatttcctgggtcaacaggttacatttggccaaaatcggactccgggaggagaaccagccaggctggctatgcccggatgaggacaagaagagcaaagccccattctggtgcccgatcctggcctgctgcatccctgccttctcctcccgggcactcagcctgcagcttggggccctggtccacagtcctgtcaactgtcccctgctgggtttctcagcagtcagcacctcccttccacagggctacctctgggtcgggggcggacaggaaggcgcagggggccaggtggaaatcttttccttgaaccggccctcgccccgcaccgtcaagtccttcccactggcagcccctgtgctctgcatggagtatatcccggagctggaggaggaggcggagagcagagacgagagcccgacagttgctgacccctcggccacggtgcatccaaccatctgcctcgggctccaggatggcagcatcctcctctacagcagtgtggacactggcacccagtgcctggtgagctgcaggagcccaggtctgcagcctgtgctctgcctgcgacacagccccttccacctgctcgctggcctgcaggatgggacccttgctgcttaccctcggaccagcggaggtgtcctgtgggacctggagagccctcccgtgtgcctgactgtggggcccgggcctgtccgcaccctgttgagcctggaggatgccgtgtgggccagctgtgggccccgggtcactgtcctggaagccaccaccctgcagcctcagcaaagcttcgaggcgcaccaggacgaggcagtgagcgtgacacacatggtgaaggcgggcagcggcgtctggatggccttctcctccggcacctccatccgcctcttccacactgagaccctggagcatctgcaagagatcaacatcgccaccaggaccaccttcctcctgccaggccagaagcacttgtgtgtcaccagcctcctgatctgccagggtctgctctgggtgggcactgaccagggtgtcatcgtcctgctgcccgtgcctcggctggaaggcatccccaagatcacagggaaaggcatggtctcactcaacgggcactgtgggcctgtggccttcctggctgtggctaccagcatcctggcccctgacatcctgcggagtgaccaggaggaggctgaggggccccgggctgaggaggacaagccagacgggcaggcacacgagcccatgcccgatagccacgtgggccgagagctgacccgcaagaagggcatcctcttgcagtaccgcctgcgctccaccgcacacctcccgggcccgctgctctccatgcgggagccggcgcctgctgatggcgcagctttggagcacagcgaggaggacggctccatttacgagatggccgacgaccccgacatctgggtgcgcagccggccctgcgcccgcgacgcccaccgcaaggagatttgctctgtggccatcatctccggcgggcagggctaccgcaactttggcagcgctctgggcagcagtgggaggcaggccccgtgtggggagacggacagcaccctcctcatctggcaggtgcccttgatgctatagcgcctcccctctcccctcagagggcacagctgcaggcctgaccaaggccacgcccggctctcgtgctctaggacctgcacgggacttgtggatgggcctggactctccagaaactacttgggcagagcaaaggaaaacctcttgttttaaaaaaatttttttcagagtgttttggggaggagttttagggcttggggagagggaggacacatctggaggaaatggccttctttttaaaagcaaaaaacacaaaacctcacaactgcctggcaagcccagtatcacttgtttgggccctagcgggactccaaggcagccacacgcccctcctggaagggtgtgtgcgtgtgagtgtgtgcgagtgtgtgggctggtgtgtgaatatctataaataagtatatatggtgtatattatatgtgtataaataaagtctgtacatattggagctctgggagatgctggaataaaagacaagagttacatctgga

SEQ ID NO: 175912 - DNA, 3685 bp, Homo sapiens
  Payload ID: 14535
  Gene Symbol: ARHGEF10L
  Gene Name: Rho guanine nucleotide exchange factor (GEF) 10-like
  ENST ID: ENST00000375408
  CDS Start-End: 39-3197
attaatagccgtggcagggctcgaatcacaggccaagaatgttacccagcagctcgtgggggaagaggaagctgcgaggcaggctggggtgggtgcggagtgatgcccggggcgtgatgtgggcccggcaggagggtctgcaccacccccacccccacgccgtcatccgctgtccctcctcctcctcctcctctgtctcctgctcaggtgactcggaggaggaggacatggggctcctggaggtcagcgtttcggacatcaagcccccagccccagagctgggccccatgccagagggcctgagccctcagcaggtggtccggaggcatatcctgggctccatcgtgcagagcgaaggcagctacgtggagtctctgaagcggatactccaggactaccgcaaccccctgatggagatggagcccaaggcgctgagcgcccgcaagtgccaggtggtgttcttccgcgtgaaggagatcctgcactgccactccatgttccagatcgccctgtcctcccgcgtggctgagtgggattccaccgagaagatcggggacctcttcgtggcctcgttttccaagtccatggtgctagatgtgtacagtgactacgtgaacaacttcaccagtgccatgtccatcatcaagaaggcctgcctcaccaagcctgccttcctcgagttcctcaagcgacggcaggtgtgcagcccagaccgtgtcaccctctacgggctgatggtcaagcccatccagaggttcccacagttcatactcctgcttcaggacatgctgaagaacacccccaggggccatccggacaggctgtcgctgcagctggccctcacagagctggagacgctggctgagaagctgaacgagcagaagcggctggctgaccaggtggctgagatccagcagctgaccaagagcgtcagtgaccgcagcagcctcaacaagctgttgacctcaggccagcggcagctgctcctgtgtgagacgttgacggagaccgtgtacggtgaccgcgggcagctaattaagtccaaggagcgtcgggtcttcctgctcaacgacatgcttgtctgtgccaacatcaacttcaagggccagctggagatcagcagcctggtgcccctggggcccaagtatgtggtgaagtggaacacggcgctgccccaggtgcaggtggtggaggtgggccaggacggtggcacctatgacaaggacaatgtgctcatccagcactcaggcgccaagaaggcctctgcctcagggcaggctcagaataaggtgtacctcggccccccacgcctcttccaggagctgcaggacctgcagaaggacctggccgtggtggagcagatcacgcttctcatcagcacgctgcacggcacctaccagaacctgaacatgactgtggctcaagactggtgcctggccctgcagaggctgatgcgggtgaaggaggaagagatccactcggccaacaagtgccgtctcaggctcctgcttcctgggaaacccgacaagtccggccgccccattagcttcatggtggttttcatcacccccaaccccctgagcaagatttcctgggtcaacaggttacatttggccaaaatcggactccgggaggagaaccagccaggctggctatgcccggatgaggacaagaagagcaaagccccattctggtgcccgatcctggcctgctgcatccctgccttctcctcccgggcactcagcctgcagcttggggccctggtccacagtcctgtcaactgtcccctgctgggtttctcagcagtcagcacctcccttccacagggctacctctgggtcgggggcggacaggaaggcgcagggggccaggtggaaatcttttccttgaaccggccctcgccccgcaccgtcaagtccttcccactggcagcccctgtgctctgcatggagtatatcccggagctggaggaggaggcggagagcagagacgagagcccgacagttgctgacccctcggccacggtgcatccaaccatctgcctcgggctccaggatggcagcatcctcctctacagcagtgtggacactggcacccagtgcctggtgagctgcaggagcccaggtctgcagcctgtgctctgcctgcgacacagccccttccacctgctcgctggcctgcaggatgggacccttgctgcttaccctcggaccagcggaggtgtcctgtgggacctggagagccctcccgtgtgcctgactgtggggcccgggcctgtccgcaccctgttgagcctggaggatgccgtgtgggccagctgtgggccccgggtcactgtcctggaagccaccaccctgcagcctcagcaaagcttcgaggcgcaccaggacgaggcagtgagcgtgacacacatggtgaaggcgggcagcggcgtctggatggccttctcctccggcacctccatccgcctcttccacactgagaccctggagcatctgcaagagatcaacatcgccaccaggaccaccttcctcctgccaggccagaagcacttgtgtgtcaccagcctcctgatctgccagggtctgctctgggtgggcactgaccagggtgtcatcgtcctgctgcccgtgcctcggctggaaggcatccccaagatcacagggaaaggcatggtctcactcaacgggcactgtgggcctgtggccttcctggctgtggctaccagcatcctggcccctgacatcctgcggagtgaccaggaggaggctgaggggccccgggctgaggaggacaagccagacgggcaggcacacgagcccatgcccgatagccacgtgggccgagagctgacccgcaagaagggcatcctcttgcagtaccgcctgcgctccaccgcacacctcccgggcccgctgctctccatgcgggagccggcgcctgctgatggcgcagctttggagcacagcgaggaggacggctccatttacgagatggccgacgaccccgacatctgggtgcgcagccggccctgcgcccgcgacgcccaccgcaaggagatttgctctgtggccatcatctccggcgggcagggctaccgcaactttggcagcgctctgggcagcagtgggaggcaggccccgtgtggggagacggacagcaccctcctcatctggcaggtgcccttgatgctatagcgcctcccctctcccctcagagggcacagctgcaggcctgaccaaggccacgcccggctctcgtgctctaggacctgcacgggacttgtggatgggcctggactctccagaaactacttgggcagagcaaaggaaaacctcttgttttaaaaaaatttttttcagagtgttttggggaggagttttagggcttggggagagggaggacacatctggaggaaatggccttctttttaaaagcaaaaaacacaaaacctcacaactgcctggcaagcccagtatcacttgtttgggccctagcgggactccaaggcagccacacgcccctcctggaagggtgtgtgcgtgtgagtgtgtgcgagtgtgtgggctggtgtgtgaatatctataaataagtatatatggtgtatattatatgtgtataaataaagtctgtacatattggagctctgggagatgctggaataaaagacaagagttacatctgg

SEQ ID NO: 175913 - DNA, 4035 bp, Homo sapiens
  Payload ID: 14535
  Gene Symbol: ARHGEF10L
  Gene Name: Rho guanine nucleotide exchange factor (GEF) 10-like
  Uniprot ID: Q9HCE6
  ENST ID: ENST00000375415
  CDS Start-End: 44-3766
gtgtgtagctgggacggtgctggtctgagctggaccttgtctgatggcttcctccaaccctcctccacagcctgccataggagatcagctggttccaggagtcccaggcccctcctctgaggcagaggacgacccaggagaggcgtttgagtttgatgacagtgatgatgaagaggacaccagcgcagccctgggcgtccccagccttgctcctgagagggacacagaccccccactgatccacttggactccatccctgtcactgacccagacccagcagctgctccacccggcacaggggtgccagcctgggtgagcaatggggatgcagcggacgcagccttctccggggcccggcactccagctggaagcggaagagttcccgtcgcattgaccggttcactttccccgccctggaagaggatgtgatttatgacgacgtcccctgcgagagcccagatgcgcatcagcccggggcagagaggaacctgctctacgaggatgcgcaccgggctggggcccctcggcaggcggaggacctaggctggagctccagtgagttcgagagctacagcgaggactcgggggaggaggccaagccggaggtcgaggtcgagcccgccaagcaccgagtgtccttccagcccaagatgacccagctcatgaaggccgccaagagcgggaccaaggatgggctggagaagacacggatggccgtgatgcgcaaagtctccttcctgcacaggaaggacgtcctcggtgactcggaggaggaggacatggggctcctggaggtcagcgtttcggacatcaagcccccagccccagagctgggccccatgccagagggcctgagccctcagcaggtggtccggaggcatatcctgggctccatcgtgcagagcgaaggcagctacgtggagtctctgaagcggatactccaggactaccgcaaccccctgatggagatggagcccaaggcgctgagcgcccgcaagtgccaggtggtgttcttccgcgtgaaggagatcctgcactgccactccatgttccagatcgccctgtcctcccgcgtggctgagtgggattccaccgagaagatcggggacctcttcgtggcctcgttttccaagtccatggtgctagatgtgtacagtgactacgtgaacaacttcaccagtgccatgtccatcatcaagaaggcctgcctcaccaagcctgccttcctcgagttcctcaagcgacggcaggtgtgcagcccagaccgtgtcaccctctacgggctgatggtcaagcccatccagaggttcccacagttcatactcctgcttcaggacatgctgaagaacacccccaggggccatccggacaggctgtcgctgcagctggccctcacagagctggagacgctggctgagaagctgaacgagcagaagcggctggctgaccaggtggctgagatccagcagctgaccaagagcgtcagtgaccgcagcagcctcaacaagctgttgacctcaggccagcggcagctgctcctgtgtgagacgttgacggagaccgtgtacggtgaccgcgggcagctaattaagtccaaggagcgtcgggtcttcctgctcaacgacatgcttgtctgtgccaacatcaacttcaagcctgccaaccacaggggccagctggagatcagcagcctggtgcccctggggcccaagtatgtggtgaagtggaacacggcgctgccccaggtgcaggtggtggaggtgggccaggacggtggcacctatgacaaggacaatgtgctcatccagcactcaggcgccaagaaggcctctgcctcagggcaggctcagaataaggtgtacctcggccccccacgcctcttccaggagctgcaggacctgcagaaggacctggccgtggtggagcagatcacgcttctcatcagcacgctgcacggcacctaccagaacctgaacatgactgtggctcaagactggtgcctggccctgcagaggctgatgcgggtgaaggaggaagagatccactcggccaacaagtgccgtctcaggctcctgcttcctgggaaacccgacaagtccggccgccccattagcttcatggtggttttcatcacccccaaccccctgagcaagatttcctgggtcaacaggttacatttggccaaaatcggactccgggaggagaaccagccaggctggctatgcccggatgaggacaagaagagcaaagccccattctggtgcccgatcctggcctgctgcatccctgccttctcctcccgggcactcagcctgcagcttggggccctggtccacagtcctgtcaactgtcccctgctgggtttctcagcagtcagcacctcccttccacagggctacctctgggtcgggggcggacaggaaggcgcagggggccaggtggaaatcttttccttgaaccggccctcgccccgcaccgtcaagtccttcccactggcagcccctgtgctctgcatggagtatatcccggagctggaggaggaggcggagagcagagacgagagcccgacagttgctgacccctcggccacggtgcatccaaccatctgcctcgggctccaggatggcagcatcctcctctacagcagtgtggacactggcacccagtgcctggtgagctgcaggagcccaggtctgcagcctgtgctctgcctgcgacacagccccttccacctgctcgctggcctgcaggatgggacccttgctgcttaccctcggaccagcggaggtgtcctgtgggacctggagagccctcccgtgtgcctgactgtggggcccgggcctgtccgcaccctgttgagcctggaggatgccgtgtgggccagctgtgggccccgggtcactgtcctggaagccaccaccctgcagcctcagcaaagcttcgaggcgcaccaggacgaggcagtgagcgtgacacacatggtgaaggcgggcagcggcgtctggatggccttctcctccggcacctccatccgcctcttccacactgagaccctggagcatctgcaagagatcaacatcgccaccaggaccaccttcctcctgccaggccagaagcacttgtgtgtcaccagcctcctgatctgccagggtctgctctgggtgggcactgaccagggtgtcatcgtcctgctgcccgtgcctcggctggaaggcatccccaagatcacagggaaaggcatggtctcactcaacgggcactgtgggcctgtggccttcctggctgtggctaccagcatcctggcccctgacatcctgcggagtgaccaggaggaggctgaggggccccgggctgaggaggacaagccagacgggcaggcacacgagcccatgcccgatagccacgtgggccgagagctgacccgcaagaagggcatcctcttgcagtaccgcctgcgctccaccgcacacctcccgggcccgctgctctccatgcgggagccggcgcctgctgatggcgcagctttggagcacagcgaggaggacggctccatttacgagatggccgacgaccccgacatctgggtgcgcagccggccctgcgcccgcgacgcccaccgcaaggagatttgctctgtggccatcatctccggcgggcagggctaccgcaactttggcagcgctctgggcagcagtgggaggcaggccccgtgtggggagacggacagcaccctcctcatctggcaggtgcccttgatgctatagcgcctcccctctcccctcagagggcacagctgcaggcctgaccaaggccacgcccggctctcgtgctctaggacctgcacgggacttgtggatgggcctggactctccagaaactacttgggcagagcaaaggaaaacctcttgttttaaaaaaatttttttcagagtgttttggggaggagttttagggcttggggagagggaggacacatctggaggaaatggccttctttttaaaagcaaaaaacacaaaacctcacaactgcctg

SEQ ID NO: 175914 - DNA, 5788 bp, Homo sapiens
  Payload ID: 14536
  Gene Symbol: ARHGEF11
  Gene Name: Rho guanine nucleotide exchange factor (GEF) 11
  Uniprot ID: O15085
  ENST ID: ENST00000361409
  CDS Start-End: 744-5312
aattggctcatttaagaatttcaaaacatttaatgtaaaagcttttttttttttaaggaagtccataaattttggttcccagggttgcactggacttggaaggagtgctgttgtgtacatactattgtatggttttatttattattttactgtacaaatcagccgaaagaatttttccaagtgccatttcggatttattaatccttttttttttcctttcctcaaagatatttgctgttgtcatattaagcattggagactagaaaattactttccccctttgagctagagggtctcttgccaacagaaggacagctgagaaagctggatttaaaggatggttttatctgtactttgcagttaacagtgatattttgaaggcacatttttctgtgattcatttttttttggccatagtgctaaccttgaagagattcgtggctgggtttttggtttctgagaaggtcgtagtttttcctcttttcctttttttttcttttttcttttcttttctttttttttaaagcgggggaggggaagaggggctgagaaaggaaatcatgttcactggtagaagtagagtggagcatcagttaccagggtcctgagagctggaggagaaaggattctatcttcaagttgggaggccctcctctcaccttgctcaaaaattgcaagcgattcaatcctgatcaagacaccaaagctacaggattctggaaccgtggagacaccgagaaaccatgagtgtaaggttaccccagagtatagacaggttaagtagcctgtcttctctgggagattctgcaccagagcgcaagtccccttcccaccatcgccagccttcggatgcctctgagacaacaggtctcgttcaacgctgtgtcattatccaaaaggaccagcatggcttcggcttcacagtcagtggggatcgcattgttctggtgcagtctgtgcggcctggaggtgcagccatgaaggccggtgtgaaagagggcgaccggatcatcaaagtcaacggcaccatggtgaccaatagctcacacctggaagtggtaaagctgatcaaatctggcgcctatgtcgcactcaccctcctgggctcttcaccttcatccatgggcatctctgggctccagcaggacccatccccagcaggagctccccgaatcacgtcagtgatcccctcaccaccacctcctccacctctaccacctccacaacgcatcacaggacccaaacctctgcaggatcccgaagttcaaaaacatgccacccagatcctcaggaatatgctgaggcaggaagaaaaagaattacaggacatacttccactatatggtgacaccagccagagaccatcagaaggccggctctctctggattcccaggagggggacagtggcttggactctgggacagaacgctttccttccctcagtgagtcattgatgaatcggaactcggtactgtcagaccctgggctagacagtcctcgaacctcccctgtgatcatggccagggtggcccagcaccacaggcggcagggctcggatgcagcagtcccctcaaccggtgaccagggtgtagatcaaagcccaaagcctttaattattggcccagaggaagactatgacccgggttatttcaacaacgagagcgacatcatattccaggatctggagaaactgaagtctcggccagctcacctgggggtttttctacgttacatcttctctcaggcggaccccagtccactgcttttttacctgtgtgcagaagtttatcagcaggcaagccccaaggattcccgaagcttggggaaagacatctggaatattttcctggagaaaaatgcgcctctgagagtgaagatccctgagatgctacaggctgaaattgactcgcgcctgcggaacagcgaagatgcccgtggtgttctctgtgaagctcaagaggcagccatgcctgagatccaagagcagatccacgactacagaacgaagcgcacactggggctgggcagcctgtatggtgaaaatgacctgctggacctggatggggaccctctccgagagcgccaagtggctgagaagcagctggctgcccttggagatattttgtccaagtatgaggaagacaggagcgcccccatggacttcgccctcaatacctacatgagccatgctgggatccgtcttcgagaggcacgaccttccaacacagctgaaaaggcccagtctgctcctgacaaggacaagtggctaccgttcttccctaagaccaagaagagcagcaattccaagaaagaaaaggatgccttggaggacaagaagcgaaaccctatcctcaaatacattgggaagcccaaaagctcttctcaaagcacatttcatattcccttgtcccctgtggaagtcaaaccaggcaatgtgaggaacatcattcagcactttgagaacaaccagcagtatgatgccccagaacctgggacacaacgactctcgaccggaagctttcctgaggacctgctggagagtgacagttcacgctcagagattcgcctgggccgctctgaaagcctcaagggccgggaagagatgaaacggtctcgaaaggcagagaacgtgccccgctctcgcagtgatgttgacatggatgctgctgcggaggctactcgcctgcaccagtcagcctcgtcctctacctccagcctctccaccaggtctcttgagaacccaacccctccattcactcccaaaatgggccgcaggagcattgagtcccccagtttggggttctgcacagataccctccttccccacctcctagaggatgatctgggccagctgtctgacctggagccagagccagatgcccaaaattggcagcatacagtgggcaaggatgtggtggctgggctaacccagcgggagattgaccggcaagaggtcatcaatgagctgtttgtgactgaagcttcccacctgcgcacactccgggtcctggacctgatcttctaccagcgaatgaagaaggagaacctgatgccccgggaggagctggcccggctcttcccgaacctgcctgaactcatagagattcacaattcctggtgtgaagccatgaagaagctccgggaggaaggccccatcatcaaagagatcagtgacctcatgctggcccggtttgatggccctgcccgagaggaactccagcaagtggctgcacagttctgttcctatcagtcaatagccctagagctaatcaagaccaagcaacgcaaggagagtcgattccagctcttcatgcaggaggctgagagccaccctcagtgtcggcggctgcagctgagagacctcatcatctctgagatgcagcggctcaccaagtacccgctgctgctggagagcatcatcaagcacacagagggtggcacctctgagcatgagaagctgtgccgggcccgggaccagtgccgggagattctcaagtatgtgaatgaagcggtaaaacaaacagagaaccgccaccgtttagagggctaccagaaacgcctggatgccaccgccctggagagggccagcaaccccctggcagcagagttcaagagcctggatcttacaaccagaaaaatgatccatgagggacccctgacctggaggatcagcaaggataagaccttggacctccacgtgctgctgctggaggacctcctagtgctgctacagaaacaggatgagaagctattgctgaagtgccacagcaagactgctgtgggctcctcagacagcaagcagaccttcagccccgtgctcaagctcaatgctgtgctcatccgctctgtggccacagataaacgggccttcttcatcatctgcacctccaagctgggcccaccccagatctatgagctggttgcattgacgtcatcagacaagaacacatggatggagctcttagaagaggccgtgcggaatgccaccaggcaccccggagctgccccaatgcccgtccatcctccacccccaggtccccgggagccagcccagcagggccccacacccagcagggtagaactggatgactcagacgtgttccatggtgaacctgaacctgaggagctgcctggaggcactgggtcccagcagagggtccaagggaagcaccaggtcctgctagaggaccctgagcaggagggcagtgcagaggaagaggaactgggtgtcctgccttgcccttccacatccctggatggagagaacaggggcatcaggacaaggaaccccatccacttggccttcccaggccctctgttcatggaagggctcgctgactccgctctggaagatgtggagaacctgcgacatctgatcctgtggagcctgctgccaggtcacaccatggaaactcaggctgcccaggagcccgaggacgacctgacacccacaccttctgtcatcagcgtcacctctcacccctgggacccaggctccccagggcaagcaccccctgggggtgaaggggacaacacccagcttgcagggctggagggggaacggccagagcaggaagacatgggtctctgttctctggaacacctacccccaaggaccagaaattctgggatatgggagtctccagaactggacaggaatctggctgaagatgcttcaagcacagaggcagcaggaggttacaaagttgtgagaaaagctgaggtggcaggcagcaaggttgtccctgcactaccagagagtggccagtcagagcctgggccacctgaagtggaaggcggaacaaaggctacggggaactgcttttatgtcagcatgccatcaggacccccggactcaagcaccgaccactcagaggcacccatgagcccccctcagcctgacagcctccctgcagggcagacagagcctcagcctcagctgcagggaggcaacgatgatccaagacgccccagccgctctcctccaagcctggccctcagggacgtgggcatgatcttccataccattgagcagctcactctcaagctcaacaggctcaaggatatggagctggcccacagagagctgctcaagtcccttgggggagagtcatctggtggcaccacgcctgtgggcagtttccacacagaagcagctagatggacagatggctccctctcacctcccgctaaggagcccctagcttctgactccaggaacagccatgaactggggccctgccctgaggatggctctgacgcccccctggaagacagcacagcagacgcagccgcgtcaccaggaccataaccgtacaaaccaccaaatcctctgcgtccccactcctccttcagggactggcctgagaccggggcacagggtaggggggatcccaacactcctccctgtggaggaggcagttagggaaactaggatccagccaaggcccggggggagacccgcatgttgcttggtctgctcaagtcggagtcaggtttcagtgtcttttccctcccttagcccaaccctccaaggcctcatgtctcctaagcatgctgactgcatccgaaaggcccccactcaccatggtctgccctcaccccacatatgtgtgtacacgcgcacgcctgtatgtgcgctgccctcagacatgcaagtgaaaggaggaggcttctgtgtaaatgcactttcttcctcccctctttctccataagaccccaggcagaggtgggtgcctcccctcccctctttgtcactttggtttcctataaatatgtatgtatcgt

SEQ ID NO: 175915 - DNA, 6889 bp, Homo sapiens
  Payload ID: 14536
  Gene Symbol: ARHGEF11
  Gene Name: Rho guanine nucleotide exchange factor (GEF) 11
  Uniprot ID: O15085
  ENST ID: ENST00000368194
  CDS Start-End: 1041-5729
agcgaaatctccgtttcatggaggctgaggcaagagaaaatttcggagcctggatgtggaggagcccaacagcagaactaactcaggaaattgtctttcagaaaaaggccgaacgtaggctgggtctgagaatcaggctggggtaggtggaggaacctgcaagtttaaaggaaaaagaaaaggagagaatattttcagagattatctctggtttgttatcattactaccatcttaaaggtaaaaagcattgcatttcaggtgttctttgatttttattttatttttttttttggtgcaattggctcatttaagaatttcaaaacatttaatgtaaaagcttttttttttttaaggaagtccataaattttggttcccagggttgcactggacttggaaggagtgctgttgtgtacatactattgtatggttttatttattattttactgtacaaatcagccgaaagaatttttccaagtgccatttcggatttattaatccttttttttttcctttcctcaaagatatttgctgttgtcatattaagcattggagactagaaaattactttccccctttgagctagagggtctcttgccaacagaaggacagctgagaaagctggatttaaaggatggttttatctgtactttgcagttaacagtgatattttgaaggcacatttttctgtgattcatttttttttggccatagtgctaaccttgaagagattcgtggctgggtttttggtttctgagaaggtcgtagtttttcctcttttcctttttttttcttttttcttttcttttctttttttttaaagcgggggaggggaagaggggctgagaaaggaaatcatgttcactggtagaagtagagtggagcatcagttaccagggtcctgagagctggaggagaaaggattctatcttcaagttgggaggccctcctctcaccttgctcaaaaattgcaagcgattcaatcctgatcaagacaccaaagctacaggattctggaaccgtggagacaccgagaaaccatgagtgtaaggttaccccagagtatagacaggttaagtagcctgtcttctctgggagattctgcaccagagcgcaagtccccttcccaccatcgccagccttcggatgcctctgagacaacaggtctcgttcaacgctgtgtcattatccaaaaggaccagcatggcttcggcttcacagtcagtggggatcgcattgttctggtgcagtctgtgcggcctggaggtgcagccatgaaggccggtgtgaaagagggcgaccggatcatcaaagtcaacggcaccatggtgaccaatagctcacacctggaagtggtaaagctgatcaaatctggcgcctatgtcgcactcaccctcctgggctcttcaccttcatccatgggcatctctgggctccagcaggacccatccccagcaggagctccccgaatcacgtcagtgatcccctcaccaccacctcctccacctctaccacctccacaacgcatcacaggacccaaacctctgcaggatcccgaagttcaaaaacatgccacccagatcctcaggaatatgctgaggcaggaagaaaaagaattacagcgtatctgtgaggtctatagccggaaccccgccagcctactggaagagcagatcgaaggtgcccggcggcgagtcactcagttacagctgaagatccagcaggagactggtggctcagtggacatacttccactatatggtgacaccagccagagaccatcagaaggccggctctctctggattcccaggagggggacagtggcttggactctgggacagaacgctttccttccctcagtgagtcattgatgaatcggaactcggtactgtcagaccctgggctagacagtcctcgaacctcccctgtgatcatggccagggtggcccagcaccacaggcggcagggctcggatgcagcagtcccctcaaccggtgaccagggtgtagatcaaagcccaaagcctttaattattggcccagaggaagactatgacccgggttatttcaacaacgagagcgacatcatattccaggatctggagaaactgaagtctcggccagctcacctgggggtttttctacgttacatcttctctcaggcggaccccagtccactgcttttttacctgtgtgcagaagtttatcagcaggcaagccccaaggattcccgaagcttggggaaagacatctggaatattttcctggagaaaaatgcgcctctgagagtgaagatccctgagatgctacaggctgaaattgactcgcgcctgcggaacagcgaagatgcccgtggtgttctctgtgaagctcaagaggcagccatgcctgagatccaagagcagatccacgactacagaacgaagcgcacactggggctgggcagcctgtatggtgaaaatgacctgctggacctggatggggaccctctccgagagcgccaagtggctgagaagcagctggctgcccttggagatattttgtccaagtatgaggaagacaggagcgcccccatggacttcgccctcaatacctacatgagccatgctgggatccgtcttcgagaggcacgaccttccaacacagctgaaaaggcccagtctgctcctgacaaggacaagtggctaccgttcttccctaagaccaagaagagcagcaattccaagaaagaaaaggatgccttggaggacaagaagcgaaaccctatcctcaaatacattgggaagcccaaaagctcttctcaaagcacatttcatattcccttgtcccctgtggaagtcaaaccaggcaatgtgaggaacatcattcagcactttgagaacaaccagcagtatgatgccccagaacctgggacacaacgactctcgaccggaagctttcctgaggacctgctggagagtgacagttcacgctcagagattcgcctgggccgctctgaaagcctcaagggccgggaagagatgaaacggtctcgaaaggcagagaacgtgccccgctctcgcagtgatgttgacatggatgctgctgcggaggctactcgcctgcaccagtcagcctcgtcctctacctccagcctctccaccaggtctcttgagaacccaacccctccattcactcccaaaatgggccgcaggagcattgagtcccccagtttggggttctgcacagataccctccttccccacctcctagaggatgatctgggccagctgtctgacctggagccagagccagatgcccaaaattggcagcatacagtgggcaaggatgtggtggctgggctaacccagcgggagattgaccggcaagaggtcatcaatgagctgtttgtgactgaagcttcccacctgcgcacactccgggtcctggacctgatcttctaccagcgaatgaagaaggagaacctgatgccccgggaggagctggcccggctcttcccgaacctgcctgaactcatagagattcacaattcctggtgtgaagccatgaagaagctccgggaggaaggccccatcatcaaagagatcagtgacctcatgctggcccggtttgatggccctgcccgagaggaactccagcaagtggctgcacagttctgttcctatcagtcaatagccctagagctaatcaagaccaagcaacgcaaggagagtcgattccagctcttcatgcaggaggctgagagccaccctcagtgtcggcggctgcagctgagagacctcatcatctctgagatgcagcggctcaccaagtacccgctgctgctggagagcatcatcaagcacacagagggtggcacctctgagcatgagaagctgtgccgggcccgggaccagtgccgggagattctcaagtatgtgaatgaagcggtaaaacaaacagagaaccgccaccgtttagagggctaccagaaacgcctggatgccaccgccctggagagggccagcaaccccctggcagcagagttcaagagcctggatcttacaaccagaaaaatgatccatgagggacccctgacctggaggatcagcaaggataagaccttggacctccacgtgctgctgctggaggacctcctagtgctgctacagaaacaggatgagaagctattgctgaagtgccacagcaagactgctgtgggctcctcagacagcaagcagaccttcagccccgtgctcaagctcaatgctgtgctcatccgctctgtggccacagataaacgggccttcttcatcatctgcacctccaagctgggcccaccccagatctatgagctggttgcattgacgtcatcagacaagaacacatggatggagctcttagaagaggccgtgcggaatgccaccaggcaccccggagctgccccaatgcccgtccatcctccacccccaggtccccgggagccagcccagcagggccccacacccagcagggtagaactggatgactcagacgtgttccatggtgaacctgaacctgaggagctgcctggaggcactgggtcccagcagagggtccaagggaagcaccaggtcctgctagaggaccctgagcaggagggcagtgcagaggaagaggaactgggtgtcctgccttgcccttccacatccctggatggagagaacaggggcatcaggacaaggaaccccatccacttggccttcccaggccctctgttcatggaagggctcgctgactccgctctggaagatgtggagaacctgcgacatctgatcctgtggagcctgctgccaggtcacaccatggaaactcaggctgcccaggagcccgaggacgacctgacacccacaccttctgtcatcagcgtcacctctcacccctgggacccaggctccccagggcaagcaccccctgggggtgaaggggacaacacccagcttgcagggctggagggggaacggccagagcaggaagacatgggtctctgttctctggaacacctacccccaaggaccagaaattctgggatatgggagtctccagaactggacaggaatctggctgaagatgcttcaagcacagaggcagcaggaggttacaaagttgtgagaaaagctgaggtggcaggcagcaaggttgtccctgcactaccagagagtggccagtcagagcctgggccacctgaagtggaaggcggaacaaaggctacggggaactgcttttatgtcagcatgccatcaggacccccggactcaagcaccgaccactcagaggcacccatgagcccccctcagcctgacagcctccctgcagggcagacagagcctcagcctcagctgcagggaggcaacgatgatccaagacgccccagccgctctcctccaagcctggccctcagggacgtgggcatgatcttccataccattgagcagctcactctcaagctcaacaggctcaaggatatggagctggcccacagagagctgctcaagtcccttgggggagagtcatctggtggcaccacgcctgtgggcagtttccacacagaagcagctagatggacagatggctccctctcacctcccgctaaggagcccctagcttctgactccaggaacagccatgaactggggccctgccctgaggatggctctgacgcccccctggaagacagcacagcagacgcagccgcgtcaccaggaccataaccgtacaaaccaccaaatcctctgcgtccccactcctccttcagggactggcctgagaccggggcacagggtaggggggatcccaacactcctccctgtggaggaggcagttagggaaactaggatccagccaaggcccggggggagacccgcatgttgcttggtctgctcaagtcggagtcaggtttcagtgtcttttccctcccttagcccaaccctccaaggcctcatgtctcctaagcatgctgactgcatccgaaaggcccccactcaccatggtctgccctcaccccacatatgtgtgtacacgcgcacgcctgtatgtgcgctgccctcagacatgcaagtgaaaggaggaggcttctgtgtaaatgcactttcttcctcccctctttctccataagaccccaggcagaggtgggtgcctcccctcccctctttgtcactttggtttcctataaatatgtatgtatcgtatgtgcatctttgctattgtaaataactttgaccttttttgttcctgttcctgaagtgctggaggcagttatggaaggagctgcttagggaagaggggtttcacttgtatctccttagttaacaacccagttccaggatcgagcctaaagcgggagccaggcctgagtgttcctgtccctgtgagtgggaaggtcttctggctccccatcccacctggctccagagcctgccctccacagcttgctgccaagctactccctccctccctggacttctcatcttcacaagatggggatcatgggggtttcttaccccacctatgtccccctcttccccaccctgtccctgtagaaaaccagtgaagcaggtacggagctgaggactgggccccaggaggtggggacaggggtctgaatgccgagtccctgaattcacccaggaccatccaaggggccaccgcagcattggccccatcaccacgtcctcacccaactctccctgatgaatagaatatacacactgtgctaggtgtatatatacatatatatatatataaatatatatataatatataaaatatagatatggaaatgactgttctgctgttaagataatgtatactcttttattttcttcctttcatggttaagattttttttttaagaaaagttaaatatccttca

SEQ ID NO: 175916 - DNA, 6891 bp, Homo sapiens
  Payload ID: 14537
  Gene Symbol: ARHGEF12
  Gene Name: Rho guanine nucleotide exchange factor (GEF) 12
  Uniprot ID: Q9NZN5
  ENST ID: ENST00000356641
  CDS Start-End: 331-4908
tcccgggtccccttcccactgcgcgcggatttccctctctgaggaagtttatccttgtgccttctggaggatttctctctagctcgactcactctggactgactcgctccctggctttctcagttcgttttgggagataacttgttttgctccaagccgcatccgttgaccccttacagtcggatggtctagatgactgaatggagttttgagttggacttttgtgtccctgacggagttgggcctgatcccagagcactgggggtggggaggaggtgttactgtaaaatgcaagttggataaaaggaggacctctcgccaagggccccaatgagtggcacacagtctactatcaccgacaggtttcccctcaaaaaacctataaggcatggaagtattttgaaccgagagtcaccaacagataagaagcagaaagttgagcgcattgcatcacatgattttgaccccacaggtcttgttcagcgttgcgtaatcatccagaaagatgacaatggatttgggctgacggtcagtggagacaatccagtcttcgtacagtctgtcaaagaagatggagcagccatgcgggctggagtacagacaggtgatcgaatcatcaaggtgaatggaactctggtgactcattcaaatcatctggaggtggtgaagctaatcaaatctggttcctatgtagctctcactgttcagggacgcccacctgggtcgccccagattccacttgccgactctgaagtagagccgtcagtcattggacatatgtctcccatcatgacatctcctcattcacctggagcatctgggaatatggagagaatcactagtcctgtgctcatgggggaggaaaacaatgtggttcataaccagaaagtagaaattctgagaaaaatgttacagaaagaacaggaacggctacagttattgcaggaagattacaaccgaacacctgcccaaagattgctaaaagagatccaagaggccaagaaacacattcctcagctgcaagagcagttatccaaagccacaggctctgctcaggatggagctgtagttacaccctccagacctttaggggacaccctaacagtcagtgaggcagaaacagatcctggagatgtactgggcaggactgactgtagcagtggagatgcttctcggcccagtagtgacaatgcagatagtcccaagagtggcccaaaagagagaatttatctagaggaaaacccagagaaaagtgaaacaattcaggacactgacactcaatcacttgtcggaagtccctcaacccgtatagcacctcatattattggagcagaagatgatgattttggtactgaacatgaacagatcaatggacagtgcagctgtttccagagcattgaattactaaaatctcgcccggctcatttggctgttttcttacaccatgtagtttcacaatttgaccctgcgactttgctctgttatctctattcagacctgtataaacataccaattccaaagaaactcgtcgcatcttccttgagtttcatcagttctttctagatcgatcagcacacctgaaagtttctgttcctgatgaaatgtctgcagatctagaaaagagaagacctgagctcattcctgaggatctgcatcgccactatatccaaactatgcaagaaagagtccatccagaagttcaaaggcacttagaagattttcggcagaaacgtagtatgggactgaccttggctgaaagcgagctgactaaacttgatgcagagcgagacaaggaccgattgactttggagaaggagcggacatgtgcagaacagattgttgccaaaattgaagaagtattgatgactgctcaggctgtagaggaagataagagctccaccatgcagtatgttattctcatgtatatgaagcatttgggagtaaaagtgaaagagcctcgaaatttggagcacaaacggggtcggattggatttcttcccaaaatcaagcaaagtatgaagaaagataaagaaggggaagaaaaagggaagcgaagaggattccccagcatcctgggacccccacggagaccaagccgtcatgacaacagtgcaattggcagagccatggaactacagaaggcgcgccaccctaagcacttatccacaccctcatctgtgagtcctgaacctcaggactctgccaagttgcgccagagtgggttagcaaatgaaggaacagacgctggatacctgcctgccaattccatgtcttctgtagcttcaggggcctctttttcccaggaaggagggaaagagaatgatacaggatcaaagcaagttggagaaacatcagcacctggagacaccttagatggcacacctcgtactctcaatactgtctttgatttcccaccacctccattagaccaagtgcaggaggaggaatgtgaagtagaaagggtgactgaacatgggacaccaaagccctttcgaaagtttgacagtgtagcttttggagaaagtcaaagtgaggatgaacaatttgaaaatgacttagagacagatccacccaactggcagcagcttgttagtcgagaagtgttactgggactaaaaccttgtgaaatcaaaagacaggaagtgattaatgaattgttctacactgaaagagctcatgttcgaacactgaaggttcttgatcaagtgttctatcagcgagtatccagagaaggaattctgtcaccctcagagctacggaaaattttttcaaacttggaagatattcttcaacttcatattggattgaatgaacaaatgaaggctgttcgaaagagaaatgagacctctgttatcgatcagattggggaagatttgctgacatggttcagcggaccaggagaggagaaattgaaacatgctgctgctaccttttgcagtaaccaacctttcgccctggaaatgatcaaatctcgtcagaaaaaggattctcgatttcagacttttgtgcaagatgctgaaagtaatccactgtgtcgtcgtcttcaactgaaggatattattcccactcaaatgcaaaggcttactaagtacccacttctgttggataatattgccaaatacacagaatggccaacagaaagggagaaggtgaagaaagctgcagatcactgtcgtcagatcttaaattatgtaaatcaggctgtcaaggaggcagaaaacaagcagcgcctagaagattatcagcgtcgccttgatacctccagcctgaagttgtcagagtacccaaatgttgaagagctcaggaatttggatttaacaaaaaggaagatgattcatgaagggccattggtttggaaggtgaatagagataaaactattgatttatacacgttgctgctggaagacattcttgtattgttacaaaagcaggatgatagactggttttaaggtgtcatagtaagattctggcatctacagctgatagcaaacacacgtttagccctgtcattaagttgagtacagtgttggttcgacaagtggcaacagataacaaagctttattcgtcatttccatgtcagacaatggcgctcagatttatgaactggtggcacagacagtttctgaaaagactgtctggcaggacctaatctgtcggatggctgcatcagtgaaggagcaatccacaaagccaattccattaccacagtcaacacctggcgaaggagataatgatgaagaagatccttcaaaattaaaagaggagcagcatggcatttcagtcactggtttgcagagtccagacagagatttgggattagaatctaccttaatatcgtcaaaacctcagtctcattcactgagtacctctgggaaatcagaggtacgtgatctgtttgtggctgagagacagtttgcaaaggaacaacatacagatgggacactaaaggaagttggagaagattatcaaatcgcaatcccagattcacacctgcctgtctcagaagaacggtgggcattggatgcactaagaaatttgggtttgttgaagcagttgctggtgcaacagctaggtttgactgagaagagcgttcaggaagactggcaacatttcccaagatacagaacagcctctcaggggccgcagacagacagtgtcatccagaactctgaaaatattaaggcctatcattctggtgaaggacatatgccctttagaactggaactggtgacattgcaacttgttacagtccacggacttcaactgaatcttttgctccacgggattcagtgggactggcaccccaggatagccaggcaagtaacattttagtaatggaccacatgattatgaccccagagatgcctaccatggagccagaagggggtcttgatgacagtggagagcacttttttgatgcccgtgaagcacatagtgatgagaatccatcagaaggtgatggagcagttaacaaggaagagaaggatgttaatttacgcatctcaggaaactatttgatccttgatggctatgacccagtgcaggagagttccacagatgaggaggttgcttcctcacttaccctgcagcccatgacaggcatccctgctgtggaatccacccaccagcagcaacattctcctcagaatactcactccgatggggcaatttcaccattcacccccgaatttctggtccagcagcgctggggagctatggagtattcctgttttgagatccagagtccctcctcttgtgcagattcacagagccagatcatggagtacattcataagatagaggctgaccttgaacacttaaagaaggtggaggaaagttacaccattctttgccaaaggctggctggatcagccctcacagacaagcactcagataaaagttagagccgcatgtcctggaggtgactgcaggttgttggatttggagtatcggccgtgtctcaccacatcctggctccagtgtggatgcagagagagtgtgacagaggatctgcctgtgaaccacctgggattagtcaagtcccaaggtgcccagagtgggactagttcttcacagtgtggcagctgcactaatctgtttgtgagggaatatccattccctcactctactctcctcactatcggaaattcattttgattcagaataaaaaccaaatgtatagagctttgggtgtaggatatgaaattgtacttagatttaagaaaaagagaaaatcagatgtatttatttgacttcattccgtatttgaaagcacattttaatttttatttgccttgttttgttttaattgagtagtgagagttttagacctttgtctttagtacacccaaggatcaactgctcctgaagcaaagaggtcaggatggagtatgcagaagttgggtagagaggttaagaagaggaggaagtgagacggggaagggaggagcaccttgcttcactatacagtattccaagctctctgctgtccagtaggctgcttctctgagggtcacctcaaaggtatgctatgccgtgtggctcttatgtgcccaggtggtgtggtcagagagtggatgggcttcctcccgccctgaggcaagcacctcttctctgtagctgggatcaaccacaattaataggaatcctcaacatactaaatagcaggcacttgaaaatgggtgtgttttcttccattgtcgtcttttctattgagggttgggatttgggtgggagaggaaagcaaattttattttcttgactataaatttgttattcttggtatcatttcatttttataattatacattagacattggcacttgtgtaaaactgtccctgcagattgagcaggaagtaaaaacaaatggaaatgcttcggatagtggcaggggtgggggttgctaaggaaagggtgggatgggagtgggtaaagagtttgggaaggttatctaactgaatcactactgagttgaatcatggctatcattagccacaggtactgctgattataaggccagtaaaattttagtacctggaggtttgactctaatttttgcactgatggtgccaaagggccctgagtcaaaaggatagccaagggtggagtggaaaaagatatggtgaaggcagaactgctcacaccagctccagaagcacgtcctctgacttcactgccgcagctctttccacacggggccgtgattgaccctaaaaattgcagaccagcacatacactggacactgcaggcaaggtgttggtaactgcctgctctaggatgaatagtagcgttagcagcaccctacagagggtaagtttcagaattgtaatttgagaactccttcaattatattgactttctttggttttccttgtgcattaggtatatattttttgaagtatttttgccaactaaaatgaagtctgtaaattctgttaataaacaaggagttcatccgttgctcacatctttcattggtgccctctgaactctgtgggttgctaggatgtaattttaatgcttccctgcagtccaaagatgattttttcaccacaaatggtaagggatgcccacctacttttataaacaccactgcaacttaacaagtttatttatctatgtccagatttctgtttctgtcctaaattgatctgtgtttttaggtggatcaacttggatctttagacctcatctataaattgaaattatatttttagtcataagccaagtacaatctaactcagaatgggattaaaaattttagaagcagaagctaatatataaatgaagtttgggatttggaactttctgtatctcttaggaggaacaagtaaaaaccaaatggttacattgtgctgctagaaataatgtcattctcaattaaaa

SEQ ID NO: 175917 - DNA, 9660 bp, Homo sapiens
  Payload ID: 14537
  Gene Symbol: ARHGEF12
  Gene Name: Rho guanine nucleotide exchange factor (GEF) 12
  Uniprot ID: Q9NZN5
  ENST ID: ENST00000397843
  CDS Start-End: 167-4801
gttgaccccttacagtcggatggtctagatgactgaatggagttttgagttggacttttgtgtccctgacggagttgggcctgatcccagagcactgggggtggggaggaggtgttactgtaaaatgcaagttggataaaaggaggacctctcgccaagggccccaatgagtggcacacagtctactatcaccgacaggtttcccctcaaaaaacctataaggcatggaagtattttgaaccgagagtcaccaacagataagaagcagaaagttgagcgcattgcatcacatgattttgaccccacagatagctcctccaagaagacaaagtctagttcagaggagagtagatccgagatatatggtcttgttcagcgttgcgtaatcatccagaaagatgacaatggatttgggctgacggtcagtggagacaatccagtcttcgtacagtctgtcaaagaagatggagcagccatgcgggctggagtacagacaggtgatcgaatcatcaaggtgaatggaactctggtgactcattcaaatcatctggaggtggtgaagctaatcaaatctggttcctatgtagctctcactgttcagggacgcccacctgggtcgccccagattccacttgccgactctgaagtagagccgtcagtcattggacatatgtctcccatcatgacatctcctcattcacctggagcatctgggaatatggagagaatcactagtcctgtgctcatgggggaggaaaacaatgtggttcataaccagaaagtagaaattctgagaaaaatgttacagaaagaacaggaacggctacagttattgcaggaagattacaaccgaacacctgcccaaagattgctaaaagagatccaagaggccaagaaacacattcctcagctgcaagagcagttatccaaagccacaggctctgctcaggatggagctgtagttacaccctccagacctttaggggacaccctaacagtcagtgaggcagaaacagatcctggagatgtactgggcaggactgactgtagcagtggagatgcttctcggcccagtagtgacaatgcagatagtcccaagagtggcccaaaagagagaatttatctagaggaaaacccagagaaaagtgaaacaattcaggacactgacactcaatcacttgtcggaagtccctcaacccgtatagcacctcatattattggagcagaagatgatgattttggtactgaacatgaacagatcaatggacagtgcagctgtttccagagcattgaattactaaaatctcgcccggctcatttggctgttttcttacaccatgtagtttcacaatttgaccctgcgactttgctctgttatctctattcagacctgtataaacataccaattccaaagaaactcgtcgcatcttccttgagtttcatcagttctttctagatcgatcagcacacctgaaagtttctgttcctgatgaaatgtctgcagatctagaaaagagaagacctgagctcattcctgaggatctgcatcgccactatatccaaactatgcaagaaagagtccatccagaagttcaaaggcacttagaagattttcggcagaaacgtagtatgggactgaccttggctgaaagcgagctgactaaacttgatgcagagcgagacaaggaccgattgactttggagaaggagcggacatgtgcagaacagattgttgccaaaattgaagaagtattgatgactgctcaggctgtagaggaagataagagctccaccatgcagtatgttattctcatgtatatgaagcatttgggagtaaaagtgaaagagcctcgaaatttggagcacaaacggggtcggattggatttcttcccaaaatcaagcaaagtatgaagaaagataaagaaggggaagaaaaagggaagcgaagaggattccccagcatcctgggacccccacggagaccaagccgtcatgacaacagtgcaattggcagagccatggaactacagaaggcgcgccaccctaagcacttatccacaccctcatctgtgagtcctgaacctcaggactctgccaagttgcgccagagtgggttagcaaatgaaggaacagacgctggatacctgcctgccaattccatgtcttctgtagcttcaggggcctctttttcccaggaaggagggaaagagaatgatacaggatcaaagcaagttggagaaacatcagcacctggagacaccttagatggcacacctcgtactctcaatactgtctttgatttcccaccacctccattagaccaagtgcaggaggaggaatgtgaagtagaaagggtgactgaacatgggacaccaaagccctttcgaaagtttgacagtgtagcttttggagaaagtcaaagtgaggatgaacaatttgaaaatgacttagagacagatccacccaactggcagcagcttgttagtcgagaagtgttactgggactaaaaccttgtgaaatcaaaagacaggaagtgattaatgaattgttctacactgaaagagctcatgttcgaacactgaaggttcttgatcaagtgttctatcagcgagtatccagagaaggaattctgtcaccctcagagctacggaaaattttttcaaacttggaagatattcttcaacttcatattggattgaatgaacaaatgaaggctgttcgaaagagaaatgagacctctgttatcgatcagattggggaagatttgctgacatggttcagcggaccaggagaggagaaattgaaacatgctgctgctaccttttgcagtaaccaacctttcgccctggaaatgatcaaatctcgtcagaaaaaggattctcgatttcagacttttgtgcaagatgctgaaagtaatccactgtgtcgtcgtcttcaactgaaggatattattcccactcaaatgcaaaggcttactaagtacccacttctgttggataatattgccaaatacacagaatggccaacagaaagggagaaggtgaagaaagctgcagatcactgtcgtcagatcttaaattatgtaaatcaggctgtcaaggaggcagaaaacaagcagcgcctagaagattatcagcgtcgccttgatacctccagcctgaagttgtcagagtacccaaatgttgaagagctcaggaatttggatttaacaaaaaggaagatgattcatgaagggccattggtttggaaggtgaatagagataaaactattgatttatacacgttgctgctggaagacattcttgtattgttacaaaagcaggatgatagactggttttaaggtgtcatagtaagattctggcatctacagctgatagcaaacacacgtttagccctgtcattaagttgagtacagtgttggttcgacaagtggcaacagataacaaagctttattcgtcatttccatgtcagacaatggcgctcagatttatgaactggtggcacagacagtttctgaaaagactgtctggcaggacctaatctgtcggatggctgcatcagtgaaggagcaatccacaaagccaattccattaccacagtcaacacctggcgaaggagataatgatgaagaagatccttcaaaattaaaagaggagcagcatggcatttcagtcactggtttgcagagtccagacagagatttgggattagaatctaccttaatatcgtcaaaacctcagtctcattcactgagtacctctgggaaatcagaggtacgtgatctgtttgtggctgagagacagtttgcaaaggaacaacatacagatgggacactaaaggaagttggagaagattatcaaatcgcaatcccagattcacacctgcctgtctcagaagaacggtgggcattggatgcactaagaaatttgggtttgttgaagcagttgctggtgcaacagctaggtttgactgagaagagcgttcaggaagactggcaacatttcccaagatacagaacagcctctcaggggccgcagacagacagtgtcatccagaactctgaaaatattaaggcctatcattctggtgaaggacatatgccctttagaactggaactggtgacattgcaacttgttacagtccacggacttcaactgaatcttttgctccacgggattcagtgggactggcaccccaggatagccaggcaagtaacattttagtaatggaccacatgattatgaccccagagatgcctaccatggagccagaagggggtcttgatgacagtggagagcacttttttgatgcccgtgaagcacatagtgatgagaatccatcagaaggtgatggagcagttaacaaggaagagaaggatgttaatttacgcatctcaggaaactatttgatccttgatggctatgacccagtgcaggagagttccacagatgaggaggttgcttcctcacttaccctgcagcccatgacaggcatccctgctgtggaatccacccaccagcagcaacattctcctcagaatactcactccgatggggcaatttcaccattcacccccgaatttctggtccagcagcgctggggagctatggagtattcctgttttgagatccagagtccctcctcttgtgcagattcacagagccagatcatggagtacattcataagatagaggctgaccttgaacacttaaagaaggtggaggaaagttacaccattctttgccaaaggctggctggatcagccctcacagacaagcactcagataaaagttagagccgcatgtcctggaggtgactgcaggttgttggatttggagtatcggccgtgtctcaccacatcctggctccagtgtggatgcagagagagtgtgacagaggatctgcctgtgaaccacctgggattagtcaagtcccaaggtgcccagagtgggactagttcttcacagtgtggcagctgcactaatctgtttgtgagggaatatccattccctcactctactctcctcactatcggaaattcattttgattcagaataaaaaccaaatgtatagagctttgggtgtaggatatgaaattgtacttagatttaagaaaaagagaaaatcagatgtatttatttgacttcattccgtatttgaaagcacattttaatttttatttgccttgttttgttttaattgagtagtgagagttttagacctttgtctttagtacacccaaggatcaactgctcctgaagcaaagaggtcaggatggagtatgcagaagttgggtagagaggttaagaagaggaggaagtgagacggggaagggaggagcaccttgcttcactatacagtattccaagctctctgctgtccagtaggctgcttctctgagggtcacctcaaaggtatgctatgccgtgtggctcttatgtgcccaggtggtgtggtcagagagtggatgggcttcctcccgccctgaggcaagcacctcttctctgtagctgggatcaaccacaattaataggaatcctcaacatactaaatagcaggcacttgaaaatgggtgtgttttcttccattgtcgtcttttctattgagggttgggatttgggtgggagaggaaagcaaattttattttcttgactataaatttgttattcttggtatcatttcatttttataattatacattagacattggcacttgtgtaaaactgtccctgcagattgagcaggaagtaaaaacaaatggaaatgcttcggatagtggcaggggtgggggttgctaaggaaagggtgggatgggagtgggtaaagagtttgggaaggttatctaactgaatcactactgagttgaatcatggctatcattagccacaggtactgctgattataaggccagtaaaattttagtacctggaggtttgactctaatttttgcactgatggtgccaaagggccctgagtcaaaaggatagccaagggtggagtggaaaaagatatggtgaaggcagaactgctcacaccagctccagaagcacgtcctctgacttcactgccgcagctctttccacacggggccgtgattgaccctaaaaattgcagaccagcacatacactggacactgcaggcaaggtgttggtaactgcctgctctaggatgaatagtagcgttagcagcaccctacagagggtaagtttcagaattgtaatttgagaactccttcaattatattgactttctttggttttccttgtgcattaggtatatattttttgaagtatttttgccaactaaaatgaagtctgtaaattctgttaataaacaaggagttcatccgttgctcacatctttcattggtgccctctgaactctgtgggttgctaggatgtaattttaatgcttccctgcagtccaaagatgattttttcaccacaaatggtaagggatgcccacctacttttataaacaccactgcaacttaacaagtttatttatctatgtccagatttctgtttctgtcctaaattgatctgtgtttttaggtggatcaacttggatctttagacctcatctataaattgaaattatatttttagtcataagccaagtacaatctaactcagaatgggattaaaaattttagaagcagaagctaatatataaatgaagtttgggatttggaactttctgtatctcttaggaggaacaagtaaaaaccaaatggttacattgtgctgctagaaataatgtcattctcaattaaaagggttacacctgtagccacttgacactaacaccatcgagggcaattaatcaggagaaaagtaaatataaaaactttgctcttaacgtcacacactacagggtaattatgtaattctctagcactcaattaagaagcttgtaggttagcaaaatttcagtttctctagttcagccagtgtcttgtccttagtaattatttgctttccctgcagttcaatttctccttggaactctaacaggactaactggaaaaatactttgaccatagctctagtacttccaaataaattcatatctagattttcaaacaaagccccaagatgaagtctaattctgaaaatatctcacaatttttgaatgttctttttatcttaccgacctaacttctcttttccctcccaacttggcctcccacacgttccatttcattttggccattatagtcacatccgtttgactttggttgtgacatcttcctttcaggatgatggaattagatgcagtctgtctttgagtgagactggtcaccatcagaggagttttttctaagtgacgtgactagaagttgaaatctacttccctgctaaagggcacaggggtggtgtacaaagaaagctaccttcccagagcaagcaggctgcattttagctatggaagtgacctgctgtgacactgtgctctcttctgtgggcttaatggttcctttgctatgaagtggcaaattacatgtagagtgtctccttccttttcagagaacagttaatcaaggcaaatcagcaagcccccaaagtgctgtaatttaacatcatgattaccaccttcgaagctatatattttgcatactttaaaatcacctaacttggactgcttgaattacattggcttttagaaccgaaattgtaactatgtattgtatttcatgggaggtatattttatgagctttttggctttcttttttcccacagcaactgccaatgaaggatgaatcccctttttaaaaagttgttgttgttgttgtttatttgattttgagttaggagggataatagagaagtccatttaaaaattatttttagaagctaaagaaagtaattatgcttcctgtgaattgtcttttactggcatctttgttttcctctttgatgttagtaaatttggtgtaatacgtggggcttccatatttcaaagtggaagctttcttctctgaagtcgatatatggttttgaattactagagctttggtcagtatttccttccctatatgtcacagagggcaccactgagaactgcgtgcataggacctcaaaatacaaaattagcagggcctcacagtcagcttcctcatggctagtttttcccccttatattacaatttttgttttataagtcatttttttcctgatatttccaccacttttcagagtcatctacaaaatttttctttcctcaagaaaagagttccttttgccttattccttatgccttccccactggtattgagggttttgataataaattggtaggaaaaaaaagtacctcctagaaggaagccttccccaccatttccaggtgccaactgctaagcagatatattccaaaaatggtaactgtcatgtgcacactgttggttatttttaataagcctcttcctactagaacattttattttccttgttcaccatacaatcatgtactctttaacagaaattgcttttaaaaaatatctggaactatctttaaaaaaactttattaataatcatgtatttttactgatcacattttgaaatgcctaaaagactttattgttctaattatccagatgtacctttgtaaaatagctcttttatgaattagctgataaggctgtatgtttctggaacaaaatattggtcatctaaaaactttctgttttctggggtctgggaaaatagaaaataagatttcaaatattaaataagcttaaaggaaccaagcatgtgactttttatttgtattctggttgatttgtcttgtccaagttatattagaaaagttgaggagtcgaggagcctgtaattaattttcctgtcagtgactgtcagacatcttcctgcttattagagcatccctagcaacaaggctaaaccttcatgacagtgctggcaggtgggcttgccctagcatgtggggcaggtttgttgtttttttaatagctttattgagatattcacatatcatataattcatccatttaaagtgtataatcagatgggttttggtatattattgatttttaattgtggtgaaatatatatataacaaaatttgctattgtaactatttttaagtataaagttcagtgaggtaggccagcttttatgacgcacctgaagataactttggttttaatcctaccctaaatgaagcatatgcctctatttttcctgtccccagtgctgggcttcttcacataccaacatttctgtgcttttaccaacagcattttagctcagaaggctcgcttactttgggcatttgctgtattttggttttgaaatacttgtaatttgacttattcttgggataatattttagttttcagtcattcaagggcacatttggctgacggagctaataagcgtaataaaatgcttagtagtttataccatcttttagttaaacattttaaagattaagactattcaaatgtactttgcggaaattaacctgtttgtatgcctggctttgtttacaaacatatatctatatctatatatatagatacagatacagatacatatctggtggaacaaagaaatacctgtaccattcccacttgctctttgatagccacctcctaggaatggagacaataaaactctgtatttgcatgtg

SEQ ID NO: 175918 - DNA, 8753 bp, Homo sapiens
  Payload ID: 14537
  Gene Symbol: ARHGEF12
  Gene Name: Rho guanine nucleotide exchange factor (GEF) 12
  ENST ID: ENST00000532993
  CDS Start-End: 471-4796
cttcttatcatccctcttgtggtcagtaaaatcatctgacaaatgcctttccaaggatgtcgaatgtatatataaagaaaaagcttaggattgctaagggagtggtattttggtgaggatttcattttcttctactccatggaaacgagccttttgagcttttgcttgtctgctgatttgtccggtgatccaggtttcccctcaaaaaacctataaggcatggaagtattttgaaccgagagtcaccaacagataagaagcagaaagttgagcgcattgcatcacatgattttgaccccacagatagctcctccaagaagacaaagtctagttcagaggagagtagatccgagatatatggtcttgttcagcgttgcgtaatcatccagaaagatgacaatggatttgggctgacggtcagtggagacaatccagtcttcgtacagtctgtcaaagaagatggagcagccatgcgggctggagtacagacaggtgatcgaatcatcaaggtgaatggaactctggtgactcattcaaatcatctggaggtggtgaagctaatcaaatctggttcctatgtagctctcactgttcagggacgcccacctgggtcgccccagattccacttgccgactctgaagtagagccgtcagtcattggacatatgtctcccatcatgacatctcctcattcacctggagcatctgggaatatggagagaatcactagtcctgtgctcatgggggaggaaaacaatgtggttcataaccagaaagtagaaattctgagaaaaatgttacagaaagaacaggaacggctacagttattgcaggaagattacaaccgaacacctgcccaaagattgctaaaagagatccaagaggccaagaaacacattcctcagctgcaagagcagttatccaaagccacaggctctgctcaggatggagctgtagttacaccctccagacctttaggggacaccctaacagtcagtgaggcagaaacagatcctggagatgtactgggcaggactgactgtagcagtggagatgcttctcggcccagtagtgacaatgcagatagtcccaagagtggcccaaaagagagaatttatctagaggaaaacccagagaaaagtgaaacaattcaggacactgacactcaatcacttgtcggaagtccctcaacccgtatagcacctcatattattggagcagaagatgatgattttggtactgaacatgaacagatcaatggacagtgcagctgtttccagagcattgaattactaaaatctcgcccggctcatttggctgttttcttacaccatgtagtttcacaatttgaccctgcgactttgctctgttatctctattcagacctgtataaacataccaattccaaagaaactcgtcgcatcttccttgagtttcatcagttctttctagatcgatcagcacacctgaaagtttctgttcctgatgaaatgtctgcagatctagaaaagagaagacctgagctcattcctgaggatctgcatcgccactatatccaaactatgcaagaaagagtccatccagaagttcaaaggcacttagaagattttcggcagaaacgtagtatgggactgaccttggctgaaagcgagctgactaaacttgatgcagagcgagacaaggaccgattgactttggagaaggagcggacatgtgcagaacagattgttgccaaaattgaagaagtattgatgactgctcaggctgtagaggaagataagagctccaccatgcagtatgttattctcatgtatatgaagcatttgggagtaaaagtgaaagagcctcgaaatttggagcacaaacggggtcggattggatttcttcccaaaatcaagcaaagtatgaagaaagataaagaaggggaagaaaaagggaagcgaagaggattccccagcatcctgggacccccacggagaccaagccgtcatgacaacagtgcaattggcagagccatggaactacagaaggcgcgccaccctaagcacttatccacaccctcatctgtgagtcctgaacctcaggactctgccaagttgcgccagagtgggttagcaaatgaaggaacagacgctggatacctgcctgccaattccatgtcttctgtagcttcaggggcctctttttcccaggaaggagggaaagagaatgatacaggatcaaagcaagttggagaaacatcagcacctggagacaccttagatggcacacctcgtactctcaatactgtctttgatttcccaccacctccattagaccaagtgcaggaggaggaatgtgaagtagaaagggtgactgaacatgggacaccaaagccctttcgaaagtttgacagtgtagcttttggagaaagtcaaagtgaggatgaacaatttgaaaatgacttagagacagatccacccaactggcagcagcttgttagtcgagaagtgttactgggactaaaaccttgtgaaatcaaaagacaggaagtgattaatgaattgttctacactgaaagagctcatgttcgaacactgaaggttcttgatcaagtgttctatcagcgagtatccagagaaggaattctgtcaccctcagagctacggaaaattttttcaaacttggaagatattcttcaacttcatattggattgaatgaacaaatgaaggctgttcgaaagagaaatgagacctctgttatcgatcagattggggaagatttgctgacatggttcagcggaccaggagaggagaaattgaaacatgctgctgctaccttttgcagtaaccaacctttcgccctggaaatgatcaaatctcgtcagaaaaaggattctcgatttcagacttttgtgcaagatgctgaaagtaatccactgtgtcgtcgtcttcaactgaaggatattattcccactcaaatgcaaaggcttactaagtacccacttctgttggataatattgccaaatacacagaatggccaacagaaagggagaaggtgaagaaagctgcagatcactgtcgtcagatcttaaattatgtaaatcaggctgtcaaggaggcagaaaacaagcagcgcctagaagattatcagcgtcgccttgatacctccagcctgaagttgtcagagtacccaaatgttgaagagctcaggaatttggatttaacaaaaaggaagatgattcatgaagggccattggtttggaaggtgaatagagataaaactattgatttatacacgttgctgctggaagacattcttgtattgttacaaaagcaggatgatagactggttttaaggtgtcatagtaagattctggcatctacagctgatagcaaacacacgtttagccctgtcattaagttgagtacagtgttggttcgacaagtggcaacagataacaaagctttattcgtcatttccatgtcagacaatggcgctcagatttatgaactggtggcacagacagtttctgaaaagactgtctggcaggacctaatctgtcggatggctgcatcagtgaaggagcaatccacaaagccaattccattaccacagtcaacacctggcgaaggagataatgatgaagaagatccttcaaaattaaaagaggagcagcatggcatttcagtcactggtttgcagagtccagacagagatttgggattagaatctaccttaatatcgtcaaaacctcagtctcattcactgagtacctctgggaaatcagaggtacgtgatctgtttgtggctgagagacagtttgcaaaggaacaacatacagatgggacactaaaggaagttggagaagattatcaaatcgcaatcccagattcacacctgcctgtctcagaagaacggtgggcattggatgcactaagaaatttgggtttgttgaagcagttgctggtgcaacagctaggtttgactgagaagagcgttcaggaagactggcaacatttcccaagatacagaacagcctctcaggggccgcagacagacagtgtcatccagaactctgaaaatattaaggcctatcattctggtgaaggacatatgccctttagaactggaactggtgacattgcaacttgttacagtccacggacttcaactgaatcttttgctccacgggattcagtgggactggcaccccaggatagccaggcaagtaacattttagtaatggaccacatgattatgaccccagagatgcctaccatggagccagaagggggtcttgatgacagtggagagcacttttttgatgcccgtgaagcacatagtgatgagaatccatcagaaggtgatggagcagttaacaaggaagagaaggatgttaatttacgcatctcaggaaactatttgatccttgatggctatgacccagtgcaggagagttccacagatgaggaggttgcttcctcacttaccctgcagcccatgacaggcatccctgctgtggaatccacccaccagcagcaacattctcctcagaatactcactccgatggggcaatttcaccattcacccccgaatttctggtccagcagcgctggggagctatggagtattcctgttttgagatccagagtccctcctcttgtgcagattcacagagccagatcatggagtacattcataagatagaggctgaccttgaacacttaaagaaggtggaggaaagttacaccattctttgccaaaggctggctggatcagccctcacagacaagcactcagataaaagttagagccgcatgtcctggaggtgactgcaggttgttggatttggagtatcggccgtgtctcaccacatcctggctccagtgtggatgcagagagagtgtgacagaggatctgcctgtgaaccacctgggattagtcaagtcccaaggtgcccagagtgggactagttcttcacagtgtggcagctgcactaatctgtttgtgagggaatatccattccctcactctactctcctcactatcggaaattcattttgattcagaataaaaaccaaatgtatagagctttgggtgtaggatatgaaattgtacttagatttaagaaaaagagaaaatcagatgtatttatttgacttcattccgtatttgaaagcacattttaatttttatttgccttgttttgttttaattgagtagtgagagttttagacctttgtctttagtacacccaaggatcaactgctcctgaagcaaagaggtcaggatggagtatgcagaagttgggtagagaggttaagaagaggaggaagtgagacggggaagggaggagcaccttgcttcactatacagtattccaagctctctgctgtccagtaggctgcttctctgagggtcacctcaaaggtatgctatgccgtgtggctcttatgtgcccaggtggtgtggtcagagagtggatgggcttcctcccgccctgaggcaagcacctcttctctgtagctgggatcaaccacaattaataggaatcctcaacatactaaatagcaggcacttgaaaatgggtgtgttttcttccattgtcgtcttttctattgagggttgggatttgggtgggagaggaaagcaaattttattttcttgactataaatttgttattcttggtatcatttcatttttataattatacattagacattggcacttgtgtaaaactgtccctgcagattgagcaggaagtaaaaacaaatggaaatgcttcggatagtggcaggggtgggggttgctaaggaaagggtgggatgggagtgggtaaagagtttgggaaggttatctaactgaatcactactgagttgaatcatggctatcattagccacaggtactgctgattataaggccagtaaaattttagtacctggaggtttgactctaatttttgcactgatggtgccaaagggccctgagtcaaaaggatagccaagggtggagtggaaaaagatatggtgaaggcagaactgctcacaccagctccagaagcacgtcctctgacttcactgccgcagctctttccacacggggccgtgattgaccctaaaaattgcagaccagcacatacactggacactgcaggcaaggtgttggtaactgcctgctctaggatgaatagtagcgttagcagcaccctacagagggtaagtttcagaattgtaatttgagaactccttcaattatattgactttctttggttttccttgtgcattaggtatatattttttgaagtatttttgccaactaaaatgaagtctgtaaattctgttaataaacaaggagttcatccgttgctcacatctttcattggtgccctctgaactctgtgggttgctaggatgtaattttaatgcttccctgcagtccaaagatgattttttcaccacaaatggtaagggatgcccacctacttttataaacaccactgcaacttaacaagtttatttatctatgtccagatttctgtttctgtcctaaattgatctgtgtttttaggtggatcaacttggatctttagacctcatctataaattgaaattatatttttagtcataagccaagtacaatctaactcagaatgggattaaaaattttagaagcagaagctaatatataaatgaagtttgggatttggaactttctgtatctcttaggaggaacaagtaaaaaccaaatggttacattgtgctgctagaaataatgtcattctcaattaaaagggttacacctgtagccacttgacactaacaccatcgagggcaattaatcaggagaaaagtaaatataaaaactttgctcttaacgtcacacactacagggtaattatgtaattctctagcactcaattaagaagcttgtaggttagcaaaatttcagtttctctagttcagccagtgtcttgtccttagtaattatttgctttccctgcagttcaatttctccttggaactctaacaggactaactggaaaaatactttgaccatagctctagtacttccaaataaattcatatctagattttcaaacaaagccccaagatgaagtctaattctgaaaatatctcacaatttttgaatgttctttttatcttaccgacctaacttctcttttccctcccaacttggcctcccacacgttccatttcattttggccattatagtcacatccgtttgactttggttgtgacatcttcctttcaggatgatggaattagatgcagtctgtctttgagtgagactggtcaccatcagaggagttttttctaagtgacgtgactagaagttgaaatctacttccctgctaaagggcacaggggtggtgtacaaagaaagctaccttcccagagcaagcaggctgcattttagctatggaagtgacctgctgtgacactgtgctctcttctgtgggcttaatggttcctttgctatgaagtggcaaattacatgtagagtgtctccttccttttcagagaacagttaatcaaggcaaatcagcaagcccccaaagtgctgtaatttaacatcatgattaccaccttcgaagctatatattttgcatactttaaaatcacctaacttggactgcttgaattacattggcttttagaaccgaaattgtaactatgtattgtatttcatgggaggtatattttatgagctttttggctttcttttttcccacagcaactgccaatgaaggatgaatcccctttttaaaaagttgttgttgttgttgtttatttgattttgagttaggagggataatagagaagtccatttaaaaattatttttagaagctaaagaaagtaattatgcttcctgtgaattgtcttttactggcatctttgttttcctctttgatgttagtaaatttggtgtaatacgtggggcttccatatttcaaagtggaagctttcttctctgaagtcgatatatggttttgaattactagagctttggtcagtatttccttccctatatgtcacagagggcaccactgagaactgcgtgcataggacctcaaaatacaaaattagcagggcctcacagtcagcttcctcatggctagtttttcccccttatattacaatttttgttttataagtcatttttttcctgatatttccaccacttttcagagtcatctacaaaatttttctttcctcaagaaaagagttccttttgccttattccttatgccttccccactggtattgagggttttgataataaattggtaggaaaaaaaagtacctcctagaaggaagccttccccaccatttccaggtgccaactgctaagcagatatattccaaaaatggtaactgtcatgtgcacactgttggttatttttaataagcctcttcctactagaacattttattttccttgttcaccatacaatcatgtactctttaacagaaattgcttttaaaaaatatctggaactatctttaaaaaaactttattaataatcatgtatttttactgatcacattttgaaatgcctaaaagactttattgttctaattatccagatgtacctttgtaaaatagctcttttatgaattagctgataaggctgtatgtttctggaacaaaatattggtcatctaaaaactttctgttttctggggtctgggaaaatagaaaataagatttcaaatattaaataagcttaaaggaaccaa

SEQ ID NO: 175919 - DNA, 4159 bp, Homo sapiens
  Payload ID: 14538
  Gene Symbol: ARHGEF15
  Gene Name: Rho guanine nucleotide exchange factor (GEF) 15
  Uniprot ID: O94989
  ENST ID: ENST00000361926
  CDS Start-End: 111-2636
cctcgctccaaggggcagacaggacaggctgaaaatagcaactggttccaaaaagataaaggggatgactccagcagagcacctcactcctttgaagagcacagaggaagatgtcagcccagtcccttcctgcagcaacaccccccacgcagaagccccctcggatcatccgcccccgccctccttctcgttccagggctgcccagtccccagggcctccccacaatggctcctctccacaagaactaccccgaaactccaatgatgcaccaaccccaatgtgcacccccatcttctgggagcccccagctgcatccctcaagccccctgctcttttgcccccctcagcttctagagccagcctcgactcccagacttccccagactcaccttccagcacccccacacctagtccagtgtcccggcgctccgcctccccagaacctgctccccggtctccagtccccccacccaagccgtctgggtcaccctgcacgcctctgctccccatggctggagtcctggctcagaatggctctgcctcagctcctggcactgtgcggaggctggctggcaggtttgaagggggtgctgaaggccgggctcaggatgcagatgccccggagccaggtctccaagcgagagcagatgtgaatggggagagagaagctcccctcaccgggagtgggtcccaggagaacggtgctccagatgctggcctggcctgccctccctgctgcccctgtgtctgccacaccacccggcctggcctggagctcagatgggtgcctgtggggggctatgaggaggtccccagggtcccccgtcgggcctccccgctgcggacctctcgctcccgcccccaccctccaagcatcggtcaccctgccgttgtcctcacatcctaccgctccactgctgagcgcaaactcctgccactcctcaagcctcccaaaccaactcgtgtcaggcaggatgccaccattttcggggaccccccacagccagatcttgatctgctttctgaagatggaatccaaacaggggacagtcctgatgaagctcctcagaatactcctccagcaactgtggaggggagggaagaggaggggctagaggtgctgaaggagcagaattgggagctgcccctgcaggatgaacctctgtaccagacctaccgagcagccgtgctgtcagaggagctgtggggggtgggtgaggatgggagtccttctccagcaaatgctggagatgcacccaccttcccacgaccccctggacctcgcaacaccctgtggcaggagcttccggctgtgcaagccagcggtcttctggataccctcagcccccaggagaggcgcatgcaggagagtcttttcgaggtggtgacgtccgaggcttcctacctgcgctccctgcggctgctgaccgacaccttcgtgctgagccaggcactccgggacacgctcaccccccgtgatcaccacacactcttctccaatgtgcagcgagtccagggagtcagcgagcggtttctagcaacgctcctgtcccgtgtgcgctcttccccccacatcagcgacttgtgtgatgtggtgcatgcccacgctgtggggcctttctcggtgtatgtggattatgtgcggaaccagcagtatcaggaggagacctacagccgcctcatggacaccaacgtgcgcttctccgccgagctgcgccggctgcagagcctccctaagtgtgagcggctcccgctgccgtccttcctgctactgcccttccagcgcatcacccggctgcgcatgctgctgcagaatatcctgcgccagacagaagaggggtccagccgtcaggagaatgcccagaaggccctgggtgctgtcagcaagatcatcgagcgttgcagcgctgaggtggggcgcatgaagcagactgaagagctgatccggctcacccaaaggctgcgcttccacaaagtcaaggccctgcccctggtctcctggtcacggcgcctggaattccagggagagctgactgagttagggtgccggagggggggcgtgctctttgcctcgcgcccccgcttcacccctctttgcctgctgctctttagcgacctgctgctcatcactcagcctaagagtgggcagcggttacaggttctggactatgcccatcgctccctggtccaggcccagcaggttccggatccatctggaccccctaccttccgcctctcccttctcagcaaccaccagggccgccccacccaccgactactccaagcttcttccctatcagacatgcagcgctggctgggagccttcccaaccccaggcccccttccctgctccccagacaccatctatgaggactgtgactgttcccaggaactgtgttcagagtcgtctgcacctgccaagactgaaggacggagtctggagtccagggctgcccccaaacacctgcacaagacccctgaaggttggctgaaggggcttcctggggccttccctgcccagctggtgtgtgaagtcacaggggaacacgaaaggaggaggcaccttcgccagaaccagaggcttctcgaggctgttggatcttcttcaggcacccccaatgcccccccaccctaatgcaggctgaggagggggcacatgttgggagacacctaccagtgtggcacggagagaacaaagcccattcatccattggattcactgtcagtggagatactacctctcgtggcaaccatagagatcgagcttcaggacagagcagccaatgaaaacggccgcctgaacccacagcaataagaatgaatgaggatgccttgaatgtgtggccaatggagacagaggcttagtgcagagcagccaatgggtactgagctggctgagcctatggccaatgagtattcctgctatgctcagggccaaggaagacaaatctaggtcatggcagttgaaaaagggcctcattggagataaagtcgtaggataaaattgggaacaggaatgagcaggaagccaatcagccaaagaaaatggtgatctggacccaagagaccagtagtcaccctgcttgtttctgcagcaatgactggtcctgtcttttgagtctgggaaatactagtttccattcctggatgcttcctgtgccctctcaagccagttcttctcttccagaagaattcagagtatgtgtctcagaaaatctgtgtgtgtacatgtgcatgtgtagatatgtgtgtatatgtatcaggaaaggcattctgctgactgtggtgtgtgtgtggtgattgtgctcctgacccacaaatgactgagtgctccatttcttcctttaccccccatttttcctattattcgctccaagaaagatgctaagtctgagctccagaagagactgtgctgggtgtggcttggcacccaggggatgagagccctgagctttgggtctcttggaggctagggttctgtggcagttgcagggcaatgttatggagcagccaacggcctggcagaggagcccaagggactgaagatggccagtagctgggtcctgaggcccctgaagtctgcagacccttctccttgccccaaacactggcctccataattcctgcctgcagatctcccaacttgaactataatccaccagccagcctcagccttgagctttggaaccacattagatcctgcatctgggtgaagaaacgggagctgtggaccacaggccagccagtgaacctcctgggctttcttgcctttgtcctgatcctctcacagaaacactgggccaaacagtggggagagattggagagcgggtgtggctgcccaaccccatccagagcatctgcttccagatgagccagtgcctcgcatgataccagaggaggcgagggacagagacagcaaggcagacagtggctggcaggggggcccaggcccgggacgaggcctccccttcagctcaggcacagcaacttgcccaggactgacactgtcaccctgactgcaggaggcacagggactccgggagactcagagggcgaagagcactggcatttggcatgtccatgacattggagactcccctagcagggtgcctgacgtgtggggaaccctcagtaaatagtggtgcatttgtattgag

SEQ ID NO: 175920 - DNA, 4138 bp, Homo sapiens
  Payload ID: 14538
  Gene Symbol: ARHGEF15
  Gene Name: Rho guanine nucleotide exchange factor (GEF) 15
  Uniprot ID: O94989
  ENST ID: ENST00000421050
  CDS Start-End: 92-2617
actcagccctgggaggtgactgagagtggaggggattcaagggggatgactccagcagagcacctcactcctttgaagagcacagaggaagatgtcagcccagtcccttcctgcagcaacaccccccacgcagaagccccctcggatcatccgcccccgccctccttctcgttccagggctgcccagtccccagggcctccccacaatggctcctctccacaagaactaccccgaaactccaatgatgcaccaaccccaatgtgcacccccatcttctgggagcccccagctgcatccctcaagccccctgctcttttgcccccctcagcttctagagccagcctcgactcccagacttccccagactcaccttccagcacccccacacctagtccagtgtcccggcgctccgcctccccagaacctgctccccggtctccagtccccccacccaagccgtctgggtcaccctgcacgcctctgctccccatggctggagtcctggctcagaatggctctgcctcagctcctggcactgtgcggaggctggctggcaggtttgaagggggtgctgaaggccgggctcaggatgcagatgccccggagccaggtctccaagcgagagcagatgtgaatggggagagagaagctcccctcaccgggagtgggtcccaggagaacggtgctccagatgctggcctggcctgccctccctgctgcccctgtgtctgccacaccacccggcctggcctggagctcagatgggtgcctgtggggggctatgaggaggtccccagggtcccccgtcgggcctccccgctgcggacctctcgctcccgcccccaccctccaagcatcggtcaccctgccgttgtcctcacatcctaccgctccactgctgagcgcaaactcctgccactcctcaagcctcccaaaccaactcgtgtcaggcaggatgccaccattttcggggaccccccacagccagatcttgatctgctttctgaagatggaatccaaacaggggacagtcctgatgaagctcctcagaatactcctccagcaactgtggaggggagggaagaggaggggctagaggtgctgaaggagcagaattgggagctgcccctgcaggatgaacctctgtaccagacctaccgagcagccgtgctgtcagaggagctgtggggggtgggtgaggatgggagtccttctccagcaaatgctggagatgcacccaccttcccacgaccccctggacctcgcaacaccctgtggcaggagcttccggctgtgcaagccagcggtcttctggataccctcagcccccaggagaggcgcatgcaggagagtcttttcgaggtggtgacgtccgaggcttcctacctgcgctccctgcggctgctgaccgacaccttcgtgctgagccaggcactccgggacacgctcaccccccgtgatcaccacacactcttctccaatgtgcagcgagtccagggagtcagcgagcggtttctagcaacgctcctgtcccgtgtgcgctcttccccccacatcagcgacttgtgtgatgtggtgcatgcccacgctgtggggcctttctcggtgtatgtggattatgtgcggaaccagcagtatcaggaggagacctacagccgcctcatggacaccaacgtgcgcttctccgccgagctgcgccggctgcagagcctccctaagtgtgagcggctcccgctgccgtccttcctgctactgcccttccagcgcatcacccggctgcgcatgctgctgcagaatatcctgcgccagacagaagaggggtccagccgtcaggagaatgcccagaaggccctgggtgctgtcagcaagatcatcgagcgttgcagcgctgaggtggggcgcatgaagcagactgaagagctgatccggctcacccaaaggctgcgcttccacaaagtcaaggccctgcccctggtctcctggtcacggcgcctggaattccagggagagctgactgagttagggtgccggagggggggcgtgctctttgcctcgcgcccccgcttcacccctctttgcctgctgctctttagcgacctgctgctcatcactcagcctaagagtgggcagcggttacaggttctggactatgcccatcgctccctggtccaggcccagcaggttccggatccatctggaccccctaccttccgcctctcccttctcagcaaccaccagggccgccccacccaccgactactccaagcttcttccctatcagacatgcagcgctggctgggagccttcccaaccccaggcccccttccctgctccccagacaccatctatgaggactgtgactgttcccaggaactgtgttcagagtcgtctgcacctgccaagactgaaggacggagtctggagtccagggctgcccccaaacacctgcacaagacccctgaaggttggctgaaggggcttcctggggccttccctgcccagctggtgtgtgaagtcacaggggaacacgaaaggaggaggcaccttcgccagaaccagaggcttctcgaggctgttggatcttcttcaggcacccccaatgcccccccaccctaatgcaggctgaggagggggcacatgttgggagacacctaccagtgtggcacggagagaacaaagcccattcatccattggattcactgtcagtggagatactacctctcgtggcaaccatagagatcgagcttcaggacagagcagccaatgaaaacggccgcctgaacccacagcaataagaatgaatgaggatgccttgaatgtgtggccaatggagacagaggcttagtgcagagcagccaatgggtactgagctggctgagcctatggccaatgagtattcctgctatgctcagggccaaggaagacaaatctaggtcatggcagttgaaaaagggcctcattggagataaagtcgtaggataaaattgggaacaggaatgagcaggaagccaatcagccaaagaaaatggtgatctggacccaagagaccagtagtcaccctgcttgtttctgcagcaatgactggtcctgtcttttgagtctgggaaatactagtttccattcctggatgcttcctgtgccctctcaagccagttcttctcttccagaagaattcagagtatgtgtctcagaaaatctgtgtgtgtacatgtgcatgtgtagatatgtgtgtatatgtatcaggaaaggcattctgctgactgtggtgtgtgtgtggtgattgtgctcctgacccacaaatgactgagtgctccatttcttcctttaccccccatttttcctattattcgctccaagaaagatgctaagtctgagctccagaagagactgtgctgggtgtggcttggcacccaggggatgagagccctgagctttgggtctcttggaggctagggttctgtggcagttgcagggcaatgttatggagcagccaacggcctggcagaggagcccaagggactgaagatggccagtagctgggtcctgaggcccctgaagtctgcagacccttctccttgccccaaacactggcctccataattcctgcctgcagatctcccaacttgaactataatccaccagccagcctcagccttgagctttggaaccacattagatcctgcatctgggtgaagaaacgggagctgtggaccacaggccagccagtgaacctcctgggctttcttgcctttgtcctgatcctctcacagaaacactgggccaaacagtggggagagattggagagcgggtgtggctgcccaaccccatccagagcatctgcttccagatgagccagtgcctcgcatgataccagaggaggcgagggacagagacagcaaggcagacagtggctggcaggggggcccaggcccgggacgaggcctccccttcagctcaggcacagcaacttgcccaggactgacactgtcaccctgactgcaggaggcacagggactccgggagactcagagggcgaagagcactggcatttggcatgtccatgacattggagactcccctagcagggtgcctgacgtgtggggaaccctcagtaaatagtggtgcatttgtattg

SEQ ID NO: 175921 - DNA, 537 bp, Homo sapiens
  Payload ID: 14538
  Gene Symbol: ARHGEF15
  Gene Name: Rho guanine nucleotide exchange factor (GEF) 15
  ENST ID: ENST00000583529
  CDS Start-End: 189-537
agaatcacaggaacacacacttggaaacctcagccctgcattcctcgctccaaggggcagacaggacaggctgaaaatagcaactggttccaaaaagataaagccctgggaggtgactgagagtggaggggattcaagggggatgactccagcagagcacctcactcctttgaagagcacagaggaagatgtcagcccagtcccttcctgcagcaacaccccccacgcagaagccccctcggatcatccgcccccgccctccttctcgttccagggctgcccagtccccagggcctccccacaatggctcctctccacaagaactaccccgaaactccaatgatgcaccaaccccaatgtgcacccccatcttctgggagcccccagctgcatccctcaagccccctgctcttttgcccccctcagcttctagagccagcctcgactcccagacttccccagactcaccttccagcacccccacacctagtccagtgtcccggcgctccgcctccccagaacctgctccccggtctc

SEQ ID NO: 175922 - DNA, 668 bp, Homo sapiens
  Payload ID: 14538
  Gene Symbol: ARHGEF15
  Gene Name: Rho guanine nucleotide exchange factor (GEF) 15
  ENST ID: ENST00000581809
  CDS Start-End: 1-276
gcctccccgctgcggacctctcgctcccgcccccaccctccaagcatcggtcaccctgccgttgtcctcacatcctaccgctccactgctgagcgcaaactcctgccactcctcaagcctcccaaaccaactcgtgtcaggcaggatgccaccattttcggggaccccccacagccagatcttgatctgctttctgaagatggaatccaaacaggggacagtcctgatgaagctcctcagaatactcctccagcaactgtggaggggaggtactgaacacccccacccctactccctggttctctccccaccatgcttctacctgagggcagactaaccttcagctccagctaaatcccacctccacaaagaaggccgggcacggtggcttacatctgtaatcccagcactctgggaggccgcggcagaaggatcacctgaagtcaggagttcaagatcagcctggctaacgtggtgaaaccctgtctctactaaaaatacaaaaattagccgggcatggtgacgggtgcctgtaatcccagctactcgggaggctgaggcaggagaatggcttggacccagggagatggaggttgcagggagccaagagcgtgccactgcactccagcctggtcgacaagagagaaactccatctcaaaaaaaaaaa

SEQ ID NO: 175923 - DNA, 714 bp, Homo sapiens
  Payload ID: 14538
  Gene Symbol: ARHGEF15
  Gene Name: Rho guanine nucleotide exchange factor (GEF) 15
  ENST ID: ENST00000579439
  CDS Start-End: 92-714
actcagccctgggaggtgactgagagtggaggggattcaagggggatgactccagcagagcacctcactcctttgaagagcacagaggaagatgtcagcccagtcccttcctgcagcaacaccccccacgcagaagccccctcggatcatccgcccccgccctccttctcgttccagggctgcccagtccccagggcctccccacaatggctcctctccacaagaactaccccgaaactccaatgatgcaccaaccccaatgtgcacccccatcttctgggagcccccagctgcatccctcaagccccctgctcttttgcccccctcagcttctagagccagcctcgactcccagacttccccagactcaccttccagcacccccacacctagtccagtgtcccggcgctccgcctccccagaacctgctccccggtctccagtccccccacccaagccgtctgggtcaccctgcacgcctctgctccccatggctggagtcctggctcagaatggctctgcctcagctcctggcactgtgcggaggctggctggcaggtttgaagggggtgctgaaggccgggctcaggatgcagatgccccggagccaggtctccaagcgagagcagatgtgaatggggagagagaagctcccctcaccgggagtgggtcccaggagaacggtgctccagatgctggcctggcctgccctcc

SEQ ID NO: 175924 - DNA, 2219 bp, Homo sapiens
  Payload ID: 14539
  Gene Symbol: ARHGEF16
  Gene Name: Rho guanine nucleotide exchange factor (GEF) 16
  Uniprot ID: Q5VV41
  ENST ID: ENST00000378371
  CDS Start-End: 428-1693
cccatttcaggtgggacttgtggcataggagaggtcttgggactggtgcccagcctggggcagtcccctcccaaagcctccctctcccacacagccgtgagagcctgtgggcctagaggactcagctggcgggttgcagggaggcgcagccttttgcaatcccccagggccacaggttaccctccttctctctctagacccccagctctaccaggagatccaggagcggggcctgaacaccagccaggagtctgatgacgacatcctcgatgagtcctccagccccgagggaacccagaaggtggacgccaccattgtggtcaagagctaccggcccgcccaggtcacctggagccagctcccagaggtggtggaattgggcatcctggaccagctctccactgaggagcggaaaaggcaggaggccatgttcgagatcctcacgtcggagttctcctaccagcacagcctgagcatcctggtggaggagttcctgcagtccaaggagctgcgggcgaccgtgacccagatggagcaccaccacctcttctccaacatcctggatgtcctgggtgccagtcagaggttcttcgaggacctggagcagcggcacaaggcccaggtgctggtcgaggacatcagtgacatcctggaggagcacgctgagaagcacttccacccctacatcgcctactgctccaacgaggtctaccaacagcgcacgctgcagaagctgataagcagcaacgccgccttccgagaggccctgagagagattgagaggcggccggcgtgcgggggcctgcccatgctctccttcctgatcctccccatgcagcgggtgacccggctgcccctcctgatggatacgctctgcctcaagacccagggccactccgaaaggtacaaggctgccagccgtgcactgaaggccatcagcaagctggtgaggcagtgcaacgagggggcccacaggatggagcgcatggagcagatgtacacgctgcacacacagctggacttcagcaaggtcaagtccctcccactgatctctgcctcccggtggctgctgaagcgcggagagctgttcttagtggaagaaaccggactttttcgaaaaattgccagccggccaacgtgctaccttttcctgttcaacgatgtcctggttgtgaccaagaagaagagcgaggagagctacatggtccaggactacgcccagatgaaccacatccaggtggagaagatagagccgtctgagctccctctgcccgggggcggcaaccgtagctcctccgtgccccaccccttccaggtgaccctgcttcgcaacagcgagggccgccaggagcagctcctgctctcctcggactccgcgagtgaccgggcacggtggatcgtggcgctcacacacagtgagagacagtggcagggcctctccagcaaaggagacctgccccaggtggagatcaccaaggccttcttcgcgaagcaagcagacgaggtcacactgcagcaggcggacgtggtcctggttctgcagcaggaggatgggtggctctatggcgagaggctccgggacggagagacgggatggttccccgaggactttgcccgcttcatcaccagccgtgtggccgtggagggcaatgtccgcaggatggagcgtctgcgggtggagacggacgtgtagccctggcgaggccagccggcggcagcacagcctgtctccaatcagcaagtggtcgtgcctggctctagagagcgtggggagctggtctcaaggacccagcatggttccctggggcttcccaagagcctgtggctgtggtgccgggctccagacacttcacggaaggaagatcacatgtccccagagaggcacccccaggcaagctcgagggggccacaccgtgtcccagggagcccagcctattcccgttggctggctgggcccctcagctgctgggccccacctccccactgcacccagggggcaactccacctggactgatgggcacaggaggcaccaatagcgattattgggggcaatgcgaggtctcctcctatgcccttcctacccctgagtgggacaagaagggccctgagtgcccaggagtgccccacgttctgagaaggggccggccggagggaggggacccggcagggagatttcggttttgaggtttctaaatacattaaagttatttcttaagaa

SEQ ID NO: 175925 - DNA, 2211 bp, Homo sapiens
  Payload ID: 14539
  Gene Symbol: ARHGEF16
  Gene Name: Rho guanine nucleotide exchange factor (GEF) 16
  Uniprot ID: Q5VV41
  ENST ID: ENST00000378373
  CDS Start-End: 420-1685
cgtgaggccctgtggagctgacatctattgggcacagcttcgcatgtggagccgagaggtctctggggtcccagggcagaatcgccgtgggcaacacctgccccggctgacagctgcggtttctgtgtctctcttttgtgcagaagacgctggggaggaaacgtgggcacaagggttccttcaaggacgacccccagctctaccaggagatccaggagcggggcctgaacaccagccaggagtctgatgacgacatcctcgatgagtcctccagccccgagggaacccagaaggtggacgccaccattgtggtcaagagctaccggcccgcccaggtcacctggagccagctcccagaggtggtggaattgggcatcctggaccagctctccactgaggagcggaaaaggcaggaggccatgttcgagatcctcacgtcggagttctcctaccagcacagcctgagcatcctggtggaggagttcctgcagtccaaggagctgcgggcgaccgtgacccagatggagcaccaccacctcttctccaacatcctggatgtcctgggtgccagtcagaggttcttcgaggacctggagcagcggcacaaggcccaggtgctggtcgaggacatcagtgacatcctggaggagcacgctgagaagcacttccacccctacatcgcctactgctccaacgaggtctaccaacagcgcacgctgcagaagctgataagcagcaacgccgccttccgagaggccctgagagagattgagaggcggccggcgtgcgggggcctgcccatgctctccttcctgatcctccccatgcagcgggtgacccggctgcccctcctgatggatacgctctgcctcaagacccagggccactccgaaaggtacaaggctgccagccgtgcactgaaggccatcagcaagctggtgaggcagtgcaacgagggggcccacaggatggagcgcatggagcagatgtacacgctgcacacacagctggacttcagcaaggtcaagtccctcccactgatctctgcctcccggtggctgctgaagcgcggagagctgttcttagtggaagaaaccggactttttcgaaaaattgccagccggccaacgtgctaccttttcctgttcaacgatgtcctggttgtgaccaagaagaagagcgaggagagctacatggtccaggactacgcccagatgaaccacatccaggtggagaagatagagccgtctgagctccctctgcccgggggcggcaaccgtagctcctccgtgccccaccccttccaggtgaccctgcttcgcaacagcgagggccgccaggagcagctcctgctctcctcggactccgcgagtgaccgggcacggtggatcgtggcgctcacacacagtgagagacagtggcagggcctctccagcaaaggagacctgccccaggtggagatcaccaaggccttcttcgcgaagcaagcagacgaggtcacactgcagcaggcggacgtggtcctggttctgcagcaggaggatgggtggctctatggcgagaggctccgggacggagagacgggatggttccccgaggactttgcccgcttcatcaccagccgtgtggccgtggagggcaatgtccgcaggatggagcgtctgcgggtggagacggacgtgtagccctggcgaggccagccggcggcagcacagcctgtctccaatcagcaagtggtcgtgcctggctctagagagcgtggggagctggtctcaaggacccagcatggttccctggggcttcccaagagcctgtggctgtggtgccgggctccagacacttcacggaaggaagatcacatgtccccagagaggcacccccaggcaagctcgagggggccacaccgtgtcccagggagcccagcctattcccgttggctggctgggcccctcagctgctgggccccacctccccactgcacccagggggcaactccacctggactgatgggcacaggaggcaccaatagcgattattgggggcaatgcgaggtctcctcctatgcccttcctacccctgagtgggacaagaagggccctgagtgcccaggagtgccccacgttctgagaaggggccggccggagggaggggacccggcagggagatttcggttttgaggtttctaaatacattaaagttatttcttaagaa

SEQ ID NO: 175926 - DNA, 3061 bp, Homo sapiens
  Payload ID: 14539
  Gene Symbol: ARHGEF16
  Gene Name: Rho guanine nucleotide exchange factor (GEF) 16
  Uniprot ID: Q5VV41
  ENST ID: ENST00000378378
  CDS Start-End: 406-2535
gaaggcgcaggcaccgggcggcggcggctcggcgggaatcgagaggcgcgatccagtccgggcgatcacgtgggctccagccggcccaggtggggctgtgacctgtgacgcaggcggcgccgccacaggtgcccgggacgcgccccgccccctccccggccctccccgcccgggccctcggacccggagcagccccgcccgcccagcgcccacctgcggggccgcagccgccgccctccagccagaccgcgcaggaagcggaggaggcgccccgggccggaccgcgctgccgcaggagcgaagcggctgcaggacaggacaggacccggcgctggaagctgcaccgccagcgcgccgcccctccgtccctccgccccgcggcgcaggaccccacagccgcccagcatggcccagcggcactcagacagctccttggaggagaagctcctgggacaccgcttccactcggagctccggctcgatgccggggggaacccagcctccgggctcccaatggtccgtggctccccgcgtgttagagacgatgccgccttccagccccaggtcccggcacccccacagcctcggcccccggggcacgaggagccatggcccatcgtcctgagcacagagagcccggcggccctcaagctgggcacccaacagctgatccctaagagcctggctgtggccagcaaggcaaagaccccagcccgccaccagagcttcggggcggctgtacttagcagggaggccgcccggcgggaccctaagctcctcccagcccccagcttctccctggatgacatggacgtggacaaggaccccgggggcatgctgaggcggaacctgcggaaccaatcctaccgggcggccatgaagggcctggggaagccaggtggccagggagatgccatccagctaagccctaagctccaggctctggctgaggaacccagccagcctcatactcggagcccggccaaaaacaagaagacgctggggaggaaacgtgggcacaagggttccttcaaggacgacccccagctctaccaggagatccaggagcggggcctgaacaccagccaggagtctgatgacgacatcctcgatgagtcctccagccccgagggaacccagaaggtggacgccaccattgtggtcaagagctaccggcccgcccaggtcacctggagccagctcccagaggtggtggaattgggcatcctggaccagctctccactgaggagcggaaaaggcaggaggccatgttcgagatcctcacgtcggagttctcctaccagcacagcctgagcatcctggtggaggagttcctgcagtccaaggagctgcgggcgaccgtgacccagatggagcaccaccacctcttctccaacatcctggatgtcctgggtgccagtcagaggttcttcgaggacctggagcagcggcacaaggcccaggtgctggtcgaggacatcagtgacatcctggaggagcacgctgagaagcacttccacccctacatcgcctactgctccaacgaggtctaccaacagcgcacgctgcagaagctgataagcagcaacgccgccttccgagaggccctgagagagattgagaggcggccggcgtgcgggggcctgcccatgctctccttcctgatcctccccatgcagcgggtgacccggctgcccctcctgatggatacgctctgcctcaagacccagggccactccgaaaggtacaaggctgccagccgtgcactgaaggccatcagcaagctggtgaggcagtgcaacgagggggcccacaggatggagcgcatggagcagatgtacacgctgcacacacagctggacttcagcaaggtcaagtccctcccactgatctctgcctcccggtggctgctgaagcgcggagagctgttcttagtggaagaaaccggactttttcgaaaaattgccagccggccaacgtgctaccttttcctgttcaacgatgtcctggttgtgaccaagaagaagagcgaggagagctacatggtccaggactacgcccagatgaaccacatccaggtggagaagatagagccgtctgagctccctctgcccgggggcggcaaccgtagctcctccgtgccccaccccttccaggtgaccctgcttcgcaacagcgagggccgccaggagcagctcctgctctcctcggactccgcgagtgaccgggcacggtggatcgtggcgctcacacacagtgagagacagtggcagggcctctccagcaaaggagacctgccccaggtggagatcaccaaggccttcttcgcgaagcaagcagacgaggtcacactgcagcaggcggacgtggtcctggttctgcagcaggaggatgggtggctctatggcgagaggctccgggacggagagacgggatggttccccgaggactttgcccgcttcatcaccagccgtgtggccgtggagggcaatgtccgcaggatggagcgtctgcgggtggagacggacgtgtagccctggcgaggccagccggcggcagcacagcctgtctccaatcagcaagtggtcgtgcctggctctagagagcgtggggagctggtctcaaggacccagcatggttccctggggcttcccaagagcctgtggctgtggtgccgggctccagacacttcacggaaggaagatcacatgtccccagagaggcacccccaggcaagctcgagggggccacaccgtgtcccagggagcccagcctattcccgttggctggctgggcccctcagctgctgggccccacctccccactgcacccagggggcaactccacctggactgatgggcacaggaggcaccaatagcgattattgggggcaatgcgaggtctcctcctatgcccttcctacccctgagtgggacaagaagggccctgagtgcccaggagtgccccacgttctgagaaggggccggccggagggaggggacccggcagggagatttcggttttgaggtttctaaatacattaaagttatttcttaagaa

SEQ ID NO: 175927 - DNA, 576 bp, Homo sapiens
  Payload ID: 14539
  Gene Symbol: ARHGEF16
  Gene Name: Rho guanine nucleotide exchange factor (GEF) 16
  ENST ID: ENST00000418137
  CDS Start-End: 35-576
gtgtcctccggtcccctctgcctcaggcagctgcatgtttgcctctgacctcctcagggctttagattgctgccctggggcgggaagctccggcctcctcccccagctgggcccccgacagctcctggcattcacagtgaactgtctggggaatcatcgctatttggggttcttcgaggacctggagcagcggcacaaggcccaggtgctggtcgaggacatcagtgacatcctggaggagcacgctgagaagcacttccacccctacatcgcctactgctccaacgaggtctaccaacagcgcacgctgcagaagctgataagcagcaacgccgccttccgagaggccctgagagagattgagaggcggccggcgtgcgggggcctgcccatgctctccttcctgatcctccccatgcagcgggtgacccggctgcccctcctgatggatacgctctgcctcaagacccagggccactccgaaaggtacaaggctgccagccgtgcactgaaggccatcagcaagctggtgaggcagtgcaacgagggggcccacaggatggagcgcatggagca

SEQ ID NO: 175928 - DNA, 836 bp, Homo sapiens
  Payload ID: 14539
  Gene Symbol: ARHGEF16
  Gene Name: Rho guanine nucleotide exchange factor (GEF) 16
  ENST ID: ENST00000445297
  CDS Start-End: 397-836
ctccgcacctctccatctgccgggaagatctgtgggacaagatccccccccgccctctggcctctccctctggatgccccatgctctttctgggctgctttggggctctggcggctggggggagcggggggctgacccaaggcgggttacacagagaggaaggtgacggggataggccctcggcaggacaggcctactccaggatcggacctacctgagccctgtggggtggctgtccatgttggccctggtccatcaggaggaggaaagaagggagactttggcccaggcttctaggacgtgtgaccgagagctcctgggcctgtgtccccccaggtggtggaattgggcatcctggaccagctctccactgaggagcggaaaaggcaggaggccatgttcgagatcctcacgtcggagttctcctaccagcacagcctgagcatcctggtggaggagttcctgcagtccaaggagctgcgggcgaccgtgacccagatggagcaccaccacctcttctccaacatcctggatgtcctgggtgccagtcagaggttcttcgaggacctggagcagcggcacaaggcccaggtgctggtcgaggacatcagtgacatcctggaggagcacgctgagaagcacttccacccctacatcgcctactgctccaacgaggtctaccaacagcgcacgctgcagaagctgataagcagcaacgccgccttccgagaggccctgagagagattgagaggcggccggcgtgcgggggcctgcccatgctctccttcctgatcctccccatgcagcgggtgacccggctgcccctcctgatgga

SEQ ID NO: 175929 - DNA, 7853 bp, Homo sapiens
  Payload ID: 14540
  Gene Symbol: ARHGEF17
  Gene Name: Rho guanine nucleotide exchange factor (GEF) 17
  Uniprot ID: Q96PE2
  ENST ID: ENST00000263674
  CDS Start-End: 351-6542
gagcgagcagccaagggcgttgggcaggcggacgcagagtcgaggaaccaagcgctgggatcccgcccaggcggtgccgcggtgcccctggtcgctccagccgcggcgggggctgggcctgggggtcggcgctgaggcgggaggggccgcccgggatggagacgttgcggccggtggccacagaaacttgagccgcggcagagaaacctctgctccggtctctgcgtcctcttcccacactcccgtgcgctgctttcggcgtgggccgctgcgctcctagggagtgggggcgcagggggggttggccgcggctgcccgaggccagcccccccggagtgagttacgccactatggcggacggggcaccccggccccagctttaccgcagcgtctcgttcaagctgctggagcgctggagcggcggccccgggctgagggaggaggacacggacacccccggcttgaggcgacgcgcctcgtgccggccgaccacggctgcccggggccagccctctcggcgcgtgtccaagctggcgtctgggcccctggccgcccccgcgcagccgcgcccgctccgcagcctctcgccgtcggttcgccagctctcccggcgcttcgacgcgccgcgtctggacgacggctccgctgggacccgagacggaggcgtcttacccgcggccgcggaagaagcggccgagggcccagcgcgaggagcctggcccagcgtcaccgagatgcgcaagctcttcggcggtcctggctccaggaggcccagcgccgactctgaatccccaggaacgcccagccccgacggtgccgcgtgggagcctccggctcgggagtcgcggcagccaccgacgccaccccctcggacatgcttccccctggcgggtctgcgttcggcgcggcccctgaccgggccggagaccgaagggaggctgcgccggccgcagcagcaacaggagcgggcgcagcgtccagcggatggtttacattcttggcatatcttctcccaaccgcaggccggggcccgggcctcctgctcctcctcctccatcgccgcctcctatcctgtcagccgcagtcgtgctgccagctccagcgaggaggaagaggagggcccgccgcagctgcctggagcccagagtccggcctaccacggcggccactcctcgggcagtgacgacgaccgagacggtgagggcggccaccgctggggagggaggcccgggctcaggcctggaagctccctattggatcaggactgcaggcctgacagtgatgggttaaatctaagcagcatgaactcagcaggggtttctgggagccctgagcccccaacatctccaagagcccctagagaagaaggactccgggagtggggtagtggctctccgccctgcgtcccaggtccccaggagggacttcggcctatgtctgactctgtgggaggagctttccgtgtggccaaggtgagctttccctcgtacctggccagccccgcaggctcccgcggtagcagccgttattccagcacggagaccctcaaggacgacgacctatggtctagtaggggttctgggggctggggcgtgtaccgctcccctagctttggagctggggaagggctcctgcggtcccaggctcgaacccgtgccaaaggacctggaggcacctctagggcattgagggatggaggatttgagcctgaaaagagtcgacagcggaagtccctgtcaaatccagatatcgcctcagagaccctgacgcttctcagtttcctgcgctcagacctttcagagctgagggtccgaaaacctggtgggagctccggggaccgtggaagcaaccccctagatggcagagactcaccatccgcaggtggccctgtggggcaacttgaacccatacccatcccagccccagcatcacctggcacgcgccccacactcaaggacttgacagccactctgcggagagcaaagtcattcacctgctctgagaagcccatggcccgccgcctgccccgcaccagtgctctgaagtccagctcctccgagctcctgctcacaggccctggtgccgaggaggatccgctgcccctcatcgtccaggaccaatatgtgcaggaggcccgccaggtttttgagaagatccagcgcatgggtgcccaacaagatgatggaagcgatgccccccctggaagccctgactgggcaggggatgtgacccgagggcagcggtcccaggaggagctctcaggccctgagtccagtctgacagatgaaggcattggggcagaccctgagcctcctgttgcagcattttgcggcctgggtaccacagggatgtggcgacctctttcctcatcctcggcccagacgaaccaccatggccctgggactgaggacagtctgggcgggtgggccctggtgtcgcctgagacccctcccacaccaggtgccctccgccgacgacgcaaagtcccaccttcaggttctggtgggagcgaattgagcaatggggaggcaggggaggcctacaggtccctgagtgacccaattcctcagcgccaccgggctgccacctctgaagagcctactgggttctctgtggacagcaacctcctgggctcactgagccccaagacagggctccctgccacctcagccatggatgagggcttgaccagtggtcacagtgactggtctgtgggcagtgaagagagcaagggatatcaggaggttattcagagcatagttcaggggcctggcaccctggggcgtgtggtggacgacaggattgctggcaaagcccccaagaagaaatccctgagtgaccccagccgccgtggggagctggctgggcctggattcgagggccctggaggggagcccatccgagaagttgagcccatgctgcctccatccagcagcgagcccatccttgtagagcagcgggcagagccagaagaacctggtgccaccaggagccgggcacagtctgaaagggccctacctgaggctctgcctccccctgccactgcccaccgaaactttcaccttgaccccaagctggctgacattctgtccccgaggctaatccgccgaggctccaagaagcgcccagctcggagtagtcaccaggagcttcggagagacgagggcagtcaggaccagactggcagcctgtctcgggcccggccctcctccagacacgttcgccatgccagtgtgcccgccacatttatgcctattgtggtgcctgagccaccaacttctgttggtccccctgtggctgtgccagaacccataggcttccctacccgagcccatcccacgttgcaggcaccatcgctcgaggacgtcaccaagcagtacatgctgaacctgcactccggtgaggtccctgccccagtgccagtggacatgccctgcttgcctctggctgcaccgccctctgctgaggccaagccccctgaggcagctcggcctgcagatgagcctacccctgccagcaagtgctgcagcaagccacaggtggacatgcggaagcacgtggccatgaccctgctggacacagagcagtcgtatgtggagtcgctgcgcaccctgatgcagggctacatgcagccgctgaagcagccagagaactccgtgctctgtgacccttcactggtggacgagatcttcgaccagatccccgagctcctggagcaccacgagcaattcctggagcaggttcggcactgcatgcagacctggcatgcccagcagaaggtgggagccctgctcgtccagtcgttctccaaggatgtcctagtaaacatctattctgcctatatcgataacttcctcaatgcaaaggatgctgtgcgtgtggccaaggaggcgaggcctgcctttctcaagttcctagagcaaagcatgcgtgagaacaaggagaagcaggcgctgtctgacctcatgatcaagcctgtgcagcggatcccacgctacgagcttctggtgaaggacctcctgaagcatacacctgaggaccacccggaccatccactcctgctggaggcgcagcggaacatcaagcaggtggctgagcgcatcaacaagggtgtgcggagtgccgaggaggcggagcgccatgcccgtgtgctgcaggagatagaggctcacatcgagggcatggaggatctccaggcccctctgcggcggttcctgagacaggagatggtcattgaagtgaaggcgatcggtggcaagaaggaccggtctctcttcctgttcacggacctcatcgtctgcaccactctgaagcgaaagtcaggctccctgcggcgcagctccatgagcctgtacacggcagccagtgtcattgacacagccagcaagtacaagatgctgtggaagctgccgctggaagacgcagacatcatcaaaggggcatcccaagccaccaatcgggagaacatccagaaggccatcagccgccttgatgaggacctcaccaccctgggccaaatgagcaagctctctgagagccttggtttcccccaccagagcctggacgatgcactgcgggacctctcagctgccatgcaccgggacctgtcggagaagcaggcgctgtgctacgcgctttccttcccgccaaccaagctggagctgtgcgccactcggcccgagggcaccgactcctacatttttgagttccctcaccctgacgcccgccttggttttgaacaggccttcgatgaggccaagaggaagctggcatccagcaaaagctgtctagaccctgagttcctgaaggccatccccatcatgaaaacccgcagtggcatgcagttctcctgtgcggctcccaccctgaacagctgcccggagccctcgcctgaggtatgggtctgcaacagcgacggctacgtgggccaggtgtgcctgctgagcctgcgcgccgagccggacgtggaggcctgcatcgccgtctgttccgcccgcatcctctgcatcggggcggtgcccgggctgcagcctcgctgccaccgggagcctcctccgtcgctgaggagtcctccagagacggcaccggagcccgccgggccggagctggacgtcgaggccgctgcagacgaggaagccgcgacgctcgcggagccggggccgcagccctgccttcacatctccattgcaggctcgggcttggagatgacgccgggcctcggcgagggtgacccccgcccagagctggtgccctttgacagtgactctgacgatgagtcttcgcccagcccctcggggacgctgcagagccaggccagccggtccaccatctcctccagctttggcaatgaggagaccccgagttccaaggaggccacggcagagaccaccagctcagaggaggagcaggagccaggcttcctgccactgtctggctcctttgggcctggtggtccctgcggcaccagcccaatggatgggagagcccttcgccgctccagccacggctccttcacccggggcagccttgaggacctgctgagtgtcgaccctgaggcctaccagagctccgtgtggctgggcactgaggatggctgtgtccacgtgtaccagtcctccgacagcatccgtgaccgcaggaacagcatgaagctccagcatgcggcctctgtgacctgcatcttgtatctgaataaccaggtgtttgtgtctctggccaatggagagcttgtggtctaccaaagggaagcaggccatttctgggacccccagaacttcaaatcagtgaccttgggcacccaggggagccccatcaccaagatggtatctgtgggtgggcggctgtggtgtggctgccagaaccgagtccttgtcctgagccctgacacgctgcagctggagcacatgttttacgtgggtcaggattcaagccgctgcgtggcttgcatggtggactccagcctgggtgtgtgggtgacattgaaaggtagtgcccacgtgtgtctctaccatccagacacctttgagcagctggcagaagtagacgtcactcctcccgtgcacaggatgctggcaggctcggatgccatcatccggcagcacaaggctgcctgtctgcgaatcacagcgctgctggtgtgtgaggagctgctgtgggtgggcaccagtgctggtgtcgtcctcaccatgcccacttcgcccggtactgtcagctgcccacgggcaccactcagtcccacaggcctcggccagggacacaccggccacgtccgcttcttggctgcagtccagctgccagatggcttcaacctgctctgcccaaccccaccacctcccccagacacaggccccgagaagctgccatcactggagcaccgggactccccttggcaccgaggccccgcccctgccaggcctaaaatgctggttatcagtggaggtgatggctatgaggacttccgactcagcagtgggggcggcagcagcagtgagactgtgggtcgagacgacagcacaaaccacctcctcctgtggagggtgtgaccctgtctgccgtggcccaggactcgcccgcccacctgccttcagcctgcttgcctctccctagcccacacgcagactttgaccaggagtatccagccaggggcacacatgtgcctgcgtgggctctgccttgtcttcgcggaagcattcctgatggaacacccactggccagccaggccatggcttctcccgaccctctggctgccccggtgcttccagtcatgatcgggtgggggacatgtgggctgaccaggacctctgaccctggagcttctaccaaagacacagctgggtctggaccccacggggctggggagggccatgtgcaatatttggagggttttctggagggcagcaggaaggctggggaattccccatgtacagtatttatgtttctttttagatgtgtaccttcccaagcacttatttatgcagtgacctggtcacctggggtgggggtgatttgaggaaatgacatgaggaaaagaaacctattcctgccctggggaccaccctgggactctaaccaagccttcctggagggacccatgcgcccctgagccccattccattcatacagacacacacgtacgcacactgcatgtccaaggccctaaacattgcccgttgacataaactttccagggccccagcctgatggggctgccctcagtcctctagatcaagatgctgactattagggggcagtgattgccatctggggacctgtcaggctttgtcatttcccagtttgttggtggtgcctttagtggttccctaatttgggaacactgatggggccttggacagggctttctctcaggtaggagaaatgggcccatgatctcctcacagtcgcccccagtccttggccctgcttccctgtgtctcatgcactggcacatatggtcaccttggagggcagacctaggagcccctctgaccactgaatccgtctccacaccccttctgccaagggaagccccttcaggaaggaccccccaaagctgaggggctgaatgtagccttttcaacagagaaggctcccacttgagagcagcctctacctgaccccctggaccacagagagccactctgaccctcagccccctcgcttcttcagctaaaactccaaaggtttggtttcagatggggtttgttttgttctgtttggttttggttttgtttggggtgggtgggtcattgcggtcttagattatgtttctcttgctaccaaacagtcatgtattaactctctttggatgatgaagtttaaagagtcaataaatagaaacaccagatgactgca

SEQ ID NO: 175930 - DNA, 579 bp, Homo sapiens
  Payload ID: 14540
  Gene Symbol: ARHGEF17
  Gene Name: Rho guanine nucleotide exchange factor (GEF) 17
  ENST ID: ENST00000544519
  CDS Start-End: 1-579
cttctgttggtccccctgtggctgtgccagaacccataggcttccctacccgagcccatcccacgttgcaggcaccatcgctcgaggacgtcaccaagcagtacatgctgaacctgcactccggtgaggtccctgccccagtgccagtggacatgccctgcttgcctctggctgcaccgccctctgctgaggccaagccccctgaggcagctcggcctgcagatgagcctacccctgccagcaagtgctgcagcaagccacaggtggacatgcggaagcacgtggccatgaccctgctggacacagagcagtcgtatgtggagtcgctgcgcaccctgatgcaggtggggctcggggcccactcccctgagaatggcctttctgagcctaggaggctgtcagatgggtgtgagcaaacccctttcatggacaagggactgaggccagagagccgtgtccctggcatccgtcgcctttccatgaagaacccccagcatggccattccagagaaggaggaaggcttctcccgggcaagagagaatgcagaggggccaggccaccccagggcaggcgtccct

SEQ ID NO: 175931 - DNA, 3029 bp, Homo sapiens
  Payload ID: 14541
  Gene Symbol: ARHGEF19
  Gene Name: Rho guanine nucleotide exchange factor (GEF) 19
  Uniprot ID: Q8IW93
  ENST ID: ENST00000270747
  CDS Start-End: 138-2546
ctgacatgctgacatcgccccctgaggacttggctgcaaccccagagcccccagggtgtcccggagccctggaccgtgctggcagctggacggagctccctggctgagggccaggtgggtggcagagcaaaagaggaatggactgtgggccacctgctaccctccagccccacctgactgggccacctggcactgcccaccaccctgtagcagtgtgccagcaggagagtctgtcctttgcagagctgcccgccctgaagcccccgagcccagtgtgtctggaccttttccctgttgccccagaggagcttcgggctcctggcagccgctggtccctggggacccctgcccctctccaagggttgctatggccattatccccaggaggctcagatacagagatcaccagcggggggatgcggcccagcagggctggcagctggccacactgtcctggtgcccagcccccagctctggagggaccctggagtccccgacacacacagccacagcgccgggccagccacggctcggagaagaagtctgcctggcgcaagatgcgggtgtaccagcgtgaagaggtccccggctgccccgaggcccacgctgtcttcctagagcctggccaggtagtgcaagagcaggccctgagcacagaggagcccagggtggagttgtctgggtccacccgagtgagcctcgaaggtcctgagcggaggcgcttctcggcatcggagctgatgacccggctgcactcttctctgcgcctggggcggaattcagcagcccgggcactcatctctgggtcaggcaccggagcagcccgggaagggaaagcatctggaatggaggctcgaagtgtagagatgagcggggaccgggtgtcgcggccagcccctggtgactcacgagagggcgattggtccgagcccaggctagacacacaggaagagccgcctttggggtccaggagcaccaacgagcggcgccagtctcgattcctccttaactccgtcctctatcaggaatacagcgacgtggccagcgcccgcgaactgcggcggcagcagcgcgaggaggagggcccgggggacgaggccgagggcgcagaggaggggccggggccgccgcgggccaacctctcccccagcagctccttccgggcgcagcgctcggcgcgaggctccaccttctcgctgtggcaggatatccccgacgtacgcggcagcggcgtcctggccacgctgagcctgcgggactgcaagctgcaggaggccaagtttgagctgatcacctccgaggcctcctacatccacagcctgtcggtggctgtgggccacttcttaggctctgccgagctgagcgagtgtctgggggcgcaggacaagcagtggctgttttccaaactgcccgaggtcaagagcaccagcgagaggttcctgcaggacctggagcagcggctggaggcagatgtgctgcgcttcagcgtgtgcgacgtggtgctggaccactgcccggccttccgcagagtctacctgccctatgtcaccaaccaggcctaccaggagcgcacctaccagcgcctgctcctggagaaccccaggttccctggcatcctggctcgcctggaggagtctcctgtgtgccagcgtctgccccttacctccttccttatcctgcccttccagaggatcacccgcctcaagatgttggtggagaacatcctgaagcggacagcacagggctctgaagacgaagacatggccaccaaggccttcaatgcgctcaaggagctggtgcaggagtgcaatgctagtgtacagtccatgaagaggacagaggaactcatccacctgagcaagaagatccactttgagggcaagattttcccgctgatctctcaggcccgctggctggttcggcatggagagttggtagagctggcaccactgcctgcagcaccccctgccaagctgaagctgtccagcaaggcagtctacctccacctcttcaatgactgcttgctgctctctcggcggaaggagctagggaagtttgccgttttcgtccatgccaagatggctgagctgcaggtgcgggacctgagcctgaagctgcagggcatccccggccacgtgttcctcctccagctcctccacgggcagcacatgaagcaccagttcctgctgcgggcccggacggaaagtgagaagcagcgatggatctcagccttgtgcccctccagcccccaggaggacaaggaggtcatcagtgagggggaagattgcccccaggttcagtgtgttaggacatacaaggcactgcacccagatgagctgaccttggagaagactgacatcctgtcagtgaggacctggaccagtgacggctggctggaaggggtccgcctggcagatggtgagaaggggtgggtgccccaggcctatgtggaagagatcagcagcctcagcgcccgcctccgaaacctccgggagaataagcgagtcacaagtgccaccagcaaactgggggaggctcctgtgtgatgggcagccatggcctaggaccccacctccatgcctggctcctggatggtcctggaggggcctgcagtgtctccattccccaagctgctcctgctggcacttcgcttctgtggccttggcattgagggcacaggctggacacaggaatgggggcgcctccagagggtctctccgtcctcatgctcctcagtgtccacacttcaaggccaaggatagtttcttcctctgacatggggaccataacaggtgatcactgatacctggcaaagactggggccctctcctttctatgtcctcaatcctgcctgactcttggtccttctggcagggacctggctggggaacgttctggtgctgatggtgctgggacctatatgtatatttatatatatctggggtcttgtctaccacctcccctggtcagagcctgagtgggtgctggttgctgtgtcttgtctgtaaataaactcctatcatgccttt

SEQ ID NO: 175932 - DNA, 921 bp, Homo sapiens
  Payload ID: 14541
  Gene Symbol: ARHGEF19
  Gene Name: Rho guanine nucleotide exchange factor (GEF) 19
  ENST ID: ENST00000449495
  CDS Start-End: 1-921
ggcgggatcgaggacaggaaaggcttgcacaatttcccgcggcgggacgtgggtcgccgggcccgcccggcgccagattaggagtggggctagagaaggggcgaggacgcgaggtgtggcgtcctggggtctggggatgtgaggccagggcctccgaggtgaactggtcctgccctttcgaccccgtgtgtgccctccctcaggccaagtttgagctgatcacctccgaggcctcctacatccacagcctgtcggtggctgtgggccacttcttaggctctgccgagctgagcgagtgtctgggggcgcaggacaagcagtggctgttttccaaactgcccgaggtcaagagcaccagcgagaggttcctgcaggacctggagcagcggctggaggcagatgtgctgcgcttcagcgtgtgcgacgtggtgctggaccactgcccggccttccgcagagtctacctgccctatgtcaccaaccaggcctaccaggagcgcacctaccagcgcctgctcctggagaaccccaggttccctggcatcctggctcgcctggaggagtctcctgtgtgccagcgtctgccccttacctccttccttatcctgcccttccagaggatcacccgcctcaagatgttggtggagaacatcctgaagcggacagcacagggctctgaagacgaagacatggccaccaaggccttcaatgcgctcaaggagctggtgcaggagtgcaatgctagtgtacagtccatgaagaggacagaggaactcatccacctgagcaagaagatccactttgagggcaagattttcccgctgatctctcaggcccgctggctggttcggcatggagagttggtagagctggcaccactgcctgcagcaccccctgccaagctgaagctgtccagcaagg

SEQ ID NO: 175933 - DNA, 582 bp, Homo sapiens
  Payload ID: 14541
  Gene Symbol: ARHGEF19
  Gene Name: Rho guanine nucleotide exchange factor (GEF) 19
  ENST ID: ENST00000441785
  CDS Start-End: 1-504
gaaaggcttgcacaatttcccgcggcgggacgtgggtcgccgggcccgcccggcgccagattaggagtggggctagagaaggggcgaggacgcgaggtgtggcgtcctggggtctggggatgtgaggccagggcctccgaggtgaactggtcctgccctttcgaccccgtgtgtgccctccctcaggccaagtttgagctgatcacctccgaggcctcctacatccacagcctgtcggtggctgtgggccacttcttaggctctgccgagctgagcgagtgtctgggggcgcaggacaagcagtggctgttttccaaactgcccgaggtcaagagcaccagcgagaggttcctgcaggacctggagcagcggctggaggcagatgtgctgcgcttcagcgtgtgcgacgtggtgctggaccactgcccggccttccgcagagtctacctgccctatgtcaccaaccaggcctaccaggagcgcacctaccagcgcctgctgtagggctgggggctctgaaaggggcgggggcgtggagggagtctcaggcaggtgtaggcactgagggctgggtgacgtaag

SEQ ID NO: 175934 - DNA, 2552 bp, Homo sapiens
  Payload ID: 14542
  Gene Symbol: ARHGEF25
  Gene Name: Rho guanine nucleotide exchange factor (GEF) 25
  Uniprot ID: Q86VW2
  ENST ID: ENST00000286494
  CDS Start-End: 461-2203
attcagctctccgctccgctgggacccgcacagcgccagtggctcgggggtcggccctcgcctcctccccggcccgggcctagagccacccctaaccagaggccggagacagctggagcggctgccgcatcccggcccagcctcccctaccatccctcccccttccactggacatctggaccctaggcccccgcaccgacagggttccggaaaccctccccgcccagcccggcggccgggccccgcgcctctctctctctagagcccccagccctcctcaagactagacttccgcctacccctggacacctcctcccggtcccctccctccccccctcccacagcctggaccggggtaggagggagggggggtgtgcgcccggcgccgtccccgccccgccccccgtgattccccctgcatggccggcccgggtggggggcgcgggggggcccgggcgccatgcggggggggcacaaagggggtcgctgtgcctgtccccgtgtgatccgaaaagtgctggcaaaatgcggctgctgcttcgcccgggggggacgtgaatcctattccattgcgggcagtgaggggagtatatcggcttctgctgcctccggtctggctgccccctctggccccagctctggcctcagctctggcccctgttccccaggccccccagggcccgtcagtggcctgaggagatggttggatcattccaaacattgtctcagtgtggaaactgaggcagacagtggtcaggcaggaccatatgagaactggatgttggagccagctctagccacaggagaggagctgccggaactgaccttgctgaccacactgttggagggccctggagataagacgcagccacctgaagaggagactttgtcccaagcccctgagagtgaggaggaacagaagaagaaggctctggaaaggagtatgtatgtcctgagtgaactggtagaaacagagaaaatgtacgtggacgacttggggcagattgtggagggttatatggccaccatggctgctcagggggtccccgagagtcttcgaggccgtgacaggattgtgtttgggaatatccagcaaatctatgagtggcaccgagactatttcttgcaagagctacaacggtgtctgaaagatcctgattggctggctcagctattcatcaaacacgagcgccggctgcatatgtatgtggtgtactgtcagaataagcccaagtcagagcatgtggtgtcagagtttggggacagctactttgaggagctccggcagcagctggggcaccgcctgcagctgaacgacctcctcatcaaacctgtgcagcggatcatgaaataccagctgctgctcaaggattttctcaagtattacaatagagctgggatggatactgcagacctagagcaagctgtggaggtcatgtgctttgtgcccaagcgctgcaacgatatgatgacgctggggagattgcggggatttgagggcaaactgactgctcaggggaagctcttgggccaggacactttctgggtcaccgagcctgaggctggagggctgctgtcttcccgaggtcgagagaggcgcgtcttcctctttgagcaaatcatcatcttcagtgaagccctgggaggaggagtgagaggtggaacacagcctggatatgtatacaagaacagcattaaggtgagctgcctgggactggaggggaacctccaaggtgacccttgccgctttgcactgacctccagagggccagagggtgggatccagcgctatgtcctgcaggctgcagaccctgctatcagtcaggcctggatcaagcatgtggctcagatcttggagagccaacgggacttcctcaacgcattgcagtcacccattgagtaccagagacgggagagccagaccaacagcctggggcggccaagagggcctggagtggggagccctggaagaattcagcttggagatcaggcccagggcagcacacacacacccatcaatggctctctcccctctctgctgctgtcacccaaaggggaggtggccagagccctcttgccactggataaacaggcccttggtgacatcccccaggctccccatgactctcctccagtctctccaactccaaaaacccctccctgccaagccagacttgccaagctggatgaagatgagctgtaactggtgaaaaccatgggggtggtgctgactcagccgcctattccccaaggagcttcagggcagtccttctggcactgctccagaattcctccttcttggtgtgtctggagggtgggcaaggctgggagggatatcaacttggaggagaacacctagacccaaggacttttttctgcccaaggaacacagtttccttcagctcccatccctatgcatgcatcatggtccccccaaaaggaggatatgtgggtgggtgggagggctggggcaggggccagatagaaattattggttttgttttttaattttgtttttcctgttttctgagaataaaggttttgttatatca

SEQ ID NO: 175935 - DNA, 2246 bp, Homo sapiens
  Payload ID: 14542
  Gene Symbol: ARHGEF25
  Gene Name: Rho guanine nucleotide exchange factor (GEF) 25
  Uniprot ID: Q86VW2
  ENST ID: ENST00000333972
  CDS Start-End: 38-1897
ctcgaccctgaaacttggagcagggtgggggttcagtatgaagcccccggaccgccccgcccctggccgcactgaccggatactgggggtcatggggggcatgctgcgcgcatgcgccctccctgggcaggaggggcccccaaggagaagccctctagggttggtgggtaccgagccagagtctgaacgtacggagggagatcacagaagggatcgcgaacatgaggtcctcgccggggctctgcagcccgaatcctattccattgcgggcagtgaggggagtatatcggcttctgctgcctccggtctggctgccccctctggccccagctctggcctcagctctggcccctgttccccaggccccccagggcccgtcagtggcctgaggagatggttggatcattccaaacattgtctcagtgtggaaactgaggcagacagtggtcaggcaggaccatatgagaactggatgttggagccagctctagccacaggagaggagctgccggaactgaccttgctgaccacactgttggagggccctggagataagacgcagccacctgaagaggagactttgtcccaagcccctgagagtgaggaggaacagaagaagaaggctctggaaaggagtatgtatgtcctgagtgaactggtagaaacagagaaaatgtacgtggacgacttggggcagattgtggagggttatatggccaccatggctgctcagggggtccccgagagtcttcgaggccgtgacaggattgtgtttgggaatatccagcaaatctatgagtggcaccgagactatttcttgcaagagctacaacggtgtctgaaagatcctgattggctggctcagctattcatcaaacacgagcgccggctgcatatgtatgtggtgtactgtcagaataagcccaagtcagagcatgtggtgtcagagtttggggacagctactttgaggagctccggcagcagctggggcaccgcctgcagctgaacgacctcctcatcaaacctgtgcagcggatcatgaaataccagctgctgctcaaggattttctcaagtattacaatagagctgggatggatactgcagacctagagcaagctgtggaggtcatgtgctttgtgcccaagcgctgcaacgatatgatgacgctggggagattgcggggatttgagggcaaactgactgctcaggggaagctcttgggccaggacactttctgggtcaccgagcctgaggctggagggctgctgtcttcccgaggtcgagagaggcgcgtcttcctctttgagcaaatcatcatcttcagtgaagccctgggaggaggagtgagaggtggaacacagcctggatatgtatacaagaacagcattaaggtgagctgcctgggactggaggggaacctccaaggtgacccttgccgctttgcactgacctccagagggccagagggtgggatccagcgctatgtcctgcaggctgcagaccctgctatcagtcaggcctggatcaagcatgtggctcagatcttggagagccaacgggacttcctcaacgcattgcagtcacccattgagtaccagagacgggagagccagaccaacagcctggggcggccaagagggcctggagtggggagccctggaagaattcagcttggagatcaggcccagggcagcacacacacacccatcaatggctctctcccctctctgctgctgtcacccaaaggggaggtggccagagccctcttgccactggataaacaggcccttggtgacatcccccaggctccccatgactctcctccagtctctccaactccaaaaacccctccctgccaagccagacttgccaagctggatgaagatgagctgtaactggtgaaaaccatgggggtggtgctgactcagccgcctattccccaaggagcttcagggcagtccttctggcactgctccagaattcctccttcttggtgtgtctggagggtgggcaaggctgggagggatatcaacttggaggagaacacctagacccaaggacttttttctgcccaaggaacacagtttccttcagctcccatccctatgcatgcatcatggtccccccaaaaggaggatatgtgggtgggtgggagggctggggcaggggccagatagaaattattggttttgttttttaattttgtttttcctgttttctgagaataaaggttttgttatatca

SEQ ID NO: 175936 - DNA, 2103 bp, Homo sapiens
  Payload ID: 14542
  Gene Symbol: ARHGEF25
  Gene Name: Rho guanine nucleotide exchange factor (GEF) 25
  Uniprot ID: Q86VW2
  ENST ID: ENST00000616622
  CDS Start-End: 331-1755
gggggtcgctgtgcctgtccccgtgtgatccgaaaagtgctggcaaaatgcggctgctgcttcgcccgggggggacgtggggtgccctggtgaaattttctatcctggccaactcaaatgaggatggcaagagagtgagcccttggagagagaggctgagcatcatgaagagaagaccctgggagttccctggggaccctgagtctggagctggggcaaggccccccagggcccgtcagtggcctgaggagatggttggatcattccaaacattgtctcagtgtggaaactgaggcagacagtggtcaggcaggaccatatgagaactggatgttggagccagctctagccacaggagaggagctgccggaactgaccttgctgaccacactgttggagggccctggagataagacgcagccacctgaagaggagactttgtcccaagcccctgagagtgaggaggaacagaagaagaaggctctggaaaggagtatgtatgtcctgagtgaactggtagaaacagagaaaatgtacgtggacgacttggggcagattgtggagggttatatggccaccatggctgctcagggggtccccgagagtcttcgaggccgtgacaggattgtgtttgggaatatccagcaaatctatgagtggcaccgagactatttcttgcaagagctacaacggtgtctgaaagatcctgattggctggctcagctattcatcaaacacgagcgccggctgcatatgtatgtggtgtactgtcagaataagcccaagtcagagcatgtggtgtcagagtttggggacagctactttgaggagctccggcagcagctggggcaccgcctgcagctgaacgacctcctcatcaaacctgtgcagcggatcatgaaataccagctgctgctcaaggattttctcaagtattacaatagagctgggatggatactgcagacctagagcaagctgtggaggtcatgtgctttgtgcccaagcgctgcaacgatatgatgacgctggggagattgcggggatttgagggcaaactgactgctcaggggaagctcttgggccaggacactttctgggtcaccgagcctgaggctggagggctgctgtcttcccgaggtcgagagaggcgcgtcttcctctttgagcaaatcatcatcttcagtgaagccctgggaggaggagtgagaggtggaacacagcctggatatgtatacaagaacagcattaaggtgagctgcctgggactggaggggaacctccaaggtgacccttgccgctttgcactgacctccagagggccagagggtgggatccagcgctatgtcctgcaggctgcagaccctgctatcagtcaggcctggatcaagcatgtggctcagatcttggagagccaacgggacttcctcaacgcattgcagtcacccattgagtaccagagacgggagagccagaccaacagcctggggcggccaagagggcctggagtggggagccctggaagaattcagcttggagatcaggcccagggcagcacacacacacccatcaatggctctctcccctctctgctgctgtcacccaaaggggaggtggccagagccctcttgccactggataaacaggcccttggtgacatcccccaggctccccatgactctcctccagtctctccaactccaaaaacccctccctgccaagccagacttgccaagctggatgaagatgagctgtaactggtgaaaaccatgggggtggtgctgactcagccgcctattccccaaggagcttcagggcagtccttctggcactgctccagaattcctccttcttggtgtgtctggagggtgggcaaggctgggagggatatcaacttggaggagaacacctagacccaaggacttttttctgcccaaggaacacagtttccttcagctcccatccctatgcatgcatcatggtccccccaaaaggaggatatgtgggtgggtgggagggctggggcaggggccagatagaaattattggttttgttttttaattttgtttttcctgttttctgagaataaaggttttgttatatc

SEQ ID NO: 175937 - DNA, 5254 bp, Homo sapiens
  Payload ID: 14543
  Gene Symbol: ARHGEF26
  Gene Name: Rho guanine nucleotide exchange factor (GEF) 26
  Uniprot ID: Q96DR7
  ENST ID: ENST00000356448
  CDS Start-End: 285-2900
agaactctgcgctactgcccacgcatctcacaaagtctactacgccgcgcgttctcggtttcaacgcacctccaggattcagggcttcctaagctgcaattcagcagggctcccttgcttgttctcactctgtgcccccggcaacgaccccgcgcgcctacactcccgtgccgcctcagctactagtccgcaacttctagccccaaaacgctggagctcagaacccagctcaggcaagactaactcggtgttgctcctcccggcgctgacttcgaggcccggctatggacggcgagagcgaggtggatttttctagcaacagcataacccctttgtggcggaggcggtcgattcctcagccccaccaggttctgggccggagcaagccgaggccccagtcctaccagagccccaacgggttactaattacggatttcccggtggaggacggagggacgctcctcgcagcgcagattcccgcccaggtgcccaccgcctcggacagcaggacggtacataggagccccctgcttctgggcgcccagcggagagcggtggccaatggtgggacggcatccccggagtacagggctgcctctcctcgacttcgacggcccaagtcacccaagctccccaaagcggtgcctggcggctccccgaaatccccagcaaatggcgcggtgaccttgcctgcgccgccgccgccgccggttctgcgccccccgcggactcctaacgcgcccgccccctgcacccccgaggaggaccttactgggttgactgccagcccggtgccttcgcccactgcaaatggccttgccgctaataacgactctcctgggtcaggttcgcagtccggccggaaggcaaaggaccccgaacgggggctctttcctgggccccagaaaagttcttcggaacaaaaactccccctccaaaggctgccctcccaggagaacgagctcctcgagaatccttccgtggttttgagtacaaacagccccgccgccctcaaagtggggaagcagcagatcattccgaagagtctggcctcggaaattaaaataagtaaatccaacaatcaaaatgtggagccccacaagagactcctcaaggtgcgcagcatggtggagggcctaggaggacccctgggtcacgcaggggaggagagtgaggtcgataacgacgtggatagcccagggtctctgcggagaggcttgcggtccacgtcttatcgcagggcagtggtcagtggctttgattttgacagtcctaccagctcgaagaagaagaacagaatgtcccagcctgttctgaaagtggtgatggaagacaaggagaagttttccagtctgggaaggataaagaaaaaaatgctgaaaggacaaggaacatttgatggggaagaaaatgctgtcctgtatcaaaactacaaggaaaaggcccttgacattgattctgatgaagagtcagagcccaaagaacagaagtcagatgaaaaaattgtgattcaccataagccattgagatccacatggagccaactctctgcggtgaaaagaaagggattatctcagacagtaagccaggaggaaagaaagagacaagaggctatctttgaagtcatatcctctgaacattcatatttactcagcttggagatcttgatacgaatgtttaaaaattctaaagaactgagtgatacaatgactaaaaccgagaggcaccatcttttctccaatattacagatgtctgtgaggcaagcaaaaagttctttatagagttggaagcaagacatcagaataatatcttcatagatgacataagtgacattgtggaaaaacacacagcatccacatttgacccatatgtgaaatactgcacaaatgaagtctaccaacaacgaacactacaaaaattgttagctaccaatccatcctttaaggaagtattgtcaaggattgagtcccatgaagactgtaggaacttacccatgatctcttttctcattctccccatgcagagggtgacccgccttcccctgctgatggatactatctgtcaaaaaacacctaaggactctccgaagtatgaagtctgcaaaagagccttgaaggaagttagcaagttggttcgactatgcaatgagggcgcccggaagatggaaaggactgagatgatgtacacaattaactcccagctggaatttaaaattaagccttttcctttagtctcctcttcccggtggttggtaaaaagaggtgaattgacagcctatgttgaagacactgtgcttttctcaagaaggacatccaaacagcaagtctacttctttctctttaacgatgtgctcattatcaccaagaagaagagtgaagaaagttacaacgtcaatgattattccttaagagatcagctattggtggaatcttgtgacaatgaagagcttaattcttctccagggaagaacagctccacaatgctctattcaagacagagctctgccagtcacctctttactctgacagtccttagtaaccacgcgaatgagaaagtggagatgctactaggagctgagacgcagagcgagcgagcccgctggataactgccctgggacacagcagcgggaagccgcctgcagaccgaacctcactgacccaggtggaaatcgttaggtcatttactgctaagcagccagatgaactctccctgcaggtggctgacgtcgtcctcatctatcaacgtgtcagcgatggctggtatgagggggaacgactacgagatggagaaagaggctggtttcctatggaatgtgccaaggagataacatgtcaagctacaattgataagaatgtggagagaatgggacgcttgctaggactggagaccaacgtgtagtctctcagatggtcttttgttactgcaagatttgcacgacacttaccgggctggttggttctgggctagttttattgttaattttgtcacagcctatttaattaaaagaacgaaaacacttgcctttaagcttgccaggttgttctgctctctcatgagaagagcttggatacagtgagtttgcacagctcagtttttacctaaccacacacttgcagacctcctgaggtacacagaatagctgagcagttcacttcagggatcaggtcatctctgctcctcctagtttcaccatgttctggcaataaaaaacacatattatatcctggttttctctatccttgcattactaaggtgactgtctctctttatacatccttgtatggttctcccagtattagcaagattgtatatctgtaaagaatgtccagttttgtaaatatttccctgcctttttttttctttttttacatctgattttaatgcttcgttaacttcaaaaggaactggtagagttcagaaggtgagctgttgtttttctaaacctcttcccaggaaggggacattgacacttgaatttttgtcacctttttcctcattagaaggaaagtagaaagccttactttaggatttttaaaaaaaaatccatctcaccccatattgttcttaaataagtatagactaattaacctaagctacctttaacaacgtagaatttagatgggttcatatatgtgagaaaaacctgaatataggacaggggtcctacttttttccccacctctgtcgcccaggctagagtatagtggtgtgatcttggcccactgcaacctctgcttcctaggttcaagtgattctcctgcctcagcctcccaagtagctgggattgtaagagtatgccaccacgcccagctactttttgtatttttagtagagacagggtttcatcatgttggccaggatggtctcttaactcctgccctcaagtgatccaccagagaggagatcctcggcctccccaagtgctgggattataggcatgagccaccgtgcccagcctactttctaattaattaaaaaaaaaaaaaaaaaaaaaaaaaaaccttcccaaatgagctgataaaaaactgacgtgaggctgctttgccttcaataatacctagttttcagctgttccaactcgtttccaaatagaaattagctggaacacactacagtaatctcaaggaagggaaaattaggccttaaaagataccaagaagtcagcatggtacccaattgaaaccttttgaccttagtgggaattcattctatttgcactaaaagccttaacttgctgtattcagagtccctcttaactgtgagtttctatagaactttactttttccactagtgcacagagagagaaaggttatcttaatagtcggtttcatggagatgaaggatgggagattaagaggggggaaatgatttttactggcagctatattccctctctgttctatttgctttaacaaagggataaaacctggcaaagtgtacattattggaggactcaaatctgtatgtgacatgtcccaactactgtccgctaactagttatccaaattgtaaagctacagaagcccagttgaggggtaagtgtgcctggctcacacagcctgcaccctgtcacctcggcaatgagccagtgtggggcactggggacttctaacccttggattgctctttttgacctgtgcataccttctaattgtaaaatatatttcagaccgtgagtaccttgagatctgagcaactgtgttaatgaagtaatagcaatggtccacagtgaaagatgtgttggggtttgcaaaacaagcattccgtcacctctttaataatgtcacagactttttaaaagagaggctatcaagttgtaatataatctgtcatgttttatttaggaaggaaggtaaatttgtgcttgcacggggatcattttgtattatttttgctaatacccagttgaagctaaaaagcaactatttgaatcctgtgaattaatttataagaatgttaaacagctttggaaatacatgcatcttatgaatcatagccttatttagcaagatcaatgttaaagtgttgttatatggcaagtatttaacacattcacagtgtttgtttgatttcaactgtgaattgtcttaagttttttcaaacctagttgtttctatggacacctgctctgaattgtacattgacttcattactaaagaacaaaaatgttcatttttgtcccagtaaattgagactgcttgtacactttcagaaaaatatgtgaatttataaagattttgtagatacttgt

SEQ ID NO: 175938 - DNA, 2353 bp, Homo sapiens
  Payload ID: 14543
  Gene Symbol: ARHGEF26
  Gene Name: Rho guanine nucleotide exchange factor (GEF) 26
  Uniprot ID: Q96DR7
  ENST ID: ENST00000465817
  CDS Start-End: 132-1472
ggctgcgcttcggtcccggacccgggccacccacggggtagtgggtgctcctcggccccggacattgcaagccccagaaggcaagactaactcggtgttgctcctcccggcgctgacttcgaggcccggctatggacggcgagagcgaggtggatttttctagcaacagcataacccctttgtggcggaggcggtcgattcctcagccccaccaggttctgggccggagcaagccgaggccccagtcctaccagagccccaacgggttactaattacggatttcccggtggaggacggagggacgctcctcgcagcgcagattcccgcccaggtgcccaccgcctcggacagcaggacggtacataggagccccctgcttctgggcgcccagcggagagcggtggccaatggtgggacggcatccccggagtacagggctgcctctcctcgacttcgacggcccaagtcacccaagctccccaaagcggtgcctggcggctccccgaaatccccagcaaatggcgcggtgaccttgcctgcgccgccgccgccgccggttctgcgccccccgcggactcctaacgcgcccgccccctgcacccccgaggaggaccttactgggttgactgccagcccggtgccttcgcccactgcaaatggccttgccgctaataacgactctcctgggtcaggttcgcagtccggccggaaggcaaaggaccccgaacgggggctctttcctgggccccagaaaagttcttcggaacaaaaactccccctccaaaggctgccctcccaggagaacgagctcctcgagaatccttccgtggttttgagtacaaacagccccgccgccctcaaagtggggaagcagcagatcattccgaagagtctggcctcggaaattaaaataagtaaatccaacaatcaaaatgtggagccccacaagagactcctcaaggtgcgcagcatggtggagggcctaggaggacccctgggtcacgcaggggaggagagtgaggtcgataacgacgtggatagcccagggtctctgcggagaggcttgcggtccacgtcttatcgcagggcagtggtcagtggctttgattttgacagtcctaccagctcgaagaagaagaacagaatgtcccagcctgttctgaaagtggtgatggaagacaaggagaagttttccagtctgggaaggataaagaaaaaaatgctgaaaggacaaggaacatttgatggggaagaaaatgctgtcctgtatcaaaactacaaggaaaaggcccttgacattgattctgatgaagagtcagagcccaaagaacagaagtcagatgaaaaaattgtgattcaccataagccattgagatccacatggagccaactctctgcggtgaagagaaaggttatcttaatagtcggtttcatggagatgaaggatgggagattaagaggggggaaatgatttttactggcagctatattccctctctgttctatttgctttaacaaagggataaaacctggcaaagtgtacattattggaggactcaaatctgtatgtgacatgtcccaactactgtccgctaactagttatccaaattgtaaagctacagaagcccagttgaggggtaagtgtgcctggctcacacagcctgcaccctgtcacctcggcaatgagccagtgtggggcactggggacttctaacccttggattgctctttttgacctgtgcataccttctaattgtaaaatatatttcagaccgtgagtaccttgagatctgagcaactgtgttaatgaagtaatagcaatggtccacagtgaaagatgtgttggggtttgcaaaacaagcattccgtcacctctttaataatgtcacagactttttaaaagagaggctatcaagttgtaatataatctgtcatgttttatttaggaaggaaggtaaatttgtgcttgcacggggatcattttgtattatttttgctaatacccagttgaagctaaaaagcaactatttgaatcctgtgaattaatttataagaatgttaaacagctttggaaatacatgcatcttatgaatcatagccttatttagcaagatcaatgttaaagtgttgttatatggcaagtatttaacacattcacagtgtttgtttgatttcaactgtgaattgtcttaagttttttcaaacctagttgtttctatggacacctgctctgaattgtacattgacttcattactaaagaacaaaaatgttcatttttgtcccagtaaattgagactgcttgtacactttcagaaaaatatgtgaatttataaagattttgtagatactt

SEQ ID NO: 175939 - DNA, 3929 bp, Homo sapiens
  Payload ID: 14543
  Gene Symbol: ARHGEF26
  Gene Name: Rho guanine nucleotide exchange factor (GEF) 26
  Uniprot ID: Q96DR7
  ENST ID: ENST00000465093
  CDS Start-End: 212-2827
aagtgtgggggcgtagtcaggcgtgggggcgggccggcgccggcgccgcggtcggcggcagcgctctcctaagctctcgcggctgcgcttcggtcccggacccgggccacccacggggtagtgggtgctcctcggccccggacattgcaagccccagaaggcaagactaactcggtgttgctcctcccggcgctgacttcgaggcccggctatggacggcgagagcgaggtggatttttctagcaacagcataacccctttgtggcggaggcggtcgattcctcagccccaccaggttctgggccggagcaagccgaggccccagtcctaccagagccccaacgggttactaattacggatttcccggtggaggacggagggacgctcctcgcagcgcagattcccgcccaggtgcccaccgcctcggacagcaggacggtacataggagccccctgcttctgggcgcccagcggagagcggtggccaatggtgggacggcatccccggagtacagggctgcctctcctcgacttcgacggcccaagtcacccaagctccccaaagcggtgcctggcggctccccgaaatccccagcaaatggcgcggtgaccttgcctgcgccgccgccgccgccggttctgcgccccccgcggactcctaacgcgcccgccccctgcacccccgaggaggaccttactgggttgactgccagcccggtgccttcgcccactgcaaatggccttgccgctaataacgactctcctgggtcaggttcgcagtccggccggaaggcaaaggaccccgaacgggggctctttcctgggccccagaaaagttcttcggaacaaaaactccccctccaaaggctgccctcccaggagaacgagctcctcgagaatccttccgtggttttgagtacaaacagccccgccgccctcaaagtggggaagcagcagatcattccgaagagtctggcctcggaaattaaaataagtaaatccaacaatcaaaatgtggagccccacaagagactcctcaaggtgcgcagcatggtggagggcctaggaggacccctgggtcacgcaggggaggagagtgaggtcgataacgacgtggatagcccagggtctctgcggagaggcttgcggtccacgtcttatcgcagggcagtggtcagtggctttgattttgacagtcctaccagctcgaagaagaagaacagaatgtcccagcctgttctgaaagtggtgatggaagacaaggagaagttttccagtctgggaaggataaagaaaaaaatgctgaaaggacaaggaacatttgatggggaagaaaatgctgtcctgtatcaaaactacaaggaaaaggcccttgacattgattctgatgaagagtcagagcccaaagaacagaagtcagatgaaaaaattgtgattcaccataagccattgagatccacatggagccaactctctgcggtgaaaagaaagggattatctcagacagtaagccaggaggaaagaaagagacaagaggctatctttgaagtcatatcctctgaacattcatatttactcagcttggagatcttgatacgaatgtttaaaaattctaaagaactgagtgatacaatgactaaaaccgagaggcaccatcttttctccaatattacagatgtctgtgaggcaagcaaaaagttctttatagagttggaagcaagacatcagaataatatcttcatagatgacataagtgacattgtggaaaaacacacagcatccacatttgacccatatgtgaaatactgcacaaatgaagtctaccaacaacgaacactacaaaaattgttagctaccaatccatcctttaaggaagtattgtcaaggattgagtcccatgaagactgtaggaacttacccatgatctcttttctcattctccccatgcagagggtgacccgccttcccctgctgatggatactatctgtcaaaaaacacctaaggactctccgaagtatgaagtctgcaaaagagccttgaaggaagttagcaagttggttcgactatgcaatgagggcgcccggaagatggaaaggactgagatgatgtacacaattaactcccagctggaatttaaaattaagccttttcctttagtctcctcttcccggtggttggtaaaaagaggtgaattgacagcctatgttgaagacactgtgcttttctcaagaaggacatccaaacagcaagtctacttctttctctttaacgatgtgctcattatcaccaagaagaagagtgaagaaagttacaacgtcaatgattattccttaagagatcagctattggtggaatcttgtgacaatgaagagcttaattcttctccagggaagaacagctccacaatgctctattcaagacagagctctgccagtcacctctttactctgacagtccttagtaaccacgcgaatgagaaagtggagatgctactaggagctgagacgcagagcgagcgagcccgctggataactgccctgggacacagcagcgggaagccgcctgcagaccgaacctcactgacccaggtggaaatcgttaggtcatttactgctaagcagccagatgaactctccctgcaggtggctgacgtcgtcctcatctatcaacgtgtcagcgatggctggtatgagggggaacgactacgagatggagaaagaggctggtttcctatggaatgtgccaaggagataacatgtcaagctacaattgataagaatgtggagagaatgggacgcttgctaggactggagaccaacgtgtagtctctcagatggtcttttgttactgcaagatttgcacgacacttaccgggctggttggttctgggctagttttattgttaattttgtcacagcctatttaattaaaagaacgaaaacacttgcctttaagcttgccaggttgttctgctctctcatgagaagagcttggatacagtgagtttgcacagctcagtttttacctaaccacacacttgcagacctcctgaggtacacagaatagctgagcagttcacttcagggatcaggtcatctctgctcctcctagtttcaccatgttctggcaataaaaaacacatattatatcctggttttctctatccttgcattactaaggtgactgtctctctttatacatccttgtatggttctcccagtattagcaagattgtatatctgtaaagaatgtccagttttgtaaatatttccctgcctttttttttctttttttacatctgattttaatgcttcgttaacttcaaaaggaactggtagagttcagaaggtgagctgttgtttttctaaacctcttcccaggaaggggacattgacacttgaatttttgtcacctttttcctcattagaaggaaagtagaaagccttactttaggatttttaaaaaaaaatccatctcaccccatattgttcttaaataagtatagactaattaacctaagctacctttaacaacgtagaatttagatgggttcatatatgtgagaaaaacctgaatataggacaggggtcctacttttttccccacctctgtcgcccaggctagagtatagtggtgtgatcttggcccactgcaacctctgcttcctaggttcaagtgattctcctgcctcagcctcccaagtagctgggattgtaagagtatgccaccacgcccagctactttttgtatttttagtagagacagggtttcatcatgttggccaggatggtctcttaactcctgccctcaagtgatccaccagagaggagatcctcggcctccccaagtgctgggattataggcatgagccaccgtgcccagcctactttctaattaattaaaaaaaaaaaaaaaaaaaaaaaaaaa

SEQ ID NO: 175940 - DNA, 3781 bp, Homo sapiens
  Payload ID: 14543
  Gene Symbol: ARHGEF26
  Gene Name: Rho guanine nucleotide exchange factor (GEF) 26
  Uniprot ID: Q96DR7
  ENST ID: ENST00000496710
  CDS Start-End: 156-2531
ggcagcgctctcctaagctctcgcggctgcgcttcggtcccggacccgggccacccacggggtagtgggtgctcctcggccccggacattgcaagccccagaaggcaagactaactcggtgttgctcctcccggcgctgacttcgaggcccggctatggacggcgagagcgaggtggatttttctagcaacagcataacccctttgtggcggaggcggtcgattcctcagccccaccaggttctgggccggagcaagccgaggccccagtcctaccagagccccaacgggttactaattacggatttcccggtggaggacggagggacgctcctcgcagcgcagattcccgcccaggtgcccaccgcctcggacagcaggacggtacataggagccccctgcttctgggcgcccagcggagagcggtggccaatggtgggacggcatccccggagtacagggctgcctctcctcgacttcgacggcccaagtcacccaagctccccaaagcggtgcctggcggctccccgaaatccccagcaaatggcgcggtgaccttgcctgcgccgccgccgccgccggttctgcgccccccgcggactcctaacgcgcccgccccctgcacccccgaggaggaccttactgggttgactgccagcccggtgccttcgcccactgcaaatggccttgccgctaataacgactctcctgggtcaggttcgcagtccggccggaaggcaaaggaccccgaacgggggctctttcctgggccccagaaaagttcttcggaacaaaaactccccctccaaaggctgccctcccaggagaacgagctcctcgagaatccttccgtggttttgagtacaaacagccccgccgccctcaaagtggggaagcagcagatcattccgaagagtctggcctcggaaattaaaataagtaaatccaacaatcaaaatgtggagccccacaagagactcctcaaggtgcgcagcatggtggagggcctaggaggacccctgggtcacgcaggggaggagagtgaggtcgataacgacgtggatagcccagggtctctgcggagaggcttgcggtccacgtcttatcgcagggcagtggtcagtggctttgattttgacagtcctaccagctcgaagaagaagaacagaatgtcccagcctgttctgaaagtggtgatggaagacaaggagaagttttccagtctgggaaggataaagaaaaaaatgctgaaaggacaaggaacatttgatggggaagaaaatgctgtcctgtatcaaaactacaaggaaaaggcccttgacattgattctgatgaagagtcagagcccaaagaacagaagtcagatgaaaaaattgtgattcaccataagccattgagatccacatggagccaactctctgcggtgaaaagaaagggattatctcagacagtaagccaggaggaaagaaagagacaagaggctatctttgaagtcatatcctctgaacattcatatttactcagcttggagatcttgatacgaatgtttaaaaattctaaagaactgagtgatacaatgactaaaaccgagaggcaccatcttttctccaatattacagatgtctgtgaggcaagcaaaaagttctttatagagttggaagcaagacatcagaataatatcttcatagatgacataagtgacattgtggaaaaacacacagcatccacatttgacccatatgtgaaatactgcacaaatgaagtctaccaacaacgaacactacaaaaattgttagctaccaatccatcctttaaggaagtattgtcaaggattgagtcccatgaagactgtaggaacttacccatgatctcttttctcattctccccatgcagagggtgacccgccttcccctgctgatggatactatctgtcaaaaaacacctaaggactctccgaagtatgaagtctgcaaaagagccttgaaggaagttagcaagttggttcgactatgcaatgagggcgcccggaagatggaaaggactgagatgatgtacacaattaactcccagctggaatttaaaattaagccttttcctttagtctcctcttcccggtggttggtaaaaagaggtgaattgacagcctatgttgaagacactgtgcttttctcaagaaggacatccaaacagcaagtctacttctttctctttaacgatgtgctcattatcaccaagaagaagagtgaagaaagttacaacgtcaatgattattccttaagagatcagctattggtggaatcttgtgacaatgaagagcttaattcttctccagggaagaacagctccacaatgctctattcaagacagagctctgccagtcacctctttactctgacagtccttagtaaccacgcgaatgagaaagtggagatgctactaggagctgagacgcagagcgagcgagcccgctggataactgccctgggacacagcagcgggaagccgcctgcagaccgaacctgtggctgacgtcgtcctcatctatcaacgtgtcagcgatggctggtatgagggggaacgactacgagatggagaaagaggctggtttcctatggaatgtgccaaggagataacatgtcaagctacaattgataagaatgtggagagaatgggacgcttgctaggactggagaccaacgtgtagtctctcagatggtcttttgttactgcaagatttgcacgacacttaccgggctggttggttctgggctagttttattgttaattttgtcacagcctatttaattaaaagaacgaaaacacttgcctttaagcttgccaggttgttctgctctctcatgagaagagcttggatacagtgagtttgcacagctcagtttttacctaaccacacacttgcagacctcctgaggtacacagaatagctgagcagttcacttcagggatcaggtcatctctgctcctcctagtttcaccatgttctggcaataaaaaacacatattatatcctggttttctctatccttgcattactaaggtgactgtctctctttatacatccttgtatggttctcccagtattagcaagattgtatatctgtaaagaatgtccagttttgtaaatatttccctgcctttttttttctttttttacatctgattttaatgcttcgttaacttcaaaaggaactggtagagttcagaaggtgagctgttgtttttctaaacctcttcccaggaaggggacattgacacttgaatttttgtcacctttttcctcattagaaggaaagtagaaagccttactttaggatttttaaaaaaaaatccatctcaccccatattgttcttaaataagtatagactaattaacctaagctacctttaacaacgtagaatttagatgggttcatatatgtgagaaaaacctgaatataggacaggggtcctacttttttccccacctctgtcgcccaggctagagtatagtggtgtgatcttggcccactgcaacctctgcttcctaggttcaagtgattctcctgcctcagcctcccaagtagctgggattgtaagagtatgccaccacgcccagctactttttgtatttttagtagagacagggtttcatcatgttggccaggatggtctcttaactcctgccctcaagtgatccaccagagaggagatcctcggcctccccaagtgctgggattataggcatgagccaccgtgcccagcctactttctaattaatt

SEQ ID NO: 175941 - DNA, 3857 bp, Homo sapiens
  Payload ID: 14543
  Gene Symbol: ARHGEF26
  Gene Name: Rho guanine nucleotide exchange factor (GEF) 26
  Uniprot ID: Q96DR7
  ENST ID: ENST00000614308
  CDS Start-End: 167-2782
ccgcggtcggcggcagcgctctcctaagctctcgcggctgcgcttcggtcccggacccgggccacccacggggtagtgggtgctcctcggccccggacattgcaagccccagaaggcaagactaactcggtgttgctcctcccggcgctgacttcgaggcccggctatggacggcgagagcgaggtggatttttctagcaacagcataacccctttgtggcggaggcggtcgattcctcagccccaccaggttctgggccggagcaagccgaggccccagtcctaccagagccccaacgggttactaattacggatttcccggtggaggacggagggacgctcctcgcagcgcagattcccgcccaggtgcccaccgcctcggacagcaggacggtacataggagccccctgcttctgggcgcccagcggagagcggtggccaatggtgggacggcatccccggagtacagggctgcctctcctcgacttcgacggcccaagtcacccaagctccccaaagcggtgcctggcggctccccgaaatccccagcaaatggcgcggtgaccttgcctgcgccgccgccgccgccggttctgcgccccccgcggactcctaacgcgcccgccccctgcacccccgaggaggaccttactgggttgactgccagcccggtgccttcgcccactgcaaatggccttgccgctaataacgactctcctgggtcaggttcgcagtccggccggaaggcaaaggaccccgaacgggggctctttcctgggccccagaaaagttcttcggaacaaaaactccccctccaaaggctgccctcccaggagaacgagctcctcgagaatccttccgtggttttgagtacaaacagccccgccgccctcaaagtggggaagcagcagatcattccgaagagtctggcctcggaaattaaaataagtaaatccaacaatcaaaatgtggagccccacaagagactcctcaaggtgcgcagcatggtggagggcctaggaggacccctgggtcacgcaggggaggagagtgaggtcgataacgacgtggatagcccagggtctctgcggagaggcttgcggtccacgtcttatcgcagggcagtggtcagtggctttgattttgacagtcctaccagctcgaagaagaagaacagaatgtcccagcctgttctgaaagtggtgatggaagacaaggagaagttttccagtctgggaaggataaagaaaaaaatgctgaaaggacaaggaacatttgatggggaagaaaatgctgtcctgtatcaaaactacaaggaaaaggcccttgacattgattctgatgaagagtcagagcccaaagaacagaagtcagatgaaaaaattgtgattcaccataagccattgagatccacatggagccaactctctgcggtgaaaagaaagggattatctcagacagtaagccaggaggaaagaaagagacaagaggctatctttgaagtcatatcctctgaacattcatatttactcagcttggagatcttgatacgaatgtttaaaaattctaaagaactgagtgatacaatgactaaaaccgagaggcaccatcttttctccaatattacagatgtctgtgaggcaagcaaaaagttctttatagagttggaagcaagacatcagaataatatcttcatagatgacataagtgacattgtggaaaaacacacagcatccacatttgacccatatgtgaaatactgcacaaatgaagtctaccaacaacgaacactacaaaaattgttagctaccaatccatcctttaaggaagtattgtcaaggattgagtcccatgaagactgtaggaacttacccatgatctcttttctcattctccccatgcagagggtgacccgccttcccctgctgatggatactatctgtcaaaaaacacctaaggactctccgaagtatgaagtctgcaaaagagccttgaaggaagttagcaagttggttcgactatgcaatgagggcgcccggaagatggaaaggactgagatgatgtacacaattaactcccagctggaatttaaaattaagccttttcctttagtctcctcttcccggtggttggtaaaaagaggtgaattgacagcctatgttgaagacactgtgcttttctcaagaaggacatccaaacagcaagtctacttctttctctttaacgatgtgctcattatcaccaagaagaagagtgaagaaagttacaacgtcaatgattattccttaagagatcagctattggtggaatcttgtgacaatgaagagcttaattcttctccagggaagaacagctccacaatgctctattcaagacagagctctgccagtcacctctttactctgacagtccttagtaaccacgcgaatgagaaagtggagatgctactaggagctgagacgcagagcgagcgagcccgctggataactgccctgggacacagcagcgggaagccgcctgcagaccgaacctcactgacccaggtggaaatcgttaggtcatttactgctaagcagccagatgaactctccctgcaggtggctgacgtcgtcctcatctatcaacgtgtcagcgatggctggtatgagggggaacgactacgagatggagaaagaggctggtttcctatggaatgtgccaaggagataacatgtcaagctacaattgataagaatgtggagagaatgggacgcttgctaggactggagaccaacgtgtagtctctcagatggtcttttgttactgcaagatttgcacgacacttaccgggctggttggttctgggctagttttattgttaattttgtcacagcctatttaattaaaagaacgaaaacacttgcctttaagcttgccaggttgttctgctctctcatgagaagagcttggatacagtgagtttgcacagctcagtttttacctaaccacacacttgcagacctcctgaggtacacagaatagctgagcagttcacttcagggatcaggtcatctctgctcctcctagtttcaccatgttctggcaataaaaaacacatattatatcctggttttctctatccttgcattactaaggtgactgtctctctttatacatccttgtatggttctcccagtattagcaagattgtatatctgtaaagaatgtccagttttgtaaatatttccctgcctttttttttctttttttacatctgattttaatgcttcgttaacttcaaaaggaactggtagagttcagaaggtgagctgttgtttttctaaacctcttcccaggaaggggacattgacacttgaatttttgtcacctttttcctcattagaaggaaagtagaaagccttactttaggatttttaaaaaaaaatccatctcaccccatattgttcttaaataagtatagactaattaacctaagctacctttaacaacgtagaatttagatgggttcatatatgtgagaaaaacctgaatataggacaggggtcctacttttttccccacctctgtcgcccaggctagagtatagtggtgtgatcttggcccactgcaacctctgcttcctaggttcaagtgattctcctgcctcagcctcccaagtagctgggattgtaagagtatgccaccacgcccagctactttttgtatttttagtagagacagggtttcatcatgttggccaggatggtctcttaactcctgccctcaagtgatccaccagagaggagatcctcggcctccccaagtgctgggattataggcatgagccaccgtgcccagcctactttctaattaatt

SEQ ID NO: 175942 - DNA, 3975 bp, Homo sapiens
  Payload ID: 14543
  Gene Symbol: ARHGEF26
  Gene Name: Rho guanine nucleotide exchange factor (GEF) 26
  Uniprot ID: Q96DR7
  ENST ID: ENST00000618535
  CDS Start-End: 285-2900
agaactctgcgctactgcccacgcatctcacaaagtctactacgccgcgcgttctcggtttcaacgcacctccaggattcagggcttcctaagctgcaattcagcagggctcccttgcttgttctcactctgtgcccccggcaacgaccccgcgcgcctacactcccgtgccgcctcagctactagtccgcaacttctagccccaaaacgctggagctcagaacccagctcaggcaagactaactcggtgttgctcctcccggcgctgacttcgaggcccggctatggacggcgagagcgaggtggatttttctagcaacagcataacccctttgtggcggaggcggtcgattcctcagccccaccaggttctgggccggagcaagccgaggccccagtcctaccagagccccaacgggttactaattacggatttcccggtggaggacggagggacgctcctcgcagcgcagattcccgcccaggtgcccaccgcctcggacagcaggacggtacataggagccccctgcttctgggcgcccagcggagagcggtggccaatggtgggacggcatccccggagtacagggctgcctctcctcgacttcgacggcccaagtcacccaagctccccaaagcggtgcctggcggctccccgaaatccccagcaaatggcgcggtgaccttgcctgcgccgccgccgccgccggttctgcgccccccgcggactcctaacgcgcccgccccctgcacccccgaggaggaccttactgggttgactgccagcccggtgccttcgcccactgcaaatggccttgccgctaataacgactctcctgggtcaggttcgcagtccggccggaaggcaaaggaccccgaacgggggctctttcctgggccccagaaaagttcttcggaacaaaaactccccctccaaaggctgccctcccaggagaacgagctcctcgagaatccttccgtggttttgagtacaaacagccccgccgccctcaaagtggggaagcagcagatcattccgaagagtctggcctcggaaattaaaataagtaaatccaacaatcaaaatgtggagccccacaagagactcctcaaggtgcgcagcatggtggagggcctaggaggacccctgggtcacgcaggggaggagagtgaggtcgataacgacgtggatagcccagggtctctgcggagaggcttgcggtccacgtcttatcgcagggcagtggtcagtggctttgattttgacagtcctaccagctcgaagaagaagaacagaatgtcccagcctgttctgaaagtggtgatggaagacaaggagaagttttccagtctgggaaggataaagaaaaaaatgctgaaaggacaaggaacatttgatggggaagaaaatgctgtcctgtatcaaaactacaaggaaaaggcccttgacattgattctgatgaagagtcagagcccaaagaacagaagtcagatgaaaaaattgtgattcaccataagccattgagatccacatggagccaactctctgcggtgaaaagaaagggattatctcagacagtaagccaggaggaaagaaagagacaagaggctatctttgaagtcatatcctctgaacattcatatttactcagcttggagatcttgatacgaatgtttaaaaattctaaagaactgagtgatacaatgactaaaaccgagaggcaccatcttttctccaatattacagatgtctgtgaggcaagcaaaaagttctttatagagttggaagcaagacatcagaataatatcttcatagatgacataagtgacattgtggaaaaacacacagcatccacatttgacccatatgtgaaatactgcacaaatgaagtctaccaacaacgaacactacaaaaattgttagctaccaatccatcctttaaggaagtattgtcaaggattgagtcccatgaagactgtaggaacttacccatgatctcttttctcattctccccatgcagagggtgacccgccttcccctgctgatggatactatctgtcaaaaaacacctaaggactctccgaagtatgaagtctgcaaaagagccttgaaggaagttagcaagttggttcgactatgcaatgagggcgcccggaagatggaaaggactgagatgatgtacacaattaactcccagctggaatttaaaattaagccttttcctttagtctcctcttcccggtggttggtaaaaagaggtgaattgacagcctatgttgaagacactgtgcttttctcaagaaggacatccaaacagcaagtctacttctttctctttaacgatgtgctcattatcaccaagaagaagagtgaagaaagttacaacgtcaatgattattccttaagagatcagctattggtggaatcttgtgacaatgaagagcttaattcttctccagggaagaacagctccacaatgctctattcaagacagagctctgccagtcacctctttactctgacagtccttagtaaccacgcgaatgagaaagtggagatgctactaggagctgagacgcagagcgagcgagcccgctggataactgccctgggacacagcagcgggaagccgcctgcagaccgaacctcactgacccaggtggaaatcgttaggtcatttactgctaagcagccagatgaactctccctgcaggtggctgacgtcgtcctcatctatcaacgtgtcagcgatggctggtatgagggggaacgactacgagatggagaaagaggctggtttcctatggaatgtgccaaggagataacatgtcaagctacaattgataagaatgtggagagaatgggacgcttgctaggactggagaccaacgtgtagtctctcagatggtcttttgttactgcaagatttgcacgacacttaccgggctggttggttctgggctagttttattgttaattttgtcacagcctatttaattaaaagaacgaaaacacttgcctttaagcttgccaggttgttctgctctctcatgagaagagcttggatacagtgagtttgcacagctcagtttttacctaaccacacacttgcagacctcctgaggtacacagaatagctgagcagttcacttcagggatcaggtcatctctgctcctcctagtttcaccatgttctggcaataaaaaacacatattatatcctggttttctctatccttgcattactaaggtgactgtctctctttatacatccttgtatggttctcccagtattagcaagattgtatatctgtaaagaatgtccagttttgtaaatatttccctgcctttttttttctttttttacatctgattttaatgcttcgttaacttcaaaaggaactggtagagttcagaaggtgagctgttgtttttctaaacctcttcccaggaaggggacattgacacttgaatttttgtcacctttttcctcattagaaggaaagtagaaagccttactttaggatttttaaaaaaaaatccatctcaccccatattgttcttaaataagtatagactaattaacctaagctacctttaacaacgtagaatttagatgggttcatatatgtgagaaaaacctgaatataggacaggggtcctacttttttccccacctctgtcgcccaggctagagtatagtggtgtgatcttggcccactgcaacctctgcttcctaggttcaagtgattctcctgcctcagcctcccaagtagctgggattgtaagagtatgccaccacgcccagctactttttgtatttttagtagagacagggtttcatcatgttggccaggatggtctcttaactcctgccctcaagtgatccaccagagaggagatcctcggcctccccaagtgctgggattataggcatgagccaccgtgcccagcctactttctaattaatt

SEQ ID NO: 175943 - DNA, 2353 bp, Homo sapiens; identical to SEQ ID NO: 175938
  Payload ID: 14543
  Gene Symbol: ARHGEF26
  Gene Name: Rho guanine nucleotide exchange factor (GEF) 26
  Uniprot ID: Q96DR7
  ENST ID: ENST00000629129
  CDS Start-End: 132-1472

SEQ ID NO: 175944 - DNA, 3781 bp, Homo sapiens; identical to SEQ ID NO: 175940
  Payload ID: 14543
  Gene Symbol: ARHGEF26
  Gene Name: Rho guanine nucleotide exchange factor (GEF) 26
  Uniprot ID: Q96DR7
  ENST ID: ENST00000630729
  CDS Start-End: 156-2531

SEQ ID NO: 175945 - DNA, 5246 bp, Homo sapiens
  Payload ID: 14544
  Gene Symbol: ARHGEF28
  Gene Name: Rho guanine nucleotide exchange factor (GEF) 28
  Uniprot ID: Q8N1W1
  ENST ID: ENST00000296794
  CDS Start-End: 177-5132
aaaccttggcttcagcccggccgccgccaggcgttggcatcgccggggagagccttccggactccgggcggcggctggctgggggcgcgttccgaggcgccctcaggcagggcgcgggggcagagcctcgcctgggttctggaggctgcggggccatcgctccagatgcgaaagccatggagttgagctgcagcgaagcacctctttacgggcagatgatgatctatgcgaagtttgacaaaaatgtgtatcttcctgaagatgctgagttttactttacttatgacggatctcatcagcgacatgtcatgattgcagagcgcatcgaggataacgttctccagtccagcgtcccaggccatgggcttcaggagacggtgacggtatctgtgtgcctctgctcggaaggttactctccggtgaccatgggctctggctcagtgacctacgtggacaacatggcttgcaggctggctcgtctgctggtgacgcaggccaatcgcctcacagcctgcagccaccagaccctgctgaccccatttgccttgacggcaggagcactgcctgccttggatgaggagctcgtgctggctctgacccatctggaattgcctctagagtggactgtgttgggaagttcttcacttgaagtatcttctcacagagaatctcttctacacctggctatgagatggggcctggctaaactttcccagttcttcttgtgtctcccggggggagtccaggccttggctttacccaacgaagagggtgccacaccattagacttagctttacgtgaaggacactccaagctggtggaagacgtcacaaattttcagggcagatggtccccaagcttctcccgagtgcagctcagtgaagaagcctccttgcattacattcactcatcggaaacgctgaccctgaccctgaaccacacagccgagcatttgttggaggcagatattaaactcttccggaaatacttttgggatagagcctttcttgtcaaggcctttgagccagaagccaggccagaggaaagaacagctatgccctccagcggtgcagaaactgaagaagagattaagaattcagtgtccagcagatcagcagctgaaaaggaagatataaagcgtgtcaaaagcctggtggttcaacacaatgaacatgaagaccagcacagcctagatttggatcgctccttcgatatcctaaaaaaatccaagccgccctcgacattgcttgctgcaggccggctttcagacatgctgaatggaggtgatgaagtctacgctaactgtatggtgattgatcaggttggtgatttggatatcagctatattaatatagagggaatcactgccactaccagccctgaatccagaggttgcactctgtggcctcagagcagcaaacacacccttcctacagaaaccagtcccagtgtgtacccacttagtgaaaatgtcgaagggacagcacacactgaagcccagcagtccttcatgtcaccatcaagttcgtgtgcttccaacttgaatctttcttttggttggcatggatttgaaaaggaacaaagtcatctaaagaaaagaagttctagccttgatgccttggacgccgacagtgaaggggaagggcattctgagccatcccacatctgttacactccagggtctcagagctcctcaagaactgggattcctagtggggatgaattggactcttttgagactaacactgaaccggattttaatatctccagggctgaatcccttcctctatcaagtaatctacagtcgaaggaatcactgctttctggagttcgctcacgttcttattcttgctcatcacccaaaatttctttaggaaaaactcgtttggtgcgtgaattaacagtatgcagttcaagtgaagagcaaagagcttacagcttatcggagccaccaagagaaaacagaattcaggaagaagaatgggataaatacatcatacctgccaaatcagagtctgaaaaatataaagtgagtcgaactttcagtttcctcatgaataggatgactagccctcggaataaatcaaagacaaaaagcaaggatgccaaagataaagagaagctgaatcgacatcagtttgccccaggaacattctctggggttctgcagtgtttggtttgtgataaaacactcctggggaaagagtcactgcagtgttctaactgtaatgcaaatgtgcacaaaggttgtaaagatgctgcgcctgcatgcaccaagaaattccaagagaaatataacaagaacaaaccacagaccatccttggaaattcttcatttagagacatcccacagcctggtctctccttgcacccttcttcctccgtgcctgttggattgccgactggaaggagggagactgtgggacaggtccatccattgtccagaagtgttccaggcaccaccttggaaagcttcaggaggtcagccacatccttggagtctgagagtgaccataacagctgcagaagcaggtctcattctgatgagctgctacagtccatgggctcttctccctctacagagtctttcataatggaagatgttgtggattcttctctgtggagtgacctcagcagtgatgcccaggagtttgaagcagaatcttggagtcttgtggtggatccctcattttgtaataggcaggagaaggatgtcatcaaaagacaggatgtcatttttgagctaatgcaaacagagatgcatcacatccagaccctgttcatcatgtctgagatcttcaggaaaggcatgaaagaggagctgcagctggaccacagcaccgtggataaaattttcccctgtttagatgagttgcttgaaatccacaggcatttcttctacagtatgaaggaacgaaggcaggaatcctgtgctggcagcgacaggaattttgtgatcgaccgaattggagatattttggtacaacagttttcagaagaaaatgcaagtaaaatgaagaaaatatatggagaattctgttgccatcataaagaagctgttaacctctttaaagaactccagcagaataaaaagtttcagaattttattaagctccgaaatagtaatcttttggctcgacgccgaggaattccagaatgcattctgttggtcactcagcgtattacaaaataccctgtcttggtggaaaggatattgcagtacacaaaggaaagaactgaggaacataaagacttacgcaaagcgctttgcttaattaaagacatgattgcaacagtggatttaaaagtcaatgaatatgagaaaaaccaaaaatggcttgagatcctaaataagattgaaaacaaaacatacacgaagctcaaaaatggacatgtgtttaggaagcaggcactgatgagtgaagaaaggactctgttatatgatggccttgtttactggaaaactgctacaggtcgtttcaaagatatcctagctctacttctaactgatgtgctgctctttttacaagaaaaagaccagaaatacatctttgcagccgttgatcagaagccatcagttatttcccttcaaaagcttattgctagagaagttgctaatgaggagagaggaatgtttctgatcagtgcttcatctgctggtcctgagatgtatgaaattcacaccaattccaaggaggaacgcaataactggatgagacggatccagcaggctgtagaaagttgtcctgaagaaaaagggggaaggacaagtgaatctgatgaagacaagaggaaagctgaagccagagtggccaaaattcagcaatgtcaagaaatactcactaaccaagaccaacaaatttgtgcgtatttggaggagaagctgcatatctatgctgaacttggagaactgagcggatttgaggacgtccatctagagccccacctccttattaaacctgacccaggcgagcctccccaggcagcctcattactggcagcagcactgaaagaagctgagagcctacaagttgcagtgaaggcctcacagatgggcgccgtgagtcaatcatgtgaggacagttgtggagactctgtcttggcggacacactcagttctcatgatgtaccaggatcaccgactgcctcattagtcacaggagggagagaaggaagaggctgttcggatgtggatcccgggatccagggtgtggtaaccgacttggccgtctctgatgcaggggagaaggtggaatgtagaaattttccaggttcttcacaatcagagattatacaagccatacagaatttaacccgtctcttatacagccttcaggccgccttgaccattcaggacagccacattgagatccacaggctggttctccagcagcaggagggcctgtctctcggccactctatcctccgaggcggccccttgcaggaccagaagtctcgcgacgcggacaggcagcatgaggagctggccaatgtgcaccagcttcagcaccagctccagcaggagcagcggcgctggctgcgcaggtgtgagcagcagcagcgggcgcaggcgaccagggagagctggctgcaggagcgggagcgggagtgccagtcgcaggaggagctgctgctgcggagccggggcgagctggacctccagctccaggagtaccagcacagcctggagcggctgagggagggccagcgcctggtggagagggagcaggcgaggatgcgggcccagcagagcctgctgggccactggaagcacggccggcagaggagcctgcccgcggtgctccttccgggtggccccgaggtaatggaacttaatcgatctgagagtttatgtcatgaaaactcattcttcatcaatgaagctttagtacaaatgtcatttaacactttcaacaaactgaatccatcagttatccatcaggatgccacttaccctacaactcaatctcattctgacttggtgaggactagtgaacatcaagtagacctcaaggtggacccttctcagccttcgaatgtcagtcacaaactgtggacagccgctggttccggccatcagatacttcctttccatgaaagcagcaaggattcttgtaaaaatggtaattaacactttaaacatcatctgtatagtttgaacaagaagttgtccctctgaatggttggctcttgtgtagagtgaatcaaagtcctccctagcatgggaataaatcggtactgatga

SEQ ID NO: 175946 - DNA, 4424 bp, Homo sapiens
  Payload ID: 14544
  Gene Symbol: ARHGEF28
  Gene Name: Rho guanine nucleotide exchange factor (GEF) 28
  Uniprot ID: Q8N1W1
  ENST ID: ENST00000296799
  CDS Start-End: 72-4250
ctggctggggacgccccgagttcttcctgagtctctactgtttcatctgttgatttcaccaaaacaaaaagatggattctgactccgactcaccttttaactactcgtggccttcctttcccaaaatgaagattcgaagaaggacgtccaaacaagatcgctccttcgatatcctaaaaaaatccaagccgccctcgacattgcttgctgcaggccggctttcagacatgctgaatggaggtgatgaagtctacgctaactgtatggtgattgatcaggttggtgatttggatatcagctatattaatatagagggaatcactgccactaccagccctgaatccagaggttgcactctgtggcctcagagcagcaaacacacccttcctacagaaaccagtcccagtgtgtacccacttagtgaaaatgtcgaagggacagcacacactgaagcccagcagtccttcatgtcaccatcaagttcgtgtgcttccaacttgaatctttcttttggttggcatggatttgaaaaggaacaaagtcatctaaagaaaagaagttctagccttgatgccttggacgccgacagtgaaggggaagggcattctgagccatcccacatctgttacactccagggtctcagagctcctcaagaactgggattcctagtggggatgaattggactcttttgagactaacactgaaccggattttaatatctccagggctgaatcccttcctctatcaagtaatctacagtcgaaggaatcactgctttctggagttcgctcacgttcttattcttgctcatcacccaaaatttctttaggaaaaactcgtttggtgcgtgaattaacagtatgcagttcaagtgaagagcaaagagcttacagcttatcggagccaccaagagaaaacagaattcaggaagaagaatgggataaatacatcatacctgccaaatcagagtctgaaaaatataaagtgagtcgaactttcagtttcctcatgaataggatgactagccctcggaataaatcaaagacaaaaagcaaggatgccaaagataaagagaagctgaatcgacatcagtttgccccaggaacattctctggggttctgcagtgtttggtttgtgataaaacactcctggggaaagagtcactgcagtgttctaactgtaatgcaaatgtgcacaaaggttgtaaagatgctgcgcctgcatgcaccaagaaattccaagagaaatataacaagaacaaaccacagaccatccttggaaattcttcatttagagacatcccacagcctggtctctccttgcacccttcttcctccgtgcctgttggattgccgactggaaggagggagactgtgggacaggtccatccattgtccagaagtgttccaggcaccaccttggaaagcttcaggaggtcagccacatccttggagtctgagagtgaccataacagctgcagaagcaggtctcattctgatgagctgctacagtccatgggctcttctccctctacagagtctttcataatggaagatgttgtggattcttctctgtggagtgacctcagcagtgatgcccaggagtttgaagcagaatcttggagtcttgtggtggatccctcattttgtaataggcaggagaaggatgtcatcaaaagacaggatgtcatttttgagctaatgcaaacagagatgcatcacatccagaccctgttcatcatgtctgagatcttcaggaaaggcatgaaagaggagctgcagctggaccacagcaccgtggataaaattttcccctgtttagatgagttgcttgaaatccacaggcatttcttctacagtatgaaggaacgaaggcaggaatcctgtgctggcagcgacaggaattttgtgatcgaccgaattggagatattttggtacaacagttttcagaagaaaatgcaagtaaaatgaagaaaatatatggagaattctgttgccatcataaagaagctgttaacctctttaaagaactccagcagaataaaaagtttcagaattttattaagctccgaaatagtaatcttttggctcgacgccgaggaattccagaatgcattctgttggtcactcagcgtattacaaaataccctgtcttggtggaaaggatattgcagtacacaaaggaaagaactgaggaacataaagacttacgcaaagcgctttgcttaattaaagacatgattgcaacagtggatttaaaagtcaatgaatatgagaaaaaccaaaaatggcttgagatcctaaataagattgaaaacaaaacatacacgaagctcaaaaatggacatgtgtttaggaagcaggcactgatgagtgaagaaaggactctgttatatgatggccttgtttactggaaaactgctacaggtcgtttcaaagatatcctagctctacttctaactgatgtgctgctctttttacaagaaaaagaccagaaatacatctttgcagccgttgatcagaagccatcagttatttcccttcaaaagcttattgctagagaagttgctaatgaggagagaggaatgtttctgatcagtgcttcatctgctggtcctgagatgtatgaaattcacaccaattccaaggaggaacgcaataactggatgagacggatccagcaggctgtagaaagttgtcctgaagaaaaagggggaaggacaagtgaatctgatgaagacaagaggaaagctgaagccagagtggccaaaattcagcaatgtcaagaaatactcactaaccaagaccaacaaatttgtgcgtatttggaggagaagctgcatatctatgctgaacttggagaactgagcggatttgaggacgtccatctagagccccacctccttattaaacctgacccaggcgagcctccccaggcagcctcattactggcagcagcactgaaagaagctgagagcctacaagttgcagtgaaggcctcacagatgggcgccgtgagtcaatcatgtgaggacagttgtggagactctgtcttggcggacacactcagttctcatgatgtaccaggatcaccgactgcctcattagtcacaggagggagagaaggaagaggctgttcggatgtggatcccgggatccagggtgtggtaaccgacttggccgtctctgatgcaggggagaaggtggaatgtagaaattttccaggttcttcacaatcagagattatacaagccatacagaatttaacccgtctcttatacagccttcaggccgccttgaccattcaggacagccacattgagatccacaggctggttctccagcagcaggagggcctgtctctcggccactctatcctccgaggcggccccttgcaggaccagaagtctcgcgacgcggacaggcagcatgaggagctggccaatgtgcaccagcttcagcaccagctccagcaggagcagcggcgctggctgcgcaggtgtgagcagcagcagcgggcgcaggcgaccagggagagctggctgcaggagcgggagcgggagtgccagtcgcaggaggagctgctgctgcggagccggggcgagctggacctccagctccaggagtaccagcacagcctggagcggctgagggagggccagcgcctggtggagagggagcaggcgaggatgcgggcccagcagagcctgctgggccactggaagcacggccggcagaggagcctgcccgcggtgctccttccgggtggccccgaggtaatggaacttaatcgatctgagagtttatgtcatgaaaactcattcttcatcaatgaagctttagtacaaatgtcatttaacactttcaacaaactgaatccatcagttatccatcaggatgccacttaccctacaactcaatctcattctgacttggtgaggactagtgaacatcaagtagacctcaaggtggacccttctcagccttcgaatgtcagtcacaaactgtggacagccgctggttccggccatcagatacttcctttccatgaaagcagcaaggattcttgtaaaaatgatttggacacctcccacactgagtccccaaccccccatgactcaaattcacaccgccctcaactgcaggcgtttataacagaagcaaagctaaatctaccgacaaggacaatgaccagacaagatggggaaactggagatggagccaaagaaaatattgtttacctctaattgtgttgtcatttttccaaacaaaacaaaacactggcacttttgggagaaactttttgtctccattccttatgtatgtgtgattgtctgtgtccaaattgctttaagaataatatttaatatttcctggaagctcatttttttggcatgagtctaattaaattattgaaagcc
